United States Patent Application Publication US 2014/0057251 A1 - sequence listing, part 78

SEQ ID NO: 122057 - DNA, 1716 bp, Cannabis sativa
ttcattctgtttttctgtgcaagtttatcatttaggctcatatctggttaacaaatatatgcgttaacagaaattaactccaatagttaaccgtcaattttcgaagcttaagtcttgttcgtgggacccactttgggtaagttgtagcttaaatttgtaactctcttgagggtgaaatttggagtcgataattttagaattgaatttgctgtgtgaaacattacttgataaattattgaaatagcttcaaaactcaagttgaatcgtgccaatcgaatagatattgggtgagttatggtcgttttactgaaatctattttgagcccaatgcctaggttaacatcctagtgcccaagttaacatccaatgcccaggttgacatgtgacgtcaacctacacgctgggtgagtaggaaaatgtgtcagggatgtattttttagatgcctaagtgatatttagacatgacttagccagtttttgtgttctggttaagccagtcaccagttctgggagatgttgctatttgcaaaataggagactcgaaattacccaatttttgagtaagtcactttgccagaaaagtgaaaatatgaagttgtgatttgaatcttctgacttcatagctcttagtaactatgaaaactagatgaatggtcgagatggaataagaatcagatactgggtgcattggaatcaaaacccaatgcaccaagccatatgttaaagttggaactgggtgctcttttcaaagcctttgtgatgtcttttttgacacgtccagggttcttgatcttgaggatgaggttctctatcccatttttcaccattttagagagtatgcttggagcataatttgcatttgaatgatcgaaccaacacactagattgattgttaacttagtgttgggtgggcgttgggctcaattttgaagcccctataattgtcttttctccccaaaattacttgtatctttgttatttctgttgataaaaacccagaacactttttcaaaaataggattagaaacagcccaagttgacaatatgtcaagctacctgatgggtctagtgccaggtgtcaacctgggcgccaagtccaatttcaggcctttagacagtttcgtttgctcgccaaaaatatttgaatattaatctttaatgaaaatagagaacatgcctggaagaatttttagaaaactcctcgcaattggcctaggttgacataatgtcaacttgggcactggtcccttgttttggccttcaggttggtctgtttcttccatgaaaacattttctccatttttgatgaagataaagaagatgcatgagttggattttcagtttgatgattcgaagtggcctaggttgacaaattgtcaacctgggcaccgagtgctgaaaatgaaagttcttcgaatttgattttgttgcctcaattatgttcctggtgtgtccaattcatgtcctggtgaaaaatcaacccatttttactaagacaatcctaaaaataaacccctaggtgcctaggttaatttctgagatgttgttttgtgtatttttagctctcggggcttggacttggatgtttcatgtcttttgttggaatcttatgccctaaataaaatctatttcaatataatcttatccactattaatagaagattagaattcatttaagtttacatgttatttttatgattatggtttaatatacaa

SEQ ID NO: 122058 - DNA, 614 bp, Cannabis sativa
ccattcggatttaaatttttggaaaacctcaagcgagatattttttctgctgcgttgactgatagtattttggtcataactctctcgatattgcgtggaagtagacaattcaagatgttccggaaagataaaagagaccaactttacttaggatctttgtttttcttatttttttttaatatatttatatagtattccctatatattatataatatgacatctacacaagtttattttataagtaaagttggtctcttttggctggaaatgttgggcatgctttgtagatagattccactatatcaacatcagcaaaagaacaatgacacatgctcactctccaccttcagcacacactcattccccaaaaatataatatatatatatatattaattatatttatatatataaagatagaaactttaaaaagcaaaagttgcctgccctgccatacctcctcttttctctaggatactctctctcaattatgagactgaaaattaatattatttttacagctgctaataatgaatgaaccctattttagaagctcttaattttatgcaaaaggagacaataccaaataagtgagttaaaaaaaaaaaaaaaaaa

SEQ ID NO: 122059 - DNA, 771 bp, Cannabis sativa
  modified_base (99)..(100): a, c, t, g, unknown or other
  modified_base (594)..(607): a, c, t, g, unknown or other
aattgataaggtgaaccaaaaaatacataaatgaatgaaaaatacttctctttctttattgatattgaataatctgtattacattgaaatggagttttnnttagggcataaaacccaaaagtagaccctttcccaataaagcagttggtcttccctgtttcatttttgatccaactaccatacatctgaaccgcctttcccatcttcggtgtaaccatagccatcggaacatggcaggttttatcccagtgagccaatgacccgctattgaaacacaagtggggcagcttctcatacttgaactggacccaggactccggtttcccatccaccgttaagaagaaacccgcatggaacggatgtgaaactcgtacatcaatccaagcccgaatatacccctcctaacaagctctgttttacttcggtcatccgccaagacgaaagaccccaccttctttgccactatcagagcgttgtcattcgaaaggcatctagtgggcaaaccatggaattgcacccaaaatcttgcgacctcaaactcccccacctgaatttccccctcaaccggccatagttttgttgggttttatgccnnnnnnnnnnnnnnatttcaatgtaatccatttcattcaacaccaataaagaaacagaagtatcttccattcatttgttgtgtatgttttggttcatcttatcaattgcttgtctatttgatttgtaaattcatctgaaacccttttcagatatttgatcttgtttattgtgttgtca

SEQ ID NO: 122060 - DNA, 1067 bp, Cannabis sativa
tatatagaaatgaatatatagagaccttggcaagtaatgcttgggctccagcaaacttgttgtcccagctgaattcagaaacagcttggctccaccctttgttggttgaaacatagttcaagtacttgctgttcccagtggccttgtataaccaagttgccccccataacaactcatcctttcattaagtccaaaattacaagttagaatctatatatagttgtccaattttttttccataaaaattgcaaaatatataatatttttccttgagtttgagggactaatacatattttaacatatatttataaaagtgtcaaattaggattactatgttataaatgatggtgcacattaataactatatctacatatattattgatacttttataaatttggtaattgtagccaagtataatttagtagtgtatatatatatggatgactattatagttatatcaataattattatattttttatgacttgttataacattggtaaaaaatttgtttataaactcaaaattaattataattaataatttatttaaaattattttcttaattaaaatatttataataagacttttttaacaattaatatttatatttttttattttttattgataaagaaataaaataaaagtaggctactattaagttacatataattttttacttattttttaattaatcacaattatttaataaatatcaaacgactaaaactaatcataattacactgaattatatattaacatgcataacaagtatttataattataaatggttaggtatgattaagagcttggccttacctgatagccagagtatgagcaatagaaagggcaagaaccttggtaagatcctctatatttgtctgcaaattcaaacaactgtaacacaaaacttctttgttaactatataattaattagaataaggaaactttattagtggtgaaaattaataaccatgtcattttctgtgatcttactgttagaattattattgtggactaatataatcatgagcttaataccataaacacaatcattaacta

SEQ ID NO: 122061 - DNA, 853 bp, Cannabis sativa
aaatgcaaggtgcagacttgaactccattttgtgtttattatatggtctgatattggggaaacacttacaactaaaagtcttaaaggtattgtaatctggttttgataccatgttaaattgcatattgaattgtctcgccattgatgaactagaaacaagaaagaacacaaagaagaagaaaggaaagaaagacaaagaaagaagtctcaactgttatcgatgaaataaagaacttatatacaatagctacaagaaatagaattaacaagatcaatcgaacaactaactgaattgcattaaactcaactaactaggacaactcattaactgttctaacaagctggatacatagtgtttatataagagataaaggttggtgggattacaaggctccatccatgagtagctgatattggaagagagtaattactgtcaaagaacatttcaagaattacaccacctttcaacaactttcttatagggaaatataatattgactaggggtagaaaatgataacaaagactcaagttaagctttattggcctgatatggtttggagtagattaaacactccaatacatatatagctttatactatggttgactgtattgggaagattacaaacaaaatcaatatgactaatcaaaatatcattcatgattctaagtatgcagcctatgagttagctgagaaaactgctgagcatttacttttcgattttcattgaagttctaggtacttttggaagttaaaagatggatgcaatggcatacaatgctcaccacattaccactaggcaagattgagcaggtttattgatgctccacaatcatttacaatcaaatacaat

SEQ ID NO: 122062 - DNA, 624 bp, Cannabis sativa
aggttaaaataaaaatgtaaccatttgaaacttcttcctatatattatatattatatatattaataataatattagaagtaataataaataataagagaataatttatataaatgtttccttaaatttaattatatgatttgactttgtaaatatatgagttgtccatatatgataaaaaaaaaaaaagttatattgtaaaaattaatatttttgtaatatttaatgcagtgtggttaaaactgcgattattgattcaaattgtaaattgcatggcatcgcacatttgacaaaaatgcaaactacaatcgcaccgcaaaaatacaaaaatgtttacttatgtgtactattttattttcccttcttcaatttctctcatttccttttgtttattgagttaccaaaaatattgatcaacaagtgtattacatattaattaatatattataaaatatatttgcactaatatatatatatagtggaaatctcgtctaagcccccttctttctacctcatgccatatgggagttaaattaactaatcagaattaaaaaaaaaaaaaattgtccactgttataaaataatataaaataatataaagtagatgagaagaacgaagaagaag

SEQ ID NO: 122063 - DNA, 3425 bp, Cannabis sativa
  modified_base (1216)..(1225): a, c, t, g, unknown or other
  modified_base (2259)..(2265): a, c, t, g, unknown or other
ttttttaaatgtacattatagaagaaaaattagaaattgaacaatccttacacaatatagaaatttgaaattatatatatgaatattaaatgaataatgaaattatatgaaataattttaaacgtatttttatgtataattttttttaaaataaaatataaatctatatagattactctaaagaattttttttaaaaatatcatcatacaattttcatataaaaagaaagcatataaaaaaatatcttcaaaacaaatgttattaccctatctcatttgtagtcaccactatatttaaaatcgatatcatcaccgtatctcacttgtagtcatcattaatatatattgttatattttgttaataattttaaattaattaataatctgtatttttttttgactaaattagtgatctttaattaaataaattagattaaaaaataattagttaatgatctctaattaaataaaaaataatgagaaaataagaaaattagagaatttaaagtagaataaaaatattggaaaaataagagattaaggagaaattgatggaagtatttgaaagaaaaaatatcttgaaatttataatattataaaatttaaatttaataaattttattgttataaatatttttaatttaaatttagtagatcacaacaaattaatttaaatatttaagtttaaaattattaatttgttcaaaaaaaaaaattgttaaggattggtacataatttagttatagatattttttttttaaaaaaataaatatgtgtaaatgctagcacacaacatgacatatatataattagatttacggttaattaagtattttattatatatttgcatttatttttttgagaaaactttttgcgccccataaaatgataaatacaccctattattaaaaaaatataaacttaaataatttttaaattactcttaatatttttttttttaatttttttcctcacattattttatgttaatttcaatattgattttgattttattttcataattttttctaactcaagtatatattttttttttatttttttctaaaagaatttatataattttttattttaatttttttgtcataatatttaatataatttatttttgtttgataggtatatttttttttaagaatatgaattagaagaaaaaagtttaaaaaaagcctttagtacaattaaaaatataaatnnnnnnnnnnataaaaattattaaaatggagtgtctttataaatttttggtttacagatattttagacaaacaaaagtttaaaaataatttagagacataatttaagaaatatataaagaattgtgatagaaaaaaatgataaaagataaaagtaaaaaaaatatttaaaaatattatgattttattttaacttatcatatatatatatatgtatagattttggaattaagtgttgagatatcatttttaaaaatttaattttttttttttaaaaaaaaaagataagaaaaagccaaaatatggtcaaaacataatttgaatatgttaattttgataatatttttttaaaaagtattatttttaaaattttcaatttaaaaaaacgtggccatatacaaaaaggcaaaatgtggccatataatttaaattttagaattatcaatttcaaaaaaaaaaaaaaaaaaccaaaaccaaaatgtggataaatatatttagatttcataattatatatatatatatatattattgattaatatttatgaaactaataaaaaattaaaaaagagaaaattaaggagagaagagatagtgagattaaagtgattttagagtgccacatcatcgcttcatacttctcatttatatatatatataattttttttcataatatttaatataatttatttttgtttgataagtatatttttttttaagaatataaattagaagaaaaaagttaaaaagaaaagcccttagtacaattaaaaatataaattttatataaataaaaattattaaaattgagtgtctttagaaatttttggtttacagatattttagataaataaaagtttaaaaataatttagagacataatttaagatatatatatataaagaattgtggtagggaaaaaatgataaaagataaaaagtaaaaaaatatttaaaaatattatgattttattttaacttattatatatatatgtatagatttggaatagtgttgatatatcatttttaaaaatttaatttttttttnnnnnnnaaaaaaaaaagaaaagaaaaagccaaaatatggccaaaacataatttgaatatgttaattttgataatatttttttaaaaagtattatttttaaaattttcaatttaaaaagaaaaaataaaacgtggccatataaaaaaaaaaggcaaaatgtggccatataattcaaattttagaattatcaatttcaaaaaaaaaaaaaaaaccacaacgtggataaatatatttagatttcataattatatatattatattaattaatatttatgaaactaataaaaaattaaaaaaagagaaaattaaggagagaagagatagtgagattaaagtaattttagagtgccacattaccgcttcatacttctcctttaaatatatatagatttgattatttattaattttacttattgtttaaattataagattagatgttatcatatttgatatatttattttaaatatgatattataattataaaatttaaaattagtctagatattttatagatttcataatcataaaatttcaaatttaaaattgacatttttaattattatttttattgtttaaattatgagttaagaaaaataataaaataaatatttttttaaaaagatatattatcatttttgacttaatagacattttaaactttaaaaaatacatttaaaatgcctagatattttgtagaaatttgaaaatatttaaaattgaatatattttatggtttttttaaatcgtaaaatttgtgctctttatatatcatcatttttattgttttaacattaaaaataataatattctaactataacgatctaatttttaaattttatttattttattagtttaatttattaaattataaggtttgaaatatgatattagaaatatcttaatttttcaattacgatattatatcattttatgttattagttattttattcattaaatttatttaaataggctagaaatttaaaagttagttggatatttattttaaattgagatattttaggataatattttaatattatctaaatacattatttaaaatttaaattatgatatttatttttaataatactttatttattaaaaatagaaatatcttaactaactgttgaccgaggttttcggcaaccaatataataataat

SEQ ID NO: 122064 - DNA, 845 bp, Cannabis sativa
ccttcctcttgccacgaccacctttgctagttctcaaacctcattttatctttaattgatgatgtcgagaaatttgtctaccaaactcatttgaaaagtgagtggttgctctgtagaaaataaaacaagttcaagaaatgagcatggaagcgtcataataaaatgaatagtggcaacatacaattaagatccagaccatttattttagcatagttgggattttcactaacaaattgcgttatatcctctctatctaagaggcttccatattcgatcttattttacttgatcgtgtaggtacttatcatatttatctaaaaaaataaattgaaatttttacttttgaactttaacaacctctaaactattaatattccatggttaaaacctgacctataacctgttcaaaactagactgttgtatgttagtagttctgtcagaaatattagaagtggaacatgggggatctatttggcattctcctgcaccacatgtaattgggattggtgatacagagacagatacaggagtgggaatatgtgctaagtgtaaacagtcaggaattggaaagttttgggaattttgtggcttagatgattgagcatggggaaattgatgttcatcaaagatgacatctcttgagatatatattctaccatttgaactaagacacttgtagcccttgtgattaaggctatacccaagaaaggtacaaggtgtgacctgaattggagtttatgtttattatagggtcttatatttggatagcaagtgcagccaaaggttctaaaccagttgtaatctggtttaatgttgaacagaacttctatgggagatttgttgc

SEQ ID NO: 122065 - DNA, 1938 bp, Cannabis sativa
acatatcataccttgcgagagaagatggctaccttgaaaaccaaggtgggagagcttgaggtggagaacaaaaatcttaagaacaaccttgccacaacaactaaagatcttgttacaaagactatcgagcagaacaactttgaagttgatgcacaacattaaatgaatgaagtcttcagagttgaaaaggagagggatgccttcaagaacaaactcaaaaattgcaaacaaaaatgatggagtctgagaccactgccactgatcttggtacaaaaatagaggagcttcaaacaaccattgatcgaagagatgatgtgtatagtcgactctttgatgaccaattctaactgctttggaaaaacaacccaaatatcacactttcccacatatcaaaagagtatagagatgaggaagtttctaagtttagagcaaggcaacttcgggaggcctctcttcctcctaacacaacaactcccacctcatcctcccaaggtgggcatttggtggaaaattcagtgatggtgaacgaggtagtagagcaagtaccacctcgggctaaagtcactcttcttgtggtccctcctaaccaaccttgtggtactcctccatgagagttttagcctactgagatatttatgaagagcgcatgtgctctttgcttcatttgattacacttcaagctatttatatatttgcatgatgactttatgttttccatttcatggtcactttttatagaagtaccgaatacactttattttttttaagttattcttagttaaatagctaattatatgagtttgttcttcaagctctctcgagtcacatgttcaacttactaattttttagagttgatattctttttctagatgaagtgcttatcacgtaactgtgattaaatcccttctctatccattacaacttttagtttaagtatttgtgattttacaaaattcaccattttttaaaaaaaaaaatcttaatgaaaattgtaggattagaaacaagtatagttatatctatacccttatacccccaagtaactaaggtttgattattatccttggttacttatttttgagtttggtaatataaatgtaactattttttgaataaataaatatttttattcaaactttgaactaaacaaaaatattaatagtcactaaggatttgaaataaaaataaaataaattgaccaaatactactcaatttgaactatactaatgaagttattggccaagagctcactgacttcttctttcaaggctacagatctggcttcatcaagtaacctcctctttttttcatttgacatgcgtgtccttgtttgagtttagcacgtgtgttactacgttcagaatcacacccaccatattggagtgcatccatgcacacacttcttgattatcacagaggaactagatgaggactttcttaaaatccttgttcaggtgcttcccaacctttatggttttggttggatcgttggggctaagaaaaacatcttcaagttcctcaatgggatcgaggtcagcccagtcatcgcccactcgagggtctatctcttcaacttcaggaacttctcttgctcccatgtttcccacttcattaactttacttacaaccaatatatgtgcccctggttggggtcgccccctcatagtcacattgtaacactcacgtgcagctagttgatctcctttcactattttgttcccagtagtagttggaaactttaaggctagattcttaatagatgtaattgtcccaagtgtgtacaatgtcggtctccctaaaatgacatggtaggaagacggtaggtctactaccaaaaattcagtcattcaggtgactgtctttggggcttccctgagtatcaatgggagagtgatactgttgggaatttattttaccaggatctaagatctactca

SEQ ID NO: 122066 - DNA, 1710 bp, Cannabis sativa
  modified_base (1671)..(1677): a, c, t, g, unknown or other
ttagtttctttgattcactcattaaagtttctcagaaaagatgattcttaaaacttttgttttgagaatcacataatgtaaatcgctaggaacatgatctatagttatggaatcgtgactttcttaacgaatcgaatgttagttccctttaattgttaattctataactttaaagttgcacactaatttagattgaatcaaaatttcattcactagtgaattaatggtactaaaggataaataagtaattagaagggtataacattattttgaccaaaactagttacgaactgacataagatgtgctaattactagaattgattatatcaatgggcagtaaagtaaaagttagaaaatataattctgcaattactaagagttcaatttcatatttctagtggagtaatcatagagtaaataaattagattatttaattgatgagaccaaataaataatctaatttatttgagcttagaattataggtccatggtcggtgaataaagagttgtataatgttgttcaaaaaaaattattttgaatttgctaaatagttattatttattttgataataaataaataattttttcaaattaatttaataggaaaaagataaaattcgttaagaaaagaattgttgagacaaaagttatcaagacaaaagacatcatccttatcataattaagaaaaggtagccgcctaccatttagtagggtgtccctattgatttggtccttttggattaattaattaattaattaattcaattagataaatatttgaatttaaaaagtggttaaagatatttcaagttagtcgaaatattccctcaaagttagttgagagattacctcatctaaaatatcagtaatcgaattattatagatgttgatttaaataattaaatataatttatttaatggggaaataattaccataaatagaagcttgatttgagaaatcagaagatacattttacattttatttctaaaattcaaaggtaagaaaaattatttttcgctctcaaatagttctttctcatgtgttgaaaatcaatcaacaacagattagacattttatctgaataacccacactattccttgcgtgtgggtgattagtttggaagactacagtgtgagtttttcatcagccaaaaggattcaagttatgagaagtttcaggaataccctaatagtcatcaacaggtatgtattcctttcatataatttatgttctaacttaatgtttatacatttggagatccattgggcctatggtacaatgataatcagatatacaaattcttctactgaatacctaatttagtgccatactactaacacccctaaccctttcccaactattaaaatcttggtagggtcgagtatgacttcctctaattcttctacttgccaaaatttggaatactcataaaaaattcttgggtccaagtcttcctcaattttactagcttcctcagtgatcaccagcatagtatgatgaaccttgattcattattttaacgcaatgttgtaacattctctcgctgttaattagacttctttcacagtctctattccagttggagtttgaaattttaatgataagtgctttattaagctaactgcccccaccccatctaatgcagtgtaacaccctaactagcnnnnnnntattacgtgatttttaaacatattgtgcagctc

SEQ ID NO: 122067 - DNA, 1031 bp, Cannabis sativa
attatatacacacttttataaaatttatttttttattaataattaagaaaatatatagtatatataattaatagtaattttaagatgacacgtttattttaatatgaaaaccaaatgataataactatatatcatgtacaaaaactatataacttcccatgcataaaatatatattttcatagatgtatcatcattattttcaataattaatatataaaaatatattactaattattaataaaaaatagaataaacatttaagttaaaaactattgattacacatgtagtctaatttcaacataaattataatatataatagataaattatttgtattgtcatttaaaaaagtaaaaaaaaaaaaaatacactattaacttatgtaaattaatatttttaacatacaaaatctcatgattgatatctaattataataaatttttaaaaaaattaccgaataaataatatttctcctacataggcacacatatttatgtcaagggttctaataacactatgatctatcaaattgtgagcccaatattgatcaagtgcatatacactatattaaaaagatttctcacttatattaaaaggcatgttggtcacttatgtacaaattttgaaaaatctttttttttgtgtgttgttaaagttctacaatccctaaatttcataaaagtttcatgaaatatattaataaaaaaaagtttaaaaacacattaatataaaatttaaaattgtaccaaataaagcttaattgttactttttttattccaatcttaattctctaaaaatatattttacataaaattcatgaatattcataacaataaaaattaaaataaaataataatattgttcttatttataatgcaatatataattttatttttctcataagcacactataaatattatttagaattttataatatttaaaattataaatcaaacatgagatatctcattcattaaaatagaaagagataaaactacgaatagaaatagaattattattttttatta

SEQ ID NO: 122068 - DNA, 1167 bp, Cannabis sativa
taaaaaaaaatatcccttttattattattatcattattaccatttaaaaaaaaaaaatcatggcatgggtttgttggtagtttggaacttgacaacattaatggcagaaaatttgaagtccttttctcatttatgagctggttaagaagatttgccgcaagcctatgttatagcttgagggagcctagcactaattgatgtcggattttctgttttttttattttatttattttttttgaggcttttggttcttgcagtggtcataaaactctgcccctcttggtctttaatttttggaacatggggccccatagtcttttatgactttattgtatgaaaaagttttgactatagttggctaaatttcgaactatgttcctgctcaaaatgagaacccattgatttttgtagttaacaaaatgtgtttattagtgttttctacaaatagcttttagatttttctcatgaaaaataaagcttcataaaaaatttctttatatatttataaatattcatcaaaaaaggttgaaacttctacaaattaactttttggtaactttgggtgtattttatagtaattatttaactaatattttttctttcaaaaaaaaaaaaaattaatattttacttttaagttagaaaagtaaaatattttcaaaaaagatgtttggtaaacttgttttcatcttttgaaattagttaattttaaaatattttaaacaaatattttaattagactattttgtacttttactaggtatttcatcttctatttttttttgctggaatgtcttccattttttaaaaactcagaattgaagagattccaacaaaagaaaaaaatattttaataattgttttgtaaaattgatatgtaaatatacgcaatcgaaacaagtaatataatgataaataaactatggttctcttcatgattgattatcaattaccaattaattaattctttgtttctatttgatcaataaaaattattggataaaaagtgaataaaacaaactaaaataaaaataataataaaataagaattattatgatctccaactatcttttattttaattaataatgtaattatccaatttttcttcttcctattcaatagataagttaagtgaagaagttataatctggttaagatttataaac

SEQ ID NO: 122069 - DNA, 1238 bp, Cannabis sativa
  modified_base (40)..(66): a, c, t, g, unknown or other
aacattaaatgttatttcttatctatattaataagtaaannnnnnnnnnnnnnnnnnnnnnnnnnntagggcataaaacccaacaagcgagacttagagaggtcgtttatcgagtcggccaaactgaagaaccatgtgctgttggctgtgatgtattcgcacaataaagacacaaatttttgagatggatggatgacccagagtacattattcgatctcactagggggagctagaccgctgtaatagagaagttaacaaccttaatatggcagtttaatgaaagaactgctagaagaggttaggatctcattagagatcctctccaagggagagtattagacagatcaggagggtctacaaataaactatccaaccagattcctctggaaccaggatagaccttcccctacccaaaggaggacaagtcttatcacgaagatctggtggcgagaatagccagactctagcagcaagcagcttataggcaaaccagggatctctggcacgacaatacccacgcttggccaacctttggccggccagcccctttctggtgcacctctggcaagaaatctaggtaaactcccatcccagagtattttcgagcaagtcacccaaaggccaatctttaactggctagggccgggaataggtggaaacacccaagacaataataacttgagaagtgagatcaatcacttcaaatacttagacccacctaactccagaaattggtgtgatctaccccctgtcaacacacagactccacaagccaatcaaggaagaacaagcagccagaccctgcctagcacaagcctcgttggtaggggtgggtatttaatccaatccaacctttttttcctcatccaatccaatccaattagtaattggatttggaaaatcatcatccgacctaatccaattagacatatccaatacaatccaattactaattggattggatcaattttttaattggatatccaattgtacacctaaattttaatattaacataaaaatatgaagaaaaatacgtaaaaattaaatatcaccttttatttaagtttaatactccatatatataccatcattataatgtaatacaaataaaagtttcaacaattaaaacaacatttgtaagtgataaaatagaacaaaacatcgtgaaaataaatacacaaaacaaccaactgttacaaatttaacacaaagataaaatccaataaaaatataatt

SEQ ID NO: 122070 - DNA, 1793 bp, Cannabis sativa
  modified_base (33)..(41): a, c, t, g, unknown or other
ttcatatttagggtattaatcaacatacttgtnnnnnnnnntaagttcctggtaaaataatttcctacaccccaaagctacaatgagcctcgtgatccccgattgggcgatcatggcacaagtaatggaaataaccctgcgaatgttgtcgacccgcctaacgcaccagttgcaaccaccgaggtagtgatccacgctagcatagctgcgattgccactgcaactacgacaacttagaacaacaccgttgtgcgagggggtgttgatacaagcattgaaaataatcgagcagcagagaaagcccatttacaagctccatgggacttctcccttcactgcaaaagtgcaacatgctcgacttccctagggattcaggttatctgaatctctaaaatataaaggtactactaatcccattgattacttaaaaaaattcaatacaattatggaagtagaccaggtacatcaactagcgaagtgtcacatcttggcagcaacctttgaggtgaacgctcatgattggttcagccagttgcctaaggcattcatatcgacttgggagacttttgtggattcattcttaacacacttccaagccacgatcacgtataaatcgccttatacaaccctggctaacatcaagcaggaagtcagtgagtccttataggattattttaaacgttttaatgttgaagtaaccaaggtcgaaaaggccttcgagtctttgttagtttgtatgttgattacaagtgtcttgcgaagaactgattttcgaaaagagttgcaggcttgaagaccaaaatcattggtagaattcttttccatggttgagccgcataagaaaataaaaaattctctagctgaacaccagaggaaagaataccagaggtagaagttctagaagatgaagccccagaggcagcagagtccaaagcttgccaagtccccatccaagaaggaaacatctctaaagagaaaagggggaccgcactttgtcaattacacagaattatcagtcgctcgtgatcacatttacgtgattgaggagaagaatggagtctttagaaagcccctcccccccaattagggaaattgcaataaaagaaacctgaagaagttttgcaagtatcataaggacatcggccataccaccctggagtgctggttcctacaggacgagattgaagaattaatcagacgaggaaaatttgttaagtacaagaaaaacagagaaaaccatccccaaccagatgatcatgatgacacaaacaatgcgagtggatcacgaactcctgacaatatcttaacaattattggagggcctcatattggtcgagattccaaaaagttgcaagaacgatattgtaaggaagtgaaagagaaactgctcaccaatgtaaacaacctaagttagcgccttgagaagtttttcaaaaaagaatacgacgacattaccttcatggaaagtgatgccaggtgggttcatcatccacacgcagacgcactcgtgatcattgcaaatattggaggagataatgttcatcgaattctagtggacaatgggagttcagttaaccttctcaacttccaagcctttaagaaaatggggttgcaagaaaaggatctgcgacctgtaacctcgagcatatgtgggttcactggagatacaatagcactaaaaggaatgatcaatctaccaatcactctaggaactgcctctgtcgctgctaagtcaatggtcgatatcatagaagtcgactagtattcggcatacaacgcagtgataggtcgcc

SEQ ID NO: 122071 - DNA, 527 bp, Cannabis sativa
ccccccccctcagctttgactcttcatattgagttgttctttgagtttttgaaatctcgttgtgttgagtcctttagtgaataagtctgctacttgatcttcgctcttcacttagtgcatctctaattcttccttaagtgttttctctctgagaaaatagtaattcacctccacatgctttgttcgagcatgaaatactagattttctgttagacggatatcaaactgattatcacaataaagtagcacttcaaaacatgtggattggtgtaaagccttcattagttgcatcaacctcgtactttcttgagccaccattgatgctgctctatactctgcttctgtaattgacaaagacactgttggttgccttttgctacaccaagacactactccaaatcaaattttgaatacatacccagtagttgatcgttaggtatcatgatctccaacataatcagcatcgtaagagccaacgatcttaacctcatcacctttcttatagaagagaccatagttaatggtat

SEQ ID NO: 122072 - DNA, 2579 bp, Cannabis sativa
  modified_base (1858)..(1869): a, c, t, g, unknown or other
atttagagaatattggaatcaagggggaggatgaaaaccaggctatcattgtgttgaattctcttccaacagaaagctacgagcattttgttgacaccatgacgtatggtagagaatctttgacattagaggaggtacagagtgcactaatgtcaaaggagatgaagagaaaggtagataaacaagatgacaatgctagtgaagggctctttgtcagaggaaagggttcaaagaaggagaacagtgatcaaagcagtggaaacaaagacaagtctaatgccaagctcaagagaatatgttttctttgtaataagataagccatctgaaaaaggattatccaatcttgaaagattatatctccaagaagaatggaaatgcagatgttgtatctgatggagatgatagtgatggctatgacattgctagtgtgttggtaatttataaagacaagtcaaatacaggttgaatcatcgattcaggatgttccttccatatctgtcctgacaagaagcaattcatcaactacagaactgttaatagtggcactgtcaaattgggttacaatcattcatgtccaattgttggaattggatctgccaagcttcaaatgactggtgatggagttacaatgttagaacatgtgagacatgtaccaaaaataaagagaaatctgatctcaatggcaatgttagatcaagatggatactcagtaatggttgaaaatggctcattaaaggtgacaaaaggttcaagggtggtcgtgagggctactgtgatgaatggaatctatgtactttagggtaatacattcagaaatcaagtcaatacagtggctccgaagggtgaagaaccaactctaatctggcacagaagactgagccacatcagctatggtggtttgaagattttgagcaaacttcgagtatttggtaaggatcagatacatccaatggaactgtgtgagcaatgcatactttggaaagctaccaaagtcaagtttggaattgggaagcatactaccaagggaattgttgactatctacactcagatttgtgggggccatctagaacaaaatcaagaggaggggccaggtttttttttatattcattgatgatttttctagatatgattggattttcatactgaaaaataaaaatgagtcattgagcaaatttaaagaactgagaactgtgttagaaactcaaactggtaagaaagtaaagaagttgaggacaaataatgggcttgagttttgtgcagatgagttcaaagaatacctgcaaactagttgggattggcaagcatctaacaatgcccagaaaccctcagcaaaatggacttactgagagaatgaacagaaccatacttgaaagagttagatgcatgttaatctatgctggtttgccaaaatctttctgggcagaaatagcttttacagcttattatttgatcaacagatgtccatcatctgcaattgaattcaaaacacctgttgaggtgtggaaaggcaagccacgaaaggtatgatcatcttagaatatttggttgccttgtgtatgctcatgtcaaagaagggaagctggatcccagggcaagaaagtgcatcttcctgggatatctagaaggagtaaaaggttacaaagtatggagcattgaagaaggtaatcaccaaaagaattttgtaagtagagatgtgatctttgatgagaagaccatgtacaaggatcttacaaatgtacagaagaatgacataccagacagaaactcaaatggctcaatacagtttgaggtggagtcaaatgaaagggaacatgttgtagatagaacaactgaaccagaagaagaagaagaagannnnnnnnnnnnagaagaagaagaaagaagaagaaatggtagaaagagttgaatttgaggaagagccagatacagaagatgacactcaagattagcagttaactagagatagaaatagaagagcaacaagatcacctgtcagatttggttttgctgatgtaattaactatgctctaagtattgatgcaatgggaaatgaggaacgtgcaacctatgaggaagctatgcaatctgatgataagcttgagtgggataatgctatggatgatgaaatgacttcactaaccaaaaataagacctgtatctgattagaaggcctaaaggtcaaagagttaggctgcaagtgggtgtacagacacaaggatgggattcctggagttgaaaagactaggttcaaggcaagagtagttacaagaggtttctcacaaagaaaaggggtagactacaatgagatcttttcttctgtggtgaaacacacatcaataaggctaatgttgagtattgttgctatcaatgatctggaattggaacaactagatgtcaatacaacttttctgcatggagacttggaggaaaacattctagtgaagcagcttaaggggtatgaattcaaagggaaggaagtgttgagttttatgccctaaataaatctccatttcaatgtaatctttatcctttaaatatcaataaagaaacagaagtatttttcacttatttgtgtg

SEQ ID NO: 122073 - DNA, 1707 bp, Cannabis sativa
ggctaattggcggcgaaacccccttatgtttcattttgtatacagttaacccccttttgatttttttcggtggtaataccccctcaagtcttattctgtttgcaacgttactgttcacttgatttaatcccgttatgtgcctaagtactatatccaactcagcaaaaaaaatgccacatgttaaactaaattatttatgtgtcaattaatactaaataataaaaagaaaataaatgaaaaatgaatcgttaaaaaaagtaaacccttaatcaaatcccaattgatttcaaaaaaaaaaaaaaaaaatcagatcccaaaaggaaaaaaaacccaatcgtgcaaatctaataagtgttggagagggaagctccatcccatcgttaagaagaagggaacgcaacacaaggtcgaagactccattagaatgtcgaaggcacatggagaagatgatggtccacctgattacggtaaggatttgttactttgtttgaacgattttgtggtttcaaagatgtttgagcttcatcttcgaaaaaaaaaaagttgtttggcatttgttcgttattactttgtctgaagaagaagatggttctcataaacatgtaaataattattgtaggaatttaattttttaggctgtgggtagtaggtagtgggttttgtttggatttattttatggaaaatttttatgtggttggtccatttgtattaaattacatttgaatatttgagaatctaagtgagatgtcatctgttaagtggggtacatattcacatgtatttcttttgttgtctgtatgtgatggaatagggtaaaaagttatgggaattttacctatgacatatgctttgtttattttttttatattttgactcaagttgaggtatgtttttcttataatattataaatttttaaatggtacaggagataatgaacaagaaagccaagaaattgaaggtgatgcacctactactcaactgaacatccaaactgatgcaattattgtacatcgggctgaaacagaggttggtgaagaacaacctattgcagatgactttgagcttgaagaggaagagttttttggtgaaccagaagttgagaagcagaatactcgggagccagaagtttgcagctggtgggcagctataacagatttgcatatcgacaatgatgcggaagatgaagggctcgaatctgaatctgatttagcaagtggagatagtgatgaggatagttcgagtaagacaaagttagaatataatccaagcaccaacatagctgacttcaagtgggacattggcttggaatttgggaatgtacaattacttaggactgccgtaaaggagtacttcatacacattaatgcagaatataaattgctagcgaatgatttagaaaaatttagggctaagtgtagagcgccggggtgtcctttctttgtatatggacatgttaaaggaggtatatatttattctaatttaatttcttgttattgtttttgtatagctgtgtagaatatttttatttaagcaaaaaaaaaaatcacaatatatattttgtttatatactgaaggccatatcaaatcattataaataaacaagtacagtaacttggatatacaacatatctcttatttcaataaaaaagttgtaacttggatatcttctatttcaatagttggcatcatgttgtaattatagtt

SEQ ID NO: 122074 - DNA, 1629 bp, Cannabis sativa
atgaagtgttcctttcctcctatcttgctattatgctcatttcatgaagtgtttcatcttgctatcttggttaaagtactgtttcatgctcatgtactattatgctcttatgagatgaggtgtttcgtactcatatactctactcttatgctcttttggagataaggtgttgaataaatttgtaaaatgtaaaacaagataaataaagaggctcttgatcacgaatagaatgatgtagggagagtggtgttatatactcaataattacacaaatgagctgaataacagctttagtcgatttttctaacgtggtgaacaaagttacacataattatcaaagcagcaaactataatcgacggtggagcttcctattgaatcagaatagctcatcgtctaaccgaaaggtatgttttaccaaaccatgagctgcaaaattctaatcgcgagccacatgggacaaaactgcctctaaaaatttagacaataaacggcaccccatcacattgaaaaaacacgttcccattagtaaaagttgtcgccagagctagcaaaattgaaaaaacatcacaacactaaaccaaaaaatatagttacattagaatcacaatcttcaaaataaaaattaaaaaacaaacttataatttaacacacaacccatatcactagcttaacattactaaaaaattaaaaaaccaatataaattctaagtataactagccaaaggtattaccctttggccagtaacaacaaacaagcaccctaatttaaaactgctgaaaatcaatatcaaacagattatatttaaaaaaacttattggtaaattctctgtaagtgtaagccctcgacaaaacaacctacaaaacaacaaaataaaattctattaccacacaatataataaaaaaaataatataatgtcaaagaacgatggtaaatcaatctatcttaaatatgagaacttaaaaagacttgaaatacttatctgttaaaagtaaaaagtcgctgaactagaaatcatgagcacaaaatgaatcacttctcttgcccattgaccataacacaaaactaccctaaacaaatagagacaaatcataaaaaatggcacaaatgccataaaaagcacataaaccgtaaaaggtataaaaattatcaaaaatagtgcaaaaacatgtgtgatctcatctatacttcaaatatataataatactatttgaatagctcgacttaagccgatttagttaggcttttaatccatattaacaaagcacataaccagttcttataggagttgcaactggtgatggttgttgggttttgtgccctaactaaaactctatttcaatgtaatcttgaatttcattatcaataaaagtatgagaattattttattacttgtttagtataatgcttggttcacatgcttatttcatgataatatatttaatagataaattctattaaatccttatcacattgttattcataattattgtgttatctacacagtagaaaataatcaagttatgtgatttaactaattagtctcatgatttatcagtacactgaagtcacactgatatgataatcaataatttggtttacttacacttgtacagtggaatattttt

SEQ ID NO: 122075 - DNA, 894 bp, Cannabis sativa
  modified_base (27)..(30): a, c, t, g, unknown or other
actaatcagattgtaaagagttttatnnnnggcataaaacccaacagttatgacccggggcacttaactctatgaatattttccttctttgcacgtgtcacacattgatatccacatcatcagggccagtttccagttgaaatgagccctttgaatttttttaggttgttaaaaatactctccatactattaatattgttggatttaaggacttttgttcaattttactaatagatgtctaacgttgatgaaagtccagggagtatgatttggtacatatcaaatttcaggagatataatttggtagattcgaaatttgggggtacagtttgatacatggacaatcgcattttagtaaaattgaacagagttagatgaaacttcatgactcccacaatttcaatagtttgaggaggatttttaatggatttaaatgttcaaataaaagaaagaagatttttttaaaaaaaaaaactaagtatacagttaaaaatatatatttttttaaaatgaatataaaataaaaaatatcaaaataattgctttcataaattttagagttacaaataaaactccctaagtaaatataatgcaaaaaaaaaactcaagacaaaaatatccttttcaatgctcatacaatgcacttttagaaggagtctatcaatgcactcctatttgtttgagcatcccaaataattttttaattaatttttttcaaaagttgtaatcatttaaaatatcttgtaaaattttgaaaaatttgtataaaattaacatgctaaaaatagaattcaaacagacctaaatttatttaaatttgataaaatatcaatcaatatatatatatatataaagaagaagtatgagacagtgacatgtcattttaaaatcact

SEQ ID NO: 122076 - DNA, 1655 bp, Cannabis sativa
  modified_base (1429)..(1458): a, c, t, g, unknown or other
aagagaataccatgaaaaatttgaggggacaattatgaatggaggaatatataaaaatttactaaattgggttgcacagaacaaagccttaacatttcctaaaagagtgaaattaagcttctcaatgacattgttacttgtcactttcgatctataatgattagaacaggatacttgtattcccattcctaaaataaaaaaaaaacatgtcaaaatgaaagcaaaaagtgaacacagtgtaaacaaactacaatacaactgctagcaaattgtttaaaaacaacaccatatcaaaattaaaaaaaaaaggtaaataattgcccaaggaatactaaaaaaacataaaaaaaaaaaaatactacaaatattcattacgaaataaagtctatattaaacagaaaataatcccaatcagaaaatctatcactaagaaaacaacaaaattataaaatacataaaacattggaatcaaaatcacaacgaaaaatattaaacaaaacagagacaacatttcaaaataagggcaaaactgaaaaaaaactgaaaccaaaccttaggaatttgatctgcatgcttcttccccctcttaacttctggaatcgaactctttcctctttatcttttttttctttaaaggactgttatcctattttttgcactatgacgtgacagttagctggatgacacgtgtctcactctttcctacctgggcgaaaggttacactcctagtagccctcaaggattggtaaaaaggtccatgttatccatacatagcaggatgtccgggtaaagtcatcaagggaaattcgcccaagcttgatcgtgtgatcaactcgcatgcacaagccaggaaatgtgagttggcaatttcgaagatggacgtcgttttttccaagtgtgcatgtcacaatgataatccctacattcgtgggattaataaaggcaataagcctagatttccaatctctacattgtaattatggaattaaactagtttcttattttattcattatagattatgggaaatcatttttcatataatgagcccttatatataggggtttaatctcactattcagggacacgagatggattcagaaagaacgctcaagagagaaataacgatctaagagagaatcacttagatatccattgtaagagttttagagagagaatactttgttctttatctcataagttaatataacttaaaggcgagtaggctattaccatcatcattgggccgaacctttagaaattttggtgttctttttatttactgtttttactttttattatttactttatctaatcgctttattttgactcattgtcgttggttagaagagaaatcaatattttggtgcttccattgagagtagaaacacaagctttttgtctcaagaagcatttttaacgaccttaannnnnnnnnnnnnnnnnnnnnnnnnnnnnnaaagttcagggggcaaaaattctaattagtctatccacttatatagatgatgtctacataagactctttaagttaatgtaaattaacttagtaggggtatattgggcaactcacttataaaagtgaatatattttaataaaatataatatgagagtatttttaattaatgaatataaaaaataaaggctaattaaga

SEQ ID NO: 122077 - DNA, 1880 bp, Cannabis sativa
gtgttgctccctctcccaacacttagcaaaattaccatgtgttgctccctcatcataagtataggtggtgatggaaagaataccataaggacgtacgaccaagggcaagcccgttaaagctagcacacgtctaataaagcctgaaaagagaagatggttgtacaataaatacgacaagtacaagcagtggagacacaatttgtctcactacaggtacacgctgatatccgaccaatactcctccactacccatttgacacgttgaacctcatggtacaaaaggaattttgtctcttaatatttgtggccacttgtattcttgagccattagagctccttatcaatacctctcttttccattgaagagggggtttgaagataaccatttgtaagggagttttagagattcaatacaacactatttttcttcattaatgttctgtgtttctcttggcttttcatcttcatcccttcacatttgattttctaactaaagtttagttgacaagtttttatcgtcaacagtttggcaccgtctatgggaatgaaaaactctagctacattagttcctaaacaattcactataattttcaagatgtcaagatatttccatcatctcagagaaaatagggttcactcggatgaaaactagcagaccaccatagtaagagaacatcaagctcatgtcaccagaaagggccaaaggaagagtaaccaaagtgtggaccaccaagcaaatactcaaaaagggctcccatcactacgtgacttgataatcgatagataaccccatctatagaagtatttaactatcgagaaggccatctctagtgtcgtgccttccaccatctgtgccatcaaaccctgacactttaaggagttagctcataaagaaaaagcaagtgtactcggtgagttcaagcttccgggctcactactatgaaggggaaataaacgacctccactggaagaataagaaattagaaactactgtggctggtatgcaaaaagtgttgagtggcatactcaaaggcaaagcccaagcctcacacattcgtcatgaaagccacggagtggggctggaacgagatctcaactacatatgctggaaaaggtaattccatgtcatccactaagagcacccctaatgaacacagaaggaacctatggcgagacaaaagctcaacgacgcaattgagacaactcgagcccactcaccatgagaggatttcgcttaagcaaaacaccccataacctaaagaaagagacttcacccaagaggtctcatactagagggcacctcgcctatggctcccccccaagagtaaggtaagctgaaggccttgtctgtcagctttagtgataagtcacacactggttggacaaaatgagtacctctcacgggcacaatgcaaaccacatagaagacccaagttccactcactaaccctcgagagaggatgagtgaaaggatgaagagttagaggcgaaaatgtgagacctatgtcgaaagatagctatcgctatgcagggagacttcaatgatgatgaggagtctgatgaagaatctcctctcttaagggagattcaaatcgaaccacttccaccgaacttcaaggagacacagatgacaccatatgatggtaccactaatccaaagtaccatatcaatgcatttaatgagatgatgaagataaaaaaaaaatggggtgtaaataaaatttccctctaaaatttctaaagacaccccattttaataatttttattttttataaaatttatatctttaattatactaagttttttaattttttttcttctaattcgtattcttaaaaatatatatatatcaagcaaaaataaattatattttaaata

SEQ ID NO: 122078 - DNA, 1720 bp, Cannabis sativa
  modified_base (407)..(424): a, c, t, g, unknown or other
  modified_base (474)..(484): a, c, t, g, unknown or other
ggggttgataaactcgagaaagatcgtctacatatagctcgaagaaagatcgtctacatatagcatgcgaaagaccgtcaacacgtagaaggtctcaacctctgaataaacctcattctccacatcagaggatcccatttcctgcagccgagacctcatttctagcctcacgaaatttctcaataccagagagaggttggcacaaaggtcttcttgtgcaagcttgggtcttaggctggttgggttctttagtagaatccaaaaccacgccaaccaagaccaccttcttcttggattccttgcccacttgaggaggacctttaagatcgctctcaaaatctgtgtcttttcctgtgaagacagagatgaaagatcaatggagcaacaaataataataataataatannnnnnnnnnnnnnnnnnataataataataataatataaatgatccagttcaaaccaccattcacaannnnnnnnnnntaccctcaaaaatctcttgtgaggatcgcccgtaacgatcaacaatgtttcctcagtttgggttgatcggaagctcctcagcctttgaatccttcgtttccaattcaaattgaggcttgaagttcttgggatcgtacagagaagaaaggtggttgaggcatcctagtgttatgaatttggatgaaaaatttatgaactcagatgggacatcttgacgaaagaatgacaatccaatctcaagatgatactcaccaaaaaacaaaaagtgtgtggaacaaggcaagcataagccaccattttatactcaaagtctagtaacaagaaggccaaaggatgggaaatctaacgattgggattgaggcaggaaatgaaaagacggttcataatgaccctcgaaaccgtacaactgccaaaatcaaaggacgcatttttccaaaaagggattatgacaaaaaattcgctctgtaattatttaaaaacagtttttattaaaaaagaactttttaaggggcaattgttatacccaaaaatcggctacaatttcagtggaggacatgtgtcaaggtaaatgaaatatggatcgatgaagtcacatttgatggaataactcattaattgcataagtaacagagtgtacttgcaactcactgactatagggtcttatgcgatgaaaagatacgcaaactgttgttttgtgtattaacaagaaaccatatgttattgaatgcatagagcgagacatcaacttcgtttcacctgggaagacaaaagaaatgcatattgactgtgaaaatacttagtgtataatgtacaaagtataacagtagggtggactcgagacctaataagtgaggcgcctatctatccatagggaggcgcattccagttactttcaccagttaacttcagacatctttccgtaagactgaaagccttgatgagtcagaagctgacattcaattgactgatgaggtattcttagtaaatgagaattgtgattgtcacaatgaaacgttaagcttttaaacaaagaagcaacaagacgtacattgtcgacctcggaaagataggggaaaaagctccagcttactatcaaagtcattggaaccgagtttgtgtcgagacaacctagaatgctatgatttaagacatgtttaaacacacgatcattttgacccagtaaaagcggataaatcacagctgtgtgatatttaaataataaccgcatttatgct

SEQ ID NO: 122079 - DNA, 1297 bp, Cannabis sativa
caagaagaagatactgctgagaaatttgtacagagagaaggtaaacaagtggccactactagcgaaaccagattggagaggggagccgataaaggaaaggggatagtactacaacctgaacaagtagaagaccctcctgaaaaatttgaacaaagagaaggtaaacaagtggtggctactagagaaccgagcttggagagaccaactgataaaggaaaggggatagtactacaacctgaacatgaagaagaccctcctgaaaaatttgaacaaagagaaggtaaacaagtggtgactactaccgagagatcgttggaggaagagatggaagaaatgcagtggaacttcccactaaggtggacggttggagagttatatggtggactgattgacatctttgagcctccctcggagattgagccagctgttgatgattgttctgatcaagatgaacccctgccagagccatctttctcagagttattacaacatgatcgacaacacatggcgccaaatccatttcgtgaactcacccgtgaaagacaagcgttcgaggtggctgctcaacaggcccttctagaggcccaaaaacgagctcaaaaagttcatcatggtcggggaaaatgtctaatcaacaactgcttctgttgtctctgctgctgcgattctttaagcagctcaggctccagtgaccaacaacctcttgctccaagctttgtggttggtacacttaaccactgttgttgctgcaagagctgcaaccttctgtgatattagttaccacaaaacacgacttctgtgatattaatacacatccaactgatactgtagtttcttaccaaacttatatctttgctttctacataatagagtgatttttattcttctttccttttgtgctcagaaattatgtaatgttgattgatattcaaaaaccacgaaatggatacaacatacatagcttttttttttttttaataattttcttatttttcaattcaagcaagtttacgtgtaatataaagcgacatttttcaataataaaaactcaagcgtaccataattattttagggataattaccgtaagtcacaatttttttttgtcaaaaaaaaaaaatacattttacatttaatgaattctttttacatttttacggttttttataaaaataacatgaaaacaataagaaaactacaaagtaacataaatataacatttaaataaaatcaaaataccaataaaaaataacatgcagataacaacaaattaacaagagtacaacataaaaagaccgt

SEQ ID NO: 122080 - DNA, 635 bp, Cannabis sativa
aaatctgattatattgaaaagggttttatttagggcacaaaacccaacacaaggaatcttggttgttggtgtgtaattcattactaattactgtaaagattgttttaaattcgtaattgtgaactggagcttgtaatatgaatcttttggatttagtggatgttgttaccctggttcgaggaatctaagcactagtcggctaagatttgttctcagtgtagacgaagcttgtgagtcattgtgttctttactgctttctcttcaatccgattcttgaatgcataagtttaaattaatcaatctaatcttgaacaactcagtaacttgaatcatgaaatttggataagttgttctttcatttcgtatcagagcttgaaattttctaaaaattttgtgttagatcctcgacttgtttgattcttaattttgaaaaagtcagttcatacgtgttaaagatttgaatagttgatcttgttgccactaaccctctctgagttctttttcagagaactatagtacaagagtttgtttttttacctaatctgtgcataatggaaatttttagggaagatggatcaaccacgagacctctgttgttagagggtgctaactacccatactggaagacaaagatg

SEQ ID NO: 122081 - DNA, 1201 bp, Cannabis sativa
ttgttcctaaaattctcaaaggcagtgagaattatagtacttggagaagatctatgttgattgctttggttgctaggaacaaagttaaatttgttaatggcagattgccacagcctgatgaagatgatgatgattacgatagctggtgtcggtgcaatagcactgtaatttcatggatcttgcacgccatctcggatgagatagcagacagtattatgtaccacgacaatgcagcagaaatttgggctgagttgcatgaacgatttaacgagaagaacgcacctcggatttttgaagctaagaagatgatgcaaagtcttacacagggatctaatactgttacgacatactacactcgcttgaaatcgctttgggatcagataagagaattgcgtccaccacctgtttgttcttgtggcgcaatgaagataatacaagaatatcacgaagaggacagattgctagaatttttggttggtctaaatgattcctacagtctggttaggtctcagattttaatgcgtaatcctcttccaagtgttaacaaggcttatgatgctgttatacaagaagaaagacagagaaatttgactaatggttccagcaacaccactgattcagataaaggagcttcaggaaacaatggacagtttgctggtgctattcagccgtttagatctaagtacaattgtactcactgtggaatgaatggccattcgattgaaagatgctacaagctaaacggatatccacctggtcataaatatcatggaaaattccctaatcgtgatgctaaagggaatgctggaaaaccagcaggagtgaatttttctggagctgatgaagggaagaccgaggagccttcaatggagagagatttgatctctagtttgtcaagtgtgcaatgccagaagttgatggccattcttgctcaaaaggccaccgagaacagcactcaaagtgcctctgaagaacagcttgttgtttcacacttttctggtatgaatatctctactcctagctcttattggatcattgatacaggtgcaacacatcatgtgtgttatgatattcatttgttcaaaaacactactgttaataccagattaaaaactgtcttgatgcctaatggattgcatgctgagatttcttgcataggaacaattcaattgagtcatgaacttattcttgaaaatgtcct

SEQ ID NO: 122082 - DNA, 950 bp, Cannabis sativa
tgattgcattctcttaattctgttagaactctaaagagagaaagagtgagggaattgtagtactttgagaggaatttcatgaaatgagataaagtggcgtttgtagttaaatcttacgtgtttgagtttcatctgtgttctttgtctgtgatatttgattggtttatttttttgatctcattactggaataagatagtgatcttgttcgtgttttgtggtgaatttttggatcaattccacaacaaattggtgcggtgaccgtgaactcagaataatgggatcagcaaaatatgaagtggagaaattcacttgacaaaacgactttagattatggagattgaagatgaaggctgttctggtccaacaaggtcatgaagatgctctaaaaggagatgaaggtctcaatgtgaaacttgaagacaaggacaagaagatgattcttgaaaaggctcatagtgcaattatattgagtcttggagataaagtgttgagacagttctccaaagagaaattcgcaacagggatttggtcgaagctcaagagcctttacatgacaaagtctatggtaaattgtctttatctaaaagaagctttatattattttaaaatgcaagaaaggtatgtctgttgatgaatagttatatatccttaacaaactaattctttatttggagaatataaatgtatctattagtgatgaagaacaagttctgctattattatgttctttaccaagatcttacattcatttcaaagagacattgttatatggaaggaattccttgacccttgaagaagttcaagcagctttgaattgaagagaactgaatgaaagaaagaaatccaagtcaaatgtcaatggtgaaggattgatagttagaggcaaaagtcaaaacaaaaaaaaaatctcaatgacaataaaatgtcaaaatcaagaaatggtaatggg

SEQ ID NO: 122083 - DNA, 1548 bp, Cannabis sativa
cataaaccaagaatttcagttatataggcacactttatatagaatagatacatagatttttttctatgtaaaatttaaataataaatcccgataaaatagattggtcttttataattatacatatagacttttttttttaaatgtcaaaaaaaaaataccgtttatgcttaaatataaatatttatgtgtaatttttttaaaaaattcttatacgttttctaaaaaaaaaaaaaaagttgcgtatgtaatttttttaaataggaagaattaattgaattatatatttataaatctaataaaaattaaaaaaaaaatatggagatatagataaataatgttgtttaattataataataataatatagtattgtgttatcattaaaatgtaaatcaattaattttagagttacgaaattattaattagaatgtaaactatttcttcttctagtctcattactgaagttgtagctaataataaaattttataatcatttgaaagtgttatatactcactcatttattgttgcaacaatcttcaaattttgtacacaaaattttcactcaataacttcttaaagtgataaactaaaactttctttttcgtcacatgcattatatttttttgtaaaataaattaatcacatgatagtatagcatgattaaaaaaaaatgtatagcttgattgacaataaaaaaaaacagagaaaataataatataaaaaagttataagacacataaactataaaataattgacgaaaaattaaaaagggaacaatttatacaatattctcataaataaaaatcatatttagacttactaattcttcaatcttgtttttttaataaaggatgatttcattgataaacaactggcatcagccattacaatgtctcttaaaacaaaaggagtatttaactcattatacgtacaacctgacaaaaaataagaccccctagcaatacaatttagcagatcaattaacaaaaaaaatttgaacattctttaacgtagataaaagcaaacgacagtcctccaccagcaacccaaactgagatggcatatgaattgagctattaattgcttgaaccactaaagcatacgattcaacaatcactttgtcccaacctttacctttatccaactcaacgcttccttaattccaattacctcagctatttcaggaagaacacagccacatctactctctgaaatagcctcaataagtttaccatgacaatcctgagccacacaaccaaactcgaacctttgttgagcttcaaagatagcattgtcaacattcactttgactgtaaaattttctggtttacgccattggttgccgacccccatagggtggtctcggggtgcacaccccgacccccaaaagcggtgtctcggggtacacaccctgacccccaaaagaggtgtcttggggtacacaccccgaccccaaagggggatgtcttgggtattatggccacaaggttaaaccccaacccctaatgagaggcgtctcggctattgaagccacgaggcatacaca

SEQ ID NO: 122084 - DNA, 1047 bp, Cannabis sativa
  modified_base (979)..(990): a, c, t, g, unknown or other
tcgggcagagccgcgaaacgtcttaaagagagcgacattgtccgcgactcagccagattattctatcggtaattcgttccaatttcactgtatttaatttcggtataacaagtgagaattaaaaaaaaaaaattctctggggctagagtttggttttgtgacttgatagagtagttgagatcaaagatggaggagaacagagcttagagtttttgtcgagaggaaattttagggatttggagatgaggtaaacgaattggaaattagttaatttatttatatatattatgtaattatattaattgcttttttttccccaatattactccaattatttctaactgtctcccactatcactcttttctacaccctatcttatataatataagaatgtcttttatttattatacatttaagtattcttacttctaggtcatcctactgtagagactattctagattataatgactactaagatgaatacttatatgccacacacaataaccattccaaatacggctcaggattatgttccaaatacggttcaggattatgaaaaagtcatcgttatgttgtgatcttattttgaaatttgtggattggtacaaacttttgaaaaaaaaaataagaaaactaagaaaatgtaacatcaaataatttaattatttttaaattaagaaaagtagtatggtttactatttataatgtatcagctaccaaatatacagtatttgctaaaattttgtttctaaaaaattatccatgagattaatttaaatttattttatattaactaaactatataattcttataaatgtatatatgcatagttctttatagttagaccctgtgtgattttttaaaatatacatttatattacacaatttacgaatcataataattttaaagtattattttgggtacctttatatttgttaaaaaattatgtgcaattttcatatatatatatatatnnnnnnnnnnnntagtatattgttacgtgcgatgcacgtatgctatgttttatattaagtattatatta

SEQ ID NO: 122085 - DNA, 968 bp, Cannabis sativa
cttagctcagggccagcctaggcaagtaattaaaaggaaaaaaaatctctaaagttagcattttgtaaactatttaaatatttgcgtattatatgtgatgataataatatactggaagaataatttaattattaacatactatatcattaaaattaagatgctttaacgatagcattgttcatacttcaaactatcacaaatttctagtgtgatctaaactccaattttaactaaattaacgaccaacaattcgtttggtacatcatgatgtactgtattatattgaattgtattagtattatttaagatagtattatatttaacattaacttttatttatagattatgtagaattatactatatttaccataaacacaactctcatctcgatcctaaacctggacccagatcccatctccagccccaggctactaaccctaacctagaccccatccctaaaccttgacctcgaacttttgcaccctggtccgggttggatccgaggtctgagttctgaggtttggggtcagggtccgggagcaattttagatatggggtccaagtctagggttctggactaggtccgggtatggggctgggtctgggtgttggttttcatggttcaaattagagtagaaagcaaaaacagtttatgaaaaatatttataaacattaaacctatactacatgatgagatcaatatacctattgatgcattatcagggtatccttgattctttttgttttaaaaaaatgatcatccattcctgcaatagatcttggcaagaactcacaccatagatcttctagatcagtctcaacactcatgacaagtatgagtttgtgtaagaatattttaggatgattattcaatatcacaacatgtactcaactcatgagacacactgtgatgatagaatgagagagagggaggtataggtttggtagagagagagagagaaagag

SEQ ID NO: 122086 - DNA, 1232 bp, Cannabis sativa
  modified_base (46)..(52): a, c, t, g, unknown or other
atagttttacgtaaaaatatcgcataaaatacaattcaatataatnnnnnnnaatacaatacgacctaatacggtgttccaaacaagcccttaatggtgaagctaatcataaaaagagtaaatacaacttaaaatagccagtattttttttttttttttacacttgtttctaattttttgtagctgctaataatatgtaatgtttctaaactatacttacttttgcacctttttttccctctagcaactagtacactttgttaatattttaaattttaaatgatgttttaattaaaaaaattgtatgtttacatctaaatacaaaaatacaatatttataaaaaattaaaataatgagtattttagccggataaaagttattaattatatatatatatatatatatatatgagtataaacacttttatatttattaattatatatttttactttgatttaatggatgtataccaaaatttggagattttgattagaaatgaagaattaggaggcttttacatcatgagtggaagtagtagtggggtattccaagagaaacattatcacaaaagagttatcacacaatatgtatatgattataaacttggtaaaattaatatatcatgagcagagtggtggatatattctcaaaatcttaaggtatatttacttgctaagctatatataacatgtatattaattatttgtgttggccaacatgcattgttggggccaaaaattaactttaattagtgcttaccttacccacattgctactacattacttagatttaacaatttttggaagctagctctcatataatacatgtatgcatgtgttagaaacatgcatatgcatattataacaacattattatttggcacgttaatgtatttattaataccaaaaagatgtgatcctgaataattaattaacacttttatatattacgtattaaatcaaaatgtataagactcacgatactagaatgtactaattataatatattgggtattatcaaatgggctaaggttgtgtcttgggcccacctaggctagggcataactgtaaatacgtgcgtaatgtaccaacttaacccatgttttgaaaaacttgcaataatatgggtcgtgttgtactggcatataaaaaaagaggaaattacactctatactctttttatttgtcctcttttatttttaccctcttttttaaagtctatcgttttta

SEQ ID NO: 122087 - DNA, 1494 bp, Cannabis sativa
gtaaaataatttccaataattggctgagtttgttgacacaaaatgagatgtcaggtcttgacattgtaaggtattagagggcacctataatgcttcgatagtgagtaggattttccaatagagtccttgttttagcagataacttggtagtggagcacattggtgttgattgtggtttggagtcaagtagttgagttcttgccaataaatctctagtgtacttctgctgtgtcaagtaaatggctgaagtggttcgatgaacttcaaatcccaagaagtatgtgactgaaccaagagctttgagacaaaaactgtgatttaattgagcaataagattgtgaacagcagtggtgtctgcaccagtaattagaatatcatcaacatatattaagataagaagtaggttgccattgtgattggtaaacaagagactgttattcgattgactgctcttttatccccactgaaccaatgtgtttttcagagtgtcaaaccaagctcttggagcttgtttgagaccatatatggctttgtgaagcttacacacatgattgggaaaatctttgtccacaaatctttgtggttgagccatgtaaacatcttcttgaagttgaccatttaggaaggcattattaatgtgaacttgttgaatgtcccaaccattagagatagctaaagtgaacataattcggattgtgcaaggtttgatgacagggctatatgtctcaaagaagtcaataccagctgtttgttggaagtctttggcaacaagccttgctttgagtctttcaacactaccatctgcattgaatttaattatgtagacccatttgttttgaattataatcatatcagctgttcttggaacaagggtccaagttttctttctccttaaagcaatcatttcagatcccatggcagcattccacttgggattggcaagagcctcttttaaagaagttggttcatattcagtgtgtgtgtttgcaagaaagcttcttggtttgtgaatgcctagtttggatctagttaccataggatgatggtttgtggtgtgagtgaggatagacactgtaggtgtattgtgagggactggtggagggttactggtagtagtagggtactgtgtttgtgttggctgatttgtgggtgttggtggttggttgttgggagatgggacactaggtgaggttggggttgtttcagttggtggtgttgggagatgaccaagaacatagccatcaagatcataggctctgaccgcagcaagaaccagagatcgccagattctgtaattcgatcggtcaagtcagatgtttagggggaggagatgattgttggggaggggaattggattttgagcttcagggactggatctgcagctcgagcttggtgtggcttaactctttcacctgctggtggttcaactcgaatgccatggttcgacatggctctgataccatgtaagagtactgaaactcagtactcaagat

SEQ ID NO: 122088 - DNA, 673 bp, Cannabis sativa
aaaatgtgaaagtctaagaaaatagtaaaaataattagaaaaaagataagatgccacctaagatcttttatgctttcttttatttatatatattgatattgattatacatggtggtagttgtatttttagaagaaatttttctcaattttttctcattatataatgtagatatatatatttattttttatgtaattacattaatattatggatatgatcaatttagatattattttttaactcgagtaaaaacatcatacaatatagatagtattttttatattttattttatttttattaatttgtgaaaacttcacattttgtaaaaaaaaaaaagaaatctttacattaatttcggtaatagccgaaaaaatgtaattgtttttaggcatttttaataataataataataataataactatcgacaatcttctaaatttaattatatattagattaataatttattttctttatacaactttttgttatattttttatgcacgatcctaattttttttttaataaatatgcataattgcatattgtaaattatatatatattttttttatttatattgtaaagttcttttttagcaagttagttgacaaaatattttttcttttatagtaagattcttttgcatacatacccgaattcttaccttgtgtt

SEQ ID NO: 122089 - DNA, 1201 bp, Cannabis sativa
agtaggctgattagacttcgaaattttgattcatcagtttttggtgagccatcttccttcttgaaagctttgttgttgtctgatggagttgatacaatcttgcatccctccattttgaatttattcaataatgtgtctatatacttcttttgtaagataaagattctatcttctttttgagttatttcgatcccaagaaaatagtgcattaatcctaaatcggtcatttcgaaactcttcatcatattttctttaaacttctttatcgtcttctcattattgctgtgtagatgagatcatcaatgtataaagagataattagtgtctcattcgtatcttgtgtcttgatgtataatattgactcacttttgctcctcctaaatccttgttcgttaaaataactgtcaattctgttataccaggctcgtagaatttgctttaagccatatgaagtttttttcaatataaggactttatcttcttatccttgtactacgaactcttgaggttgctccacataaattttttcttcaagataactatttaaaaatatcgacttcacattgagttaaaaaatctttcacttcttctgtgtagttagagctattaaagccctaatatagtatctctttatacatttttgagtacaaataaatctcataacatttgaaactatttatgctcatttatcattttgggattatattttgaccatgattttagtaattatgttcgattaatgagaattttcataaatataagaattgagggtataatttacttttttaaagcataaataaataacacgactataagcttataggttttttttttattattttattttattttttacatttatatggtttttttgtgccatatttttgtaaaaaaaagtggaaattccatatttgtaacaacaataagttttgctggaaaattcactggcaccgaaaagtcacaggcgccggaaaagttagtgtcgacggaaaagtcacaggaaaaattatcgttgtcggaaaagtcgtcgtcgccgaaaaaatcgctggaaaagtcattggaaaagtcaccataagtaaatgtctcagatataactaaaaatatatcatgttttatgaataaaaactaataactcaaaccagttataattgaaatataaccggttctataacataataaataaaaataaataacataaaat

SEQ ID NO: 122090 - DNA, 1436 bp, Cannabis sativa
  modified_base (1384)..(1411): a, c, t, g, unknown or other
gcaccacaacatgcgccaccactttgaccaccacttggctaacttgtgagcatcacttagcttgtaacgtgccatcattgactgcacgtaacaacaagcaaggcctaataatctctccattcaaagttaaatttaatcgtcatttctcaacaatgatccacaaataagtaatccccactcaccccaacgtgccccacacaaactgccgagcaccccaacaacgccatgtggctacctttttccattgctatttttagcaactttctctccttatttttacaagaaagaaactgatgcttagactaaatagggtctataaatagtactcaaaattagtgtaaatggggaacaattgagtttagcaaaaatatacacaaaattttgtctcactctcttatttttctttatatttttgagcgaacataatgttttgtttaagctaatttttttattggtaagattagagaggagcttatgttggtgtgtttatatgctacatgattctcttggttgtaatgtctacaatttgaatttattaagtcttcttcactttttcttcttattattttacaaagtattatatgccatattttatataagtattagtcctgctctacttatgtactttagccatataagtattttgttaatgttaatattattatatatgattatcttttactgcaaaatcactatgaacagtattttgtcgctttttgaatatcgtatattgataatcacttgttataattgtgaaaacttaatttattcaaaataaatataaagtgagcttcatttagaattatttttcatttataatacaaaaacatgagtgaatctttatctcactattttttctcattgaattactatggcaaaattttatttttttattacaattgcctacatcgtattctctaaatttttagtcactttctaatttattttaatttagcaaacttttcttttgagtgtatttttacctccctgtgaatatgacaaactatcgcaaccgcggtgtaataaattgggcggcatcaattttttgatgccgttgtcggggaaggtttctatactacaagaggttagtatagtttgtctctactttttcttttctttttttttaatctttttttttttgttttgtttttgtttttggtttcatctaatttgaaaaaaaaaagttataacatttaaaaaaaatgtaacatttttttattcgaagtttaatttgtttcttttacttaaattataaacgttaactgtacatatatatattaacttttttctttttttaagttaaaaaaaattttaattcagtttactagttaaatttaggtgccgtttggtaacacgttctataaccacttttgtttttcaattnnnnnnnnnnnnnnnnnnnnnnnnnnnngtaaagttcatttttatttttattt

SEQ ID NO: 122091 - DNA, 939 bp, Cannabis sativa
tttttttttaattttttataatttatttataattatattaaagttgtaatttttagttattttatactttatttataatgattgattttttattattttttactttttgttaaacgaagtgtatttttgtaattttaaaactttacaagcgtatttttataaataaaaattttaggacgtaaaattgtaaataaaacataaaaaaattaatatttttgaaaatttccttaatatttaaatgaagagaaaaaataaagaaattaatgtatgatataatataaaaatttgaggtaaaataaataaaatgaggtttgaatttgataatatatttgaaagaataaagttgagaaacagttaaaaaatattcttttagagttcacgggaaatagaaagataagttgaagaatacctgttttttgtactcattaatcaaaaatatcctcatattatattttattaaaaagtacctacttttgtgagtgagttgtctaatatacattcacatttcacttaaatctaacacataatttacatcaacttaaagggtataatatagacatcatttataaaagtgagtatatcttaaaaaatataaaaataaaggtaaaaattaaaacaaataaaataaaataaatatacaatggaatttcttcaaaaaatacttatataattcactatattcatatatttaattgtaaataaagaataaatttatattaacccaaattcataatattatataattttaatagaggtcctttttcttccttctcatttgcaaaacatgtggtaaaaaattaaggtggcgtttggttagggagaatgaaaatatagaaatatgaatgagaatgagaatagaaataggattggaataaaatttaaaatgcataaaaaaaattgataaaaaaaatcataaatttttttctcttgttacattgg

SEQ ID NO: 122092 - DNA, 712 bp, Cannabis sativa
aattaggtgacgataatatgaattgatcaaatcaagccacagttaacatagtatattgtatttaataaaattattaatatacagatatactaataaaataagaaattggaaatccacattaagaaaatctaacctttgcccacatagatagtgacctaaactcgttcaaaaaccatcccaatttcttctgagtttcggctgaagaatgtgtgagccggtgaggtgagtgtatgaagtgtctgaggctctcgtcactggatctcttagggttttgcgccctcagctcaatgtcgtccttgccgtggctcgattcctttcaaaatgcccagattttgtcgatctccgtcctaaagcagtgcaagaaagttaggagtggactgcaaacccatcaaagaaaactatataagatgcaagaaagttcattcttacaataacgaatttttaatacgaaatcaaattgaataaaaagcaaaaattaagaggggtttaataacagcactttttacatccttacaccatatatgtaaacttgaaatatgggagaattcagtgtcaaaaagatattgaacgacatttcaatatcgatttaggtaagagaattcactttgggggtaattacccaaattaaaaatcaagcaaatgaccaaaaaccatatcctaaacaacaaaccatgaaaagaaaagccataccgaaacaacaaaatatataatg

SEQ ID NO: 122093 - DNA, 1169 bp, Cannabis sativa
agtatcatacttttccagtcatggaggcaagattgggttcatcatcaccgtcgtagtcgccgtcgcttgagatggaggagacatcggaatcggtggcggtggaatggtctctgaagcgaaatcgagaagaagaggtggaggtggttgctaattccatgaataattaattataggaaaacacaacaggatcaattgaaattttcccgagaaacaaacagaagcagaggaaaaataataatgtgagttagaaaagtatatatatgtatgtaagtatgtatttaaggcctcgttttcatctcccatgcatataatttggaataataataataataataattacataggttgcatcgtataattaagtttatctagaaggaataatgaaccggccattggcaatggcaaccaagtcaatcgatcgccattattactattttcatagttattatctttcttcttcatcttcatatatatctggtccgacctcataaaccctatttggctttcttcttcttcttcttcttttctctccatgcatatggccatggcttttctctctctctcttttgattttgctgtaaatattaattactggatttaatttcatcataattatattattaaattaaaataattaattaagtaaattttaatatttaatcattatatttaaattgggagaacagattcaactttaaaaaaatgatcagatttaaaatttgttgtacatattctttactagttgtatgtttttgctaagaaattttaatagcaattatatggcattattatgttatcaatttggaatgaacaattttgtcaattcaaaaaaaaaaacagatttaataagattttttttttaattagactagtactcaatttttatttaaatttaaatttgggtttattttgatttctctttttcaactgagggttattttcgtttttgaatgcatatctaagattctaaaaaaatttgttctcaagaaaaaaaaatctaaattaaaatatctagtaagtaattaatattttaatataaactagctagataattcttcataaaacgtattattattattattataatttaaagaaaaacttataatatatattggtatatattcatcagatttttttttttaaaaaaaaacaaattgtatcatgatttt

SEQ ID NO: 122094 - DNA, 1169 bp, Cannabis sativa
taataaagataaagtaaaggggcaattaagatatttgcataaagacagtttaaataagcttgggtggttctaaaagcagccagtatggtgggagtcaaatagtcaaagcggtcagttccaaaaatgagaatacagctgtcgaagtttgattggacgtatagaggatgagattagcgtggaagtgagagcagctgattgcggctctcctacgcacaaaaaaaacagcaaagacaaataggtacggtggatggcctctctcaatctcaatgtcgctctccggttgtcgtgtttgacagagttacgattcgctgactacgtcttaatgtgactcataattgatacaccaattaaaatcacccacgtgacactttctttctctgttctgaccataattttgactttcccatggacgagaaaaacaatataacttttttactttaaattcatgtttgaaaaagtaatatgtttccctcccttcctccttcccaccaaaatacacaaaatattatttctattaatttatagagaatatgaacaacttttttaaggaaaaaaaaaatgaaagtttaccatatatggtgtgtacaaatattttcttttggcagttatataagaaaaattaatggaaaaatatatagtacactccactaaaggatattttggtaaatcttctatttgtttcaatatttaaaaaaattattttttttataattgtatacgtcgtaattatttagaactacttgtaaatttttataaaattttaaataatttataatatcaaaaataaaattcaaacaattatttatcatgtgtataagagaaaataaatcatgtatacaaaaaatatatatatattttttttagagaaaatcactgctattataaattgaggtcatttacaacaacagaaaaaataggatagggaatctctcctacccaacaaatgtcttcatccaaccctaaagcaaatttagctaactcatgagcagcttggttagcttatcgtttaacataggaaactaaaacactagggaaaaaggataatagacaatgtatatcaaatataagatcagaaaaacatgatagatcactcatagtggaatttaatgcagtagagactctcaaggcatccgtttcaatatgcgttattgatagttgtgattgcgata

SEQ ID NO: 122095 - DNA, 1917 bp, Cannabis sativa
aagaaaagactaaaaagaaacctgttgcagttaaaagatgtaacagatttcccacattggcattcatacaaccacattcccttttgatgaatgccccattttctcaataatgaacaccttgtttcccgcttttcgcacacctaacaaagattaccattccaagaaaacgcatccttgaattcgaaattgagacagtacaattagcattacttgaattctaaaactttggttggttggttacctcaattgtagcatgacttgaaaaagtgaaaggaaattcattcaacgaatcgatgtgcttcatatgctgttttaatctttcacattcttctttgtgctcgctccaatgcgaaatctgtaaacgaaaaactcctatgcttaacaaaaataattcttcaacacagaaatctgtcaaatgttattaacaaaattctaaataaatgcatgccaaatatggtagtaaggtattcatagcaaccaacttaagtagtcctcatcatggcacttgacaatggttaacaattaccctcaattcatgatggtaatagaggccatagtagcatgcccaatgaatcaaaaactccaatcatcatcatcatcttcttctagtctttacaggtttaatagctttatttcatcataattcattgtgggcatgactatggtttacagttaccctcaattcagcataagcagtaagtaattaacataatagtagtagagagtcatagtatcatgtccaaactaacaatatcaaatagtaaaatttgttaaatgctaataattttttttagagcattgcttttgaataccagtaatgtccaacactttttcaacacttttcagaagtagtatttaattacactaatagcgatatgacactaagaaggtgttaggcacttataatttcttttaacatttctctttacaaggcaccatattgtccagcatcgataaatgctaaagggcacccatagtatcaagtctcagataaagaattgctaactaattataaagtatcatcatagtattttcttttcttataattattattcaagtaaaacaaataaaatccgatattaaattacaccgatacaattgaatggcctttagcatttcaattttacaaaacactatttcactataattgatttgtgggcatcatggtatgaagtaattccaatacaatcaaactaataaagaaatctgagagaaaaactaagttgaaagttacttggtgagaggcagagcaataagcaacggctccgcagacaccgcatcgtcttctggctggacccaagcatcgattcgcgcgtcccttccacgcgcactccattttcagtaccacctctgatttctcctccgttcagctcagcagagcatcactcagtttaggcttcgcaaaatttggttatgggccttttaactaggcccaatgctcactgaaaatatgaggccttctttgagggagagaagaataccattttttctcttatacatatattaactaaatttacattcaaaaaaaatttaatttaaatatactttctttataaatattatactcaaattattttcatattctcacatacacaatttcaaacataataaattataaatatataagtttgtaaaaaaattagaacaaaattttaattagagaagaataatgattatcataaaatgacaggataaaataattgaaaaaagaagtaaacatagtatatttttaaagaaaaaataaaaattaaaggcatcaattttaaaaaggtgttaaaagaggtctttagtgtaattttttcctttatttaacgtaactcgtggaaatttttattttttaatgttaaattatacatatgatgttgatatgacattttactaagcagttgtgtcatcattttatttgtcatgtgtgat

SEQ ID NO: 122096 - DNA, 554 bp, Cannabis sativa
  modified_base (513)..(520): a, c, t, g, unknown or other
ctgtcagctggagtggaggctttggccaaaaagtaatttattatttctttaaatttttttacgaaaattatatttttttggtatataggtatacttttaaaaactaattgagtattttcttttttaaaaaaatacgtacaaatctaaacaataatttaggtcttattatttttctaaaaatgttttgaaatagggtaaggcgtaggtgcaaggggcttggcaacgacccaagtggccttcgtcattggacagccctgaacatatggtacagttaactattaaatactagcgataattacataagacactaatttttataaaaaaaaattacattttcatgtttacagaattttttttttacatttttacgattttccataaaaataacacgaaaacaacaagaaagttacataaaagtaatgtgaaaataatatataaataacatcaaaaataatatgcagataagaaaaaatcaataacaaatttacaagagtacaacataaaaagaccgtnnnnnnnntaaataaaataaaaaaaatcataaaaatatttaa

SEQ ID NO: 122097 - DNA, 969 bp, Cannabis sativa
aatgagagttccccaaaaattaaacttcgtgtggctgcctactaacaatgttttgtgttgtagggacttaaatgtgaatacttgttgtgatacatataactatgaggtggaagagtgcatctttcatacatataactatgtggatacttagaaaagaaatgaaatttggaaccaaataaaagggtgcttggattttgatgttcaatcttttttcaagaaactatttattgtgttaagaactaatgatttgaaacttcttatgactatttcttggtaaatttggcatgtgaggaacaactaagttcatggaaaaattattctaatggagggagatcttaagtggccatgagttttgttgggtgttgggaaatataaaatttgttgggaccttattgaaataaaagttgatatttttttaaataactaaaaaaatatatatttttaaaaaagatatttttttcattagacttttgggttgagtaagtcctaaaggcaggcttagcctgtcttagcacaagctcgaccttgtatgttaagttccaagggcaattcaaagtctcaaatgaaaagaacaaggtaaaaaaggcctaatcgaaccaatatggttgcaacttatcgaaaaaagtacagtccaagattaacatggatgcaagtgtcatgtggccagtgatagatccacttatgaactagaggggggtttagtcctctctaaaaaaattatatacatttttatatatatcaaataagataaatactattttggaccttgtattttgtaaaaattactgattgaactctcgttttattaaataacaaataccatgtattttccaaaatagtactacatagtacccgtgaacttattatccaatcaaaataaaaatgaataataattctatctaaaggtaatatgaaaaaattagttacgtttactgcatctttttgtgttaggaattgttacgtttactg

SEQ ID NO: 122098 - DNA, 677 bp, Cannabis sativa
ggagttagtgttcgtgttcatccttaatccttatatacccaatatacccaagatacccaagatccttcccatttctagccaatgtgggactttgaatgtacacccaacatatataaagtttatcgctttaaaattgctgatgatattaagatataagacactgatcaagtcaagagtgagcagagttgattttttttttgagatggtgagcagagttgatttcatcttaaagaaaacgttaaaagtataagaagttatacaataaaaaatataagataaaaatggaataaaaccatattccaaaacacgctaactaattgatgagccaaaaaattattaattagtccgaataattaagcactaggcaatgaagaaagtataagctacattatatataactaatgatattataagaaaacaaatttgaattataattgtaaaattgagacctttaatttaattccatgaattacaattttttaaaccaactcaacaatggaatagaggcgaaaaagatgacataatatatatccctaagctgggctccattaaaataaatatggcaaatgtgttgggctttctgctctaaataaaactctattttaatgtaatcttttctattcaattattaataaaaaaatagatttatttttattatttatttaatgtgttatttg

SEQ ID NO: 122099 - DNA, 2800 bp, Cannabis sativa
aaataggttaatatccctccaaaataggaaaaaaaaactcttttatcttttattttaaatcataaaaaggaaaattaatatccctaaaaaataggtagataacttgagggagaatctctatctttttgggttgttggagttgtctcgtagttgaaatcaagttgttacccgtccaggaagtttgatgcaaaaatttctaattgtttaggctcttttgtacatgctagctagcctgctctattcttagggcctcggcgacacatagatttcattggctggccatggtatggtccggccagaacctcttggctggccatttccttcaatcttagtcttgcctgattatttggaactcttgttaattgacttgttatgtaaggtgattttgctcatctattgacagactgtattccacttggcctcagtttttcctatgtggacatgccacatcaagtgggcaaaaattgagtaaatatttggcccccaagtccctatgcagacgtctgtacggatagggactttttaaattcagctttggttgtaaaaaaagcttagccgagcagtaatggttggccaaatatttgaccttttagatatggtccacattatgacaaaaaaatgactttattgccaatcattatggagatatatgttttggctgcacattttcccatttacgaactgttagtcttctacatggctattcttgtggagaaataacaacccactaggtttttggggggaaaagaccacaaaacctatataaggttcatcttttcttcattttcattttacttcacttcaacctctctctctctctctccttcgaactctctcagtaagaagaaaaaataactctccattttctcatcacactcgatgccttaagctcttccgttccttgaggttttcaattttttttcaacgatctaaccatcccccgagtatctacagcgaccttcatcagtgggtaattcttaaaatctcactttttcattattttcttgaattcgccattgatgactaaaagcttttccaagcttttttaaatctttaattctcatattgtagtgtagttttttttacattataatccatagctttaggatgcataatgtaagacttcctgatgaaaaagattagactttggctccatttagattcttgaatctttgagtaacgaagaacattgttcgaattcttgaaaaataaaattttttattctcaagagcctctgtctggcacatagggtctgtttgtgaccttggccgactcgtgattctaagttaggactctggccggttcatggctcaagccctagaaccctggtcagttcatgactctgaaccccatacctagtcggttcatggtatgtggttttggcatcattgggttggccaattctagccaatacttaatctttgcaaatactctgatggctttttgagctcatctcacctttatcccgtacttgattcctgtaggaactctgtatggcatatcttaggttgagcctatcttggccaattagcagcctaacaatgtctgtttaattttttgcacatggatcttgtactttgatgattaacgacttcgcacattaggtccgactagctaatacccttaggtttagttaaaacgtgcttaagtctttttattttgtctagttgttcacctccctctgccttttttacatagatgaacccgcttgacttttggggaggtgacaaaccaaatcaacgaagacttgctaagtattctctacgaagaccattatccagttgattcaaccaactcttcttccaagggttcttcgagaagctcctccagtgatttcgaggttagcaacgattctccagaacttgaggtccaacatcactgctattcagagcgaataggcagtgagttttacggtcaattcatttggaaactaaactaggggtggaggtagttcctccctagatcatggacttatattgtcggagacggtgtgcctaacacattgcccactggttgggcaactcttttaattggagatttccctacaactgagactgttatcactgtttccaaacactttgagccaaatcctaccatggctaggacaaaacaaatgtgccgtaaggcacttcctcaagaccctcatattgttgagttgatgacaagagggagggtctgtcatgtcgaggaggcagaacagccaagggccaaccaggtaaaggaacatgtggctaagcaacccatggccaaccaaggtgaggagacattgaccggtccaaatagtcaatctgaagctgagtaggctgaatctattgtcgggccaagtactgtcaagaggcagtataagacttgcattgtgatcttaggcaatcccttgggctcttatgatgaggttgggcgacctttaaatgtcgtgggtcatccatcaaaggtcaggattaaccatgtcaaagaagaggcccacgagccatgggtccttgagtacggggataaaatgatgggtatctcctccatcttccctatcggccaagaaacttgacggaatcaaggaagggggacttgtgggaagagttcgatgtcaggactactagggattagttggtgcattatttgctgtccaactggatagcttggtcgggtcctcatattgagaaaggggtgattttacccttgcatccctattttagggacatagccaacttttagaacttattttactaggatctagatttactaacatatatgtttgatcataatctataatctaacatcctacatatgaatttcttaaaataatgaa

SEQ ID NO: 122100 - DNA, 1429 bp, Cannabis sativa
taatattttttttaaaaaatatttttagtaattatactcaattctcataaagtatgaaaattaaaaagtgtaattgaaacctctcaattatctccaattatgcaatcataatgtaattatgtggtcaaataatacacaaatatgtaattacctttaattacaccgaattctaattttctcctaacattccaaacgccccctaatgaatgaaaatgataaatgtgggttgggttccaccccattttgaaattgaagaatatgatttgcaatctcttaaaattagaggtattttaccctcattcttttctaaattataaattatcctttttaccattatttaattatttttttaatatcttaatatatttttttaataaagtttatatatattaaattaatatattgttaatatttaaacgtatatgtattatttactaaattaagaatttatatatttaatatagtttatctgaaaattgattttggtgacgtagacattaatgtttgacatgaggcaagaatgaaaacatcagtagtcctgagtcatagcaattgacctgggaggggtccctagctctacccctaggttaactccaggaacttcaaaatagatgtttggatcccgtcaagttgttttcaactcataatattttaatattttgaatcaagaagacaagaagactctaaattcaatgcctaaaaattaagaagagacaaaatagcaccctaaaagttaacccaggcgcctagggttttcacctggcgcctaggttttataactagagttttaattttcgggtttgtcttaatgaaaatgccccaaatattttactttgacatgaataagacttgtcacgaacgtttttaaggcactagaatcaaaatcggaacactttccattttaagcacctgagacatcaggcgccccaggcactagtgcacccaacgcccaagttgacatattgtcaacctaggcagcttccaatcaccatattgaagaagtatctcgagcattttattcgtctccatgaaaaaataagaatcaagtactttcaagaaagaaacgaatcgacctagaggccaaaattgggacccagcacccaagttaacactttttcaacatgggcgatttccaacaaatattctaaagaagtcttctgggcatattctttgtttcacaaattattgagattcaaatgtttctagaaataaagcgggaccattcggtggcaaaagctacacccagccaccaggttgactctagtgctaggccaagcgctcgggctgacattttgtcaacctagtctatttccagtcatttttctcaaaaggtgtttcgggcatcattttcaaaagtaacgatgatacaagtgatcttgaggaacaaatagtggatttaaatttaaatttaaaaagaaaaataaagaga

SEQ ID NO: 122101 - DNA, 715 bp, Cannabis sativa
aattttagcttggtacccatagcccgctgaagactctgctagaacatagaagtaaacttcggatctctatctgatataatggactttggaacgcaatgtaatctcactatctctttcacatacgattatgcatattgatccactacaaaggttgttttcccggtagaaagtgttccgactttgtgaatcaatctacccaagttgaaccatgcaatcccatggttctaggtaatccaaccacaaagtccatggtgatatcctcccacttccactcaggaagtgtcaatggttgcaataaacatgccagtctttgatgttcagccttgatttgctgacaagttaggcaccgagatacaaattctaccacattcttcttcattccactcaaccagaagtagggtttaaggtcttggtacatcttggtagtgccaagatgcaatgaatatggagtggtatgggcctcgtgaagaatctcatttctaagttctgaactacttggaacaaacccaagttttaaacaacgaacatcccactatctcacaccataaaatctttggcttgaccagacgaaacctcttctcggatcttaactaactcttgatcaactaactgagtagttttaattcgttctaacagattagattgcagcgtcaagttatgaagtttgcctacaacaaacttgatgcttgatctgaccatgtcttctgctaactga

SEQ ID NO: 122102 - DNA, 1850 bp, Cannabis sativa
aatgccatagaagagtggcaaacctataaatgccatatttttctaacttttgtatgaaatcccatatttgatgtaattttcacttataataagccatattggtctcttctcttcttggctccttcaccgtatatttggcccatcttttttaatgctttctagtttgacacgtactctgttggtgttagtggcaattatgggtcgacaagagacctataacttggaatattattatttcctaaatcttacaattgtttgttttgttttgtttttttaacatacatatttaatacgatagggattgctcttatgacaattagtttgtttcaaagaaatttgaaagctttttagagttaaattgtgaaataacttcacacagccttgaactattattggctattaagatttacaataacgttgtttctaacaattctgatatcaccgttcatgtgaggtgggccatatttgtgttattgtaccattttgtaattttaaaaattctattgataaatccaacacttttaataatttaggaataaattttaatgacttaggtttaagaaacacaatttaatataagtgaaagtttaggatgaaaaatcctaacctaatttaatatcaccaccattaaaaacaaatatgaaacttgtattatataaagccatcttatcttttaaggaagaaataacaatttgtaacattcattttaaatgaaagtgagactataagatgaacaatcctaatatatacggaacaactagatggattgaacatatataagaagtagagaaacgattatgtataattcctaataattgattttgataacttgatctactaatgttagatcaactaaagaaaatgaacaaaaactagtatggatattagggtttctaagttcttactaaatctttagataattaattaattactgaaagtcagaagagttccttaattgattattatgtttagacattgatttatttgataacattgtttgtacgtaaagtacatgtttgtgacacaactaatatttcattaatgtacatatatatagaacgagcaaagagttttagtaaaacctcgtaaaaaaaaagagttttagtaaaagaagagtaattagaaagaacaatacactgaaggaaactagtaactaaactaagtaacaaagttgtaaccgaaacagtttatattgtcacatcaagctaagcacttgattaatactcttactagctactctatttaataactaattcctaactagttataccaattaatactccccttcaagcactatacaaacactatcttgaacacaatgaaaaagaatgtaccactaagggttgcaaaagttgctaattggtttagagaagagacctttaattataatgaggagaatacaaggcagttaggaactaaatagtattaagtaactgttttcaacagaaaattagttacaagagaaccttactaacaatattagtttgaatgcttatcaatgatggaaggtaaaggctttgttgtcattgtctttcagaaacttgaactattaatttagaaataaaactttagtaataataatatgagctacttggtcttgattagaggtgtgcaattggttcgaatgattctagcttgaatccatattttctctactaaatggaaatttatctctatatgttttgttattttacaaaagactggattagtggtaatatgtgttgagtcgagaaaccaagttttcatgttgaatttttaagggaaatttgacaatatatgcttaaaaataaagagtacactaaaactatgctagcattctttatattatgaaaactatacttaaaacattt

SEQ ID NO: 122103 - DNA, 951 bp, Cannabis sativa
attatggccattatttgtaaccgatgcctactacctataagtagtggcttccctctccattcaaagggggttgggctgaataaagaaacagagcgagagtactcttttcaacagtggattaggcaggccgagcccgaagctcttgttgaaccactatatttttctgtgtccattttatactatttacaatactcgcatatattatacactatattctttgagtactcgctattctaactgagtactcgcatatttattttttggtattcaagcaatccttgaatactcgcacaaatctggtgttgtctaaattcctccgacaacacttttttaatttaaaaacaatatgttacaacaaatccatctcaagcttcttctccacggtcattgatgcagcatatggactggttaagcctccttacaggatgtctgaagttaaacacatatgcatttgtgtgctcattaactaacaagtctagttttggagttgtccttcgtaatagtttaaagagaaatcgtagctgctatggttatatcttttcaaggttgctttaaaccagaagtgaagcaagtattggcccttatgcacagtttgcaatggattaaagaccttcaaatactagtgcactatattgaattcgattcgctgttggtagtcaaagcattgcattctactaaatcacatatttcagatttttattgcttgttaaacaacatttttcttgtagcattcaatttttttaaagttcagatctctcatatttaagccaaatttagtcttaattgttcatggtgtgaggaaattcctctttctattttgcctattgtattttaattgcatttggttttaatataatagcattttcaaaaaaaaaaaaaaaaaatacaccggaaaagtcgagcctaaattggagggaaagtccactctagataaccgctaaaataaataat

SEQ ID NO: 122104 - DNA, 504 bp, Cannabis sativa
tgtgtaggataataggaaggactaaggagaatgatgtgaatgggtgtatgagactgtgcctgtgtgttcacaatcttaaataataataagttgtttggccttttagttggtgctgtctgcatcttccttccttcaagtttcaactacatattttatttcaaaactatgttttgttttgtttttatttttccttttgaaagaaagtgtcctcgtgatttaaggctaattcatatatgaggctgatattaaaatttaatgcaatattgtaaaatgtattcatacaataatgcaatttacttttctttaatttattatcacaacaagcttatagtgacttttctttgaaaaagaaaagattatcttacgcatttagggaaaataaaaaccaagaaggaaaggggaataagattattattattagagaaatactaaaaggcaccagtggggcctagcacccttttatgtgtcaatatcgctattggtccaattaagtatcgggtccta

SEQ ID NO: 122105 - DNA, 1674 bp, Cannabis sativa
tttacagccgaattgaatagaatttgcctaaggtaaaagaaaacaaaaaagtgatttaattccaaaaaaggaaaggattttaattttaattgtttgtatatttttgactatttagccgaaagttttacttaaattatatatttacattgttaaaatatgtaattaagtagagcaatttaaaacatgggttttcataaaatagataagtacaatgacaatataattaaactttaataaaaaagattagctataaagtggagaagggggatagcatttagaaagtaacacactttatttttttatgagccatatatagatacaaaatatatatatatacataaatagttttcatctttttattttgtctcaaattctctacctaacctaaaagagcatgtacttatatatatttctttatatttatagactaataatccatacatagtgcttttccaaatcaatgtccacaacaaaaagccatttcatagtttgagcaaaaaatagtttatttgtcaagctcatattgttaattaatctagataatgtggctggatacctaactatacatatatataatctatacatatattataaactcccattaataactttacaaacaattaaaaaaatgtacataaccaaaatattatattaaggtaacaattaaacaagggtggctagctacattccaaccctagttgacattattagtacatataattaatattaaatatatatgagacacatgagtttattatatctaatcattatccaagacttgcatatatgccttatccttttttactttttctagtcgttttttatttgttaactattgaatgtctatagaaaatggttgcttgctttgaatttttaaatatttattttatatggcttccttcgatttatttgaatcaaataagacacttttcacaccataacctttggaaaagtgtcaaatgttttttttcttcatttaatcttttataagagaatatcaaacacaacatttttccaaaaaaataaataaatatcaaacagaacattgaggaaatccgattggttatttggtaatattgaaaaatgtgatgttagattggtatgaagaatagctaaaattgaatttgagtttctaagtgatggtggcccacattttttaagcccttaatctttgtaaagcccattaggcccagggtatgagcccacgtttgtgtaaatttagttgcagtctccactcacttatgagaactttttaaaaatatgttttttttcttaatatatatatgtataaaattacagcacaaactatattcctatcttttgtaaaattaattattaaaaggtcatattcttttcaaacaattaagttaaaaattttcttagataaatgtatataaaactttataaaatctatagtacaaagaacttgatataataataataaaaaatatatacgcaaacaatagaaaatgtaattttatgtgtatatatataagaaaaaaaagttgcaaaaaaaagctatatatatttttttaataaaaaggcgctatatatagtataaagggatacttacataaaacttgtaaatttttttacattttttatgtttaatgtttttttttatatatatatttttacggtattctataaaacacaaaaaaaaatatatatata

SEQ ID NO: 122106 - DNA, 1268 bp, Cannabis sativa
tgtcatgatgtctcaggaactactgcaagggtttaagggctacaatatttgtcaagtccctcgggattagaacttgtttgcagattttctagcaaagcttaccaaagacccaaaaatcatttagtatggagtagtccctattgcccacctagaagcttcgagcattgagacacgaggggaaaattccattattgatcactctaactcttggatatggcccatctatcaaatcttgaatttgagagagcttccaacagatgagctatcgctcgcaagattcagcatcaggctccacaatatgtgatactgaatggaaagctttattgtagagggtttcagtaccctacctgaggtgtgtggccagaatcgaaataagtgttattatacatgaggtccacggaggcttctatagggaccgcacgtctggatcaagtttatctaagaaaatcctttggcaaggctacttttggccaccatgaagaaaaattgtatagaatatgtcagaaagtgtgaacaatgtcagatatatgccaaggttccccgcgcaccaccaacgaaaatcaccctcatgagaagtccatgggctttcgctatttggggaatcgacttagtaggatcccttcttattggcaagggaggagtcaagtacgccatagtcgttgttgactacttcaccaaatggatagaaatggagcccatgaatatggttacctccaaaaaggccccagattgtgtcatcaaaaatatagtatgtcgcttcagttttttttataagattattttggacaatgggaagcagtttgatagtgatcacttcatcgaattttgtaaccaagttagaattggaagagcttcttagctgtggtcagaccagaagcgcacagacaagctgaagtcatgaataaaatattgacgatgactctaaagaaaaaactccaagcttgtaaagcccattggtcggaggagcttccactagttctctgggcatatagaacgatggaaagaacttcaatgaggcataccccatattcaatgacttatgggtgtgaggaagtcaacctattaaaaactacaatcccatctaaagctgaacatttgggtggcttaggccagctcgacccgtttttataaaagcccacttttttatgtgagctcgacctagcccataagcacgaattatttgtgttgggctagactcgtgccgggccttaatgggccaacttattttttatgaaatgattgacccatattttgttgggttttatgcc

SEQ ID NO: 122107 - DNA, 1057 bp, Cannabis sativa
  modified_base (603)..(606): a, c, t, g, unknown or other
  modified_base (987)..(996): a, c, t, g, unknown or other
tttatgaaagattatctgatattgttaatgtattttttactttggaagaaaaattagatgaatctgtgttggttcggaaattactagcaatggaggaggcaaaagattttggaaaaatgaaggttgaagaactcatgagttcattaagaacatttgagtaaaatcaacaaatcaagaaaaggattaagccaaattcttcagctgagaaagcaaaggtattgcatttaaagtttctgaaaaacatttttatgataatgagggtgatgatgaaatggcttattaagaaactttcaaaattacatgaaaaaggttggaaataaaaagaatttctgaaaaactccaaaaggtaatgatgcatctaattcttttctccctaataataaaaagagtattcaatgttgttaaccccaaaagtcaaaagagttgatttttaagattagtcaacgatcagccccagcagtcgagagacatcaactgtaagatttggtcaaagaatgaccgagtcaatacatatggcctaaggatcattaatcttggaaatccatgcttataagtctcggggtatatccgtgcaacttggaggtcaaccccgtaacaactcannnntagagttagtaagatcaacttactaggttacaattgttggaggattttcgtagagatatgttcagaattggatcttaacaaaaacataagattcaaagatctctttcttatctttccaacgtatcttgaaacgtctaattccaaagaatatcaagaaagttatggaaaaactactaaggttgccgaattgtgacagcttggcatgcgagctaacgtctcccatgcgagctaacggctcccatgagcgactccctagctgttgtgcgatcccatggggggttgtgcgagtccaggggccattaggtgagtcaaggggaattttggtgagtcgtggaacccttcatacaggtggtggagcatgttgggctttgtgccctaaannnnnnnnnntttcaatgtaatctttatcatttaattatcaataaaagacagaagtattttcatcacttat

SEQ ID NO: 122108 - DNA, 848 bp, Cannabis sativa
  modified_base (774)..(781): a, c, t, g, unknown or other
ggacaaggcaggcccacgtagagatggagtgttgttgggctttttcgggttagtttttgggcccggaattttgaagcgggtctggagtaaccgccggatgaatcggagggagcgagctgggacatcatgagacgccacgtggagtgccaggctgtacggacggtggagatgagaagacccggtggaagggatgggccccagaggagtttggtgacggaggagattaggtcagggggtttgggggtttcgtttagggacattttaatggctaaacgacgtcgtgttgggttggcggtggtggcgaagccgtaggaggttttggactttttaggcggtggaattgggatgtgggatttgattagtgaagtgcactgcatttttttttttttgctcaactcaagttggttccttctttataagtattatcataaaaaaaaaaatacaaaataaaaaattatttttatgattagaatatttttattgacaaaaattagtattttagtaaattgtttgataatttttttgttggtttatagtttatagttgttataagattaaacaaatttccttctagtggctaatgtaattaataatgtttcttcttggttgtgtatttcattttcatgatttgatagatgatatttctcttctgttatttttttttctagagtaatgatttctcatgttaaacgggaagctaataaaacttttcatggcttaactaaaaaatagttgctataaaattgaaattttgagcatgtttggtattgtttnnnnnnnnttgttttcaaaaaattgtttttaaaaatgagaacaaaaaatagtttttaaagtttttaaaaacaagt

SEQ ID NO: 122109 - DNA, 1458 bp, Cannabis sativa
  modified_base (1402)..(1412): a, c, t, g, unknown or other
ttgttaaaaattgagctcagggtcttatttttactattttaataaaaaatataaggtatattttgtcatttaacaaaatagagggtctaattagtaacttttgcaaaacacgtggtccaaaataatatttaccctaattttttcctgtaagaccaccactaattttctttctattattcttggtacgcagactatttttcttatataataccatcaaattttttatcaatttatcagagtatattataatcacagcacatttttatagggtccactttattagaaaattaagaggcaccaaaataaaaaaaggaaaatggatctcttctaaataattaaaaaactatttattctaaagacaagtaaatatgtggtatttgtatttgatcctctaaagtaaactaaaactaacttacttagtcttaactaactcaattaactttcagtaatgttagttggttagttagtgctagttttacacctagtttctcacttctgaattagagaattgggagagagtttagaggttgattgcttagttttctaagctgtaaaatcatgttcttgaagggatcaagaactaagggtgtactcgggtaggagttgagaaactgagactgtttctctggtgtgtttttcaagtgaagaagagcattgtttgctctagtattggtgattgtacaaacttttttattctccatattaattaaagtattgatggtgtttctcagttggagtatggccagggatcaacttgatctttaggaccggaaccaggataatccttgttgcattctctcttgattcaattatgctttcttgtattatgttttcttgttctttctgttcttgttaatcgttttagtgcaggtgttagtgttgaatcgtgttattattgttgttgaatttacaacaaatcatattctaagaaaactagagaacaactttaaggtggttataaaaacactaatgttatttttttttttcatcggaccaaaatttttaaataatttattcaaaaattatttaaaaacatacctcacatataaacaaaatttaaataacttgtttcacatgtatatgaaaagaaacacacatcacatatattgaatggactatttgaattttgtttatgtcacaataaattatttagatttttcttttgaaaaataggtatgatataattatctatgttatattaaatctatataattaagagtattgtttctttttttttttaaaaaaaatattacaattcaaatttaaatttaaattcactacatatttatcttatcttttattttatatcaaaagctaattagtatttttacccccgaacttttacatgtgccaaataatatctcatgaacttttttagctgttaaaaattccccctaaactnnnnnnnnnnntagatttaaagacttttgtttaattttattcaatttgactatttta

SEQ ID NO: 122110 - DNA, 1232 bp, Cannabis sativa
tgcctagggccggccctgcatataatgacctgctacctttttagttgtattgattcttgagataatagcacacggattagtatggctccctttaatagtacaataatgaaaactgagtgttagagattcaaaacttatgagacttatgagattttgtgaagaaaatagactaagtgtctagtgagtgagtgaggaggcatgagagagaagcaagagtgcttatgagacttagaattcaggtcctttctaccttgcctaaggctctttataaaatctagggcttacaaaatatcattattcaaataagtaaatattaaaatctctctttctatcatatattttaggaaaatttgcggcaaaagctcttgaaaagttcagtttgatgtagataagtccccaacgtcgaaaaataacggcaataattctcaatgtgatattttttgtaagtccgttagtcctattttttaactgagtcgttactcatttaaaaatgccacatattgaaattttgttggtccaaattatattttaattaaaatatttttcttttttttttcgtttctcttttctctttcctcttcttcttcgtgttcttctaactgtccagaaaaatcagaaacccaaaaacactggcatctctcccgatttcaaccaaacccctccacttccattttttctctttgtctcattcatcaatctcaattcacccccaaattaaattaccaccataccctttacaagtccctactgccaagcaaaactcatctctcaattccatctcatttatgaacaaaacccaagaaactcccttaaaaagaagcccaaaaaactaattaagaaaaaaaaaaaaaaccagaaaaccataatcgttgcaccttgctccgactgtgatttcactccatcccaagtcatcccacacatttcaactgtgatcgacgaccctaaccacgactagctcgtcgccgttaacatgcaaaaaagagagagacctagagaaggataaaaaaaatgaacatatgccctaggtataccttcgggtttcgaatataagagaaagagaaatttgattagtggtgtgattaaagaaaatcgggattgagagtgaaggagattaagaagaagaagaagaaagaaagaaaaaagggagaaatctgaaacaaaccataacgggggagaaatcacagaatcggtggcctccatttttgacgacaaggcttcgtcgtagggggtag

SEQ ID NO: 122111 - DNA, 1283 bp, Cannabis sativa
gctgctacgtggagcctccctgtgtgtcgagcagctggcatcatggagcctccttctgtgtggagcagctcgcagcgtggagcctccttgtgcatggagcggcccactgatgtctgtggagctacagatgaaggaagaatctacaggatgtggagatgtgacgaggagatgaggacaaaagaagcgaggaccgtcctttttcccttttaattgtcttgaaaattttgcattattcctctttcttttattgtctataagaacacttatttgttgaatttctgcggttaacatttaccaaacatatttattaatatgtatgtgtatgttaccatttgtagagtaaaataattaataaagtaaatcatatttaagataatccaagattaaatatattcattagagaattctttctacaaaataacttgtcgtgaatttgaaacttataattgactgcgatgcaaacaattcaaagaagttaattaattaattaacttagaggattaacaaaatttcaaaaaaaaaaaaaatcaatgtaagaaaaccaaatgagtaataataatgatgtattttaacataaacactacaaaaaattgctatttttaatgacaactttttagtcacaacataaattttttgtgactaaacgtgacttttagtcacaacaaaaacttacttgaaactaaaacatagtatttagctacaagttgtcacgaatttaattttagtcaagtcacaacaaattgtaatttttgtaacgaatacttttagccacaaacctttcagtcacaacataggaatgataattgataattagtcacaactttcttacgtttagtcacaaattttgttgtgactaaaactaaattttttggtagtgaaaatatgtgctgaaagattacacatactaattatatgcttaagaagtaaggagaatatgaagaatattttttacacattaaccacatttattttaaaaataaaatttaattcaaatatatttttttatgagtattatatccaaattatcctcacaccctcacataagaaagatacaattttaaacataatagattgtgttgtttcgagatggatgttgtaggtttgcggaaagtttggaaaaaattttgattaaaggagaatggaggttatcgtaaaataatagaaataaaattgatagaatgattaaaaaaataggtaaacataataaattttgaagatgggttgaagattaaaggtataaatttttttaaaaaaatatgtagtgtaattgtaacaccctaact

SEQ ID NO: 122112 - DNA, 1601 bp, Cannabis sativa
tagtttagccgccaaaaattcggtttttgtggttaagtgttacaaaccgtaaaattcaagtggtttagccgtcaatctcccttattattaagtatagtttgatattgggttttttctcgattatgcattgtgtaatatataaacgcttaaattaaaaaaaaaaatatgggatttttttattttactttaataaatattataaaaattgttaattagaccattattttatattgttactgtaaaatagggtcggtaaaataggtcggatacgataacacgactcgaaacctataccagagttagcaagtttgggtttagatttgccttaaatgggtttgggtggtatttgcgttgactcgtctaacccgtttagtaaacgagtcgtatttggttgacacaatttatacgaaactaacttgttaataacctatttaaagttattttagtgttttaacaggtcataaacatgttatatgtttaaacaaaatatgtttataaatgagttacacatgtcgtattcgaattaagcatatacatgttatacatgggtctcgacacgatacgattacgacccgtgaatacaaattgtttctcctattgctaaagggcactcatagtgccttatatatttgtgaggtgtaatattactattggtacaatttaatattatatcttacttattatactttaataaatattataaaaaattactaactaattataaaatattatttcatactagtattaggtacattattaccttataataatactcatttaataatgaaaaattgggttggggtcaaagtatattaatatgtgagtattttataaaacattaactaagtaatgaacacatacaaattagaatacataatgaataacattcacaaatgggtgcactaatatacttttttttttttttttaattttttatataacaatgtataacgtgtttatttaagattttatgtaaatttgtgataaatttgatgtcttaaaaataaaatttaaataatttattacacacatgtatagtattttattttatacgcatgtcaataaataatttgaataatactttttttcatggtaaattatcaaaaatagcataaaatcataaaaaaataataataataaagtagtgcattaatattttttttttttttttgacgtagtgattaaaattacttatgaatttacgatgcagacacatgcaactagcacaggaacctccttaaacttggataattcatcatctaactaaaaggtatactttgtcaaactataaatgattaaagatagcgagcaatatggaataaagctgctcccaaaaatttagacaataaaattatagcctcctcaaacagcacacctaaagatatggtagatttgtgatatgattaatgggtatgattaatggaaagcattaaaaaaattacaaaaatccagtgcatcaatatacttatttttaagatatggacatatttttctcatattcccttttgtttataataagggtaaatggcggcaaaacccccaaaactttcattttggtttcacttaaccctcacaacccaaatttctgcgggtaaaccccc

SEQ ID NO: 122113 - DNA, 610 bp, Cannabis sativa
ttggtacatgttaaagttcaaggagaaaaattactaattagcctaacaataatgataataataataataataataagtgggtacaatgtattttaaaaaaattattgggagaacaataagtaggtggaatttttaattcattcattcatttaagtatattatcatcctattctttactaaagattcagttttattgatggaaattgaaataagtatatgtattgtcgaaatctggtgaatcataataatcaaaaggataattgtgataagtatctaaagttgtatgttactaatcatcatatattcattatttttttagcagtgtaattatatcttcattttcgataatatagattctgttttaaatgtattaaatgaagattttcgtccaacttaattatttaaaatgagtaatttgcggtaaaactttttcaactattaatttaattacaaaaaaccatccaatctcatattttagtaagaaaatcctccaaaaatctgttctgtttacatttttaaggtgtgtccagcctcgttaagtcctaattttaccaacgtgacaatgacaggtcactaaaaaattatcctacgtggtaatattttacaaaat

SEQ ID NO: 122114 - DNA, 597 bp, Cannabis sativa
tgggagagaagggatttcataattggggttttgaataagacgaccctttcatttttcatttttttctttttcatagttaaaaaagaaagtaataagaatgagaagttacaacttattgtaagaccacaatcatagaattaatatcaaatcaatttgcatgtattcgtataagtgagattaatttgttataaaggataatctttaatcttcaaaatcatattgatatgatatgaactttatttttattggctttgaccaatatgaaataacattgaacttaaattgagcccacaaaataaggattgatggtcttgtgattaaatgtgaaaccaatagctatcatgaatgatttacgggtcatggtgtaattttaacgcaccaaaataatagagagtagttggctggtggagaaagcaaacttaatagagaatgcaattaggcctttctcagtaaaactatcacttcttaaggtaaaaattatacccaaattatgggggatttttttttttttttaccattttacttttttatggcatttttaaataaacctttgtgtatatgggatttaggttttgtttacccttttatgggtttttt

SEQ ID NO: 122115 - DNA, 1942 bp, Cannabis sativa
  modified_base (1012)..(1037): a, c, t, g, unknown or other
tttttttttttttttttctctggtaaataccgaaagttatatttacggtactttcatcactaccagtccattaaataatcttattaaaatagattaaaagttgacatgtgtcaatatattagtggtctactcatattttcaattaaaaaacttattaaataattctaaattaaaaaaaaaaactaaacaataataaaattaaaaaggacaattacattcttaagggaagaagaagaaacaaagagagagatatacctccaaatattgtttttattttttttttgtattatttttattaactaaataaatattatttagttttttcaaattctaaattatttaataagatttttattgaaaaataaattttttatattttatttataatttataaataaattaaataaattttttattgaaaatataagtggattactaatatgtttacactgttttaataaaatttaacaggttagtagagacagaagtaacttaacttaatttataaaaaaaaaaaatatgatatatatgaaatcgaaaatataaaataattatatcacaaatattcttatatattatatatattttttaggaaaaaggtaaataatgaaaatggagctcttaaatatgaatgagtctaccaagctttctacaaatgatgataggtttttgtattaaattgatagtagtttagtgtaattaagtctataaaagaaaaaatgaaaatgggtccacttcaatcaaaggaactagttgcatttcaaataataataataataataataaacacaaagaactagctagctgaaaactaaaggcaatgccttggagtagtagagaatggagtgaatgtaacgtgtttctttttctttttcttcttttatgcttaggttagtagtagtagtaaaaagaataattattacatatatataaacaaaagacacgcacaaatcgagaaacaaaagacataataataataatatctttcaaaaaaataataataacaataatnnnnnnnnnnnnnnnnnnnnnnnnnntaataataataataataattgtcagttgccggcaacgactttttgaaagtgagaaccaagtctctcagtttttgtctatttgactcagtaaaactataacaccttcactttgcttccatctctttctgttttttttttttttttcgtttcttttttggcttttttaataattaactttattaacttgtctatttttcttttttggataagtctgtatcagtcttccccctaagaaatttcatggtcattattttgtatgttttctcttcgaaaaaaataaaaagataaataaatatcaaggccgctttcatgcaaaattacttttatataaatgtttggttgtttatttttgttatgcattatcgtttttcatttagtgggctgttttctgtttggatgtttaggatggtatattttccaagatatttcctttcgaatgtggagttgtacgtcaattatcaattaatcgttaataagataattatttagtttattaactcaatagtttttttttttttttaaaaaaataaaaaatccgctttattaactaattacttcacctaccaaacaaggtagcaaatcagttcactactataaaaaccatctttaaagacagtttttaagacgcgttggttttgacaaaatttgttagctacactgtaaggttgaaaacaaccgacgccatatatacccctatggcgtcaactattatctagttactaacgccataagagtatatatgacgtcagtttctatctaataaccgacaccatatatacccgtaggaatcgaagccaattatatatttaaaaggtaaattaaatattatttaaattaattttaggattggccaaaatacctaatttcatttcatagaagtaattaaatattacacaaatattgta

SEQ ID NO: 122116 - DNA, 3811 bp, Cannabis sativa
  modified_base (2141)..(2143): a, c, t, g, unknown or other
tagctttttcaaaaactgtgccaatcggtttaatactatttcattattgtgttttctaatttttttttttaatttttacattatttacaatattgtaaagtgatcattctattaattatgacactttcttactataatttataattttaatttctataaacccaaattaatatataaatgtaatacttaattatacttttaatttgtttaaataacttttattatattaatattgtttttctttagtgcatccatccaatgcacaagtgcacattaattttatcttctttaattaaagtcaatctgcacaagtacaaatataactaaattggatgtgactgtatataggattatatttgatggactatatcttgaacaccccttagtttatgttctcatatcaagtgtaaaaagaattgaatgaatttaactcggtaaacaaatggcgtcaattacgccttcactgatgccaagcagagagtattctgttatgttatactggtcatggtcaagcatcaataagttgactgcagtgactcccaacgcctaacttttacaagtccttgccgccgccctacattaatgtcattcctataattacaattatacattatatttaacccaattaaaaaataaaactgaaaaaaatatcgaatgaagattttggttaagttacagactgtgttgttttttttaagacgttttctaactctactcaaagtgtatacggtagtctaacaattacggcattttaaggataaaacaacttttgtacgaagcgtttggcaccaaacgatattgctctattacaacccaacaaaaactgctctaagaaaaatcataaggaagaaaagaaaatttttctgggtttgaaaatatgtgttattccattattctgatacaacttatacaaagaaatcgatcaaaaataaaacggtaatgtgattgtgggagatgttggtacatggcaggaaaaaaaaacgaatcattgactgatggcttttactgcttcatttagtgttataaaaataattattaataaataaataatatttattttattaaataattttttttgaaaaaataaagtgacaccttacccgccagctcaacttggaagtcgaacgatggcgcgcgtggtgatttggtgtgtgagtcatcacccatgcacacaaactggggtgacccttagggcccaaacccaattctcaaggttacaccttatttacacttccaaggaaatgttcctatctcatgtgggactcaaagcactatcacacactacacctcatacttttttaaaattttaactaagttccaacaatttcccacttaaaattttaaaaatattttctcgagcaatatcagaaaactataagacaatgcttaaacaaaaatatctttcgatttgaatctttgcgtagtgaatatgatttagattttactagagtggctcaaagtcttgaactctatctttaacaatgtaccattcactaatctttcaagggtatattcataaaagctcgtgcattaatggccatgttcgtctattccagtatagtgaatgctctaaaattttgccccaaattctataaaaagcggccccacttccacattcacataggggagtctatcaagagggtactccactctacatagagaatagatctcattaagagtttctattaactcatcctattatggcttcaggttttcatgcttctcatataataatagcataattaacacatatcatctcataacttgttattattactcgttcaaccaaatttttgggatctcaagccattgggttgggttaccattatgagtgactcatctttctaaggacaattttttaagttttgatggactttctctctagctatttctttcttcaaaggatctgctaaattgtcatcaatgcgtacaagatcctctctaatagctcatgttgagaggaactctctagtaatgttgtgcttgcgacatattttttcgtttcttactattgtaataacggttctggatttttcaatagtcgctgtacgatttcaatggatcaacacaattggtatgtctttcccataaagggatatcaactagtaggcttcttagccaacctgcttcttcactagcannngctagtgctatcattttagactccatggtgaattaagctaaaatagtctgtttctttgacttccaagaaacagctccaccagctatgctaactatatagccacttgtttctttggagtcatctgacaaagtgttccaatctacatcattgtatccttcaagtacagctggaaacttttgataataaggtttgtgattctcttaaggtatctaattaccctttcaatagcatgtcaatgctctatactaggtctattggtaaacatgcacaatgatctcacgacataggcaatgtcaggtctcatacaacaagtattatatcgaagactgccaatgatgctcgtattttcaaattgtctcacactgtaaccagtgttcttaaatagctctacacttggatcatatagtgcgcaagcaggcttgccgtcaaagtaattatatttctttagaatcttctcaatgtaatgagatggaaccaaagaaattttctttttagacctagtaatcttaataccgcggattacatctgcttctttgaggtctttcatatcaaagttagcacataacaatgatttcacaacatgaatatttgaaccaaatataagcaagccatccacatatagacatataatcatgcaattgtcactttcattcactttaaagccatgtgagataactaaattatcaaatttctcatgttattgcctaggttcctgcttaagaccatacagagatttatctaagttgcaaaccttatattcctggccagtgatcatgaaccctttaggttgatccatgtaaatttcttcttttaattcactattaaaagaatgatgtcctaacatccatttggtgcacaactaaattgtgtatagaagctagtgaaattaaactctaatggatgttattcttgtgataggtgaaaaaatatcaaagaaattacattctctctttttcaaaaccctttgctagtaaacgagctttgtatttatcaacatttccatcgagtttcatttccttttcaaaatccacttacaacctatagttttgtagccaggtggtaagtttgtataatgtcacgttttgtttgtaacaagagagtccatttcatcatcaatggcctcttgccacaggttagcatctagggaagacaaggcttcttgggagttagcaggatcctccagtaagttgtatgcacaaaactctgaaccaaagtcttttgctactctagctctcttgcttcttctaggttctatttcaatactctcaatgtgctcattattcctaatcgtaggatcattattagtagatgtaccggttggttttatggtactaaatcaagtacgcagtagaagagttacgtattatcggcttatcattgtaccatatcctaatagatctttagatgtgtgtacattaaatcaaaacaataaatattataagtttagagtatacctcttgaagcctatcagggtatccttaaaacttctcgtatgttgtatcccttaatccagatgatgaggaaattataattggactcacaccagtgtcttccaaatcgttccaccacacacaaggaattgtgtgggctattagaataaagtgtataatgatgttcttgttgagttctctgttgagttttgtggcctaaataaaacccattacaatc

SEQ ID NO: 122117 - DNA, 613 bp, Cannabis sativa
  modified_base (564)..(564): a, c, t, g, unknown or other
aatatgaaattcgcacttagtgcggattggatgttgtttgaccaaaaaagtgtggattggatcggatgaacacccctagctattgctccattattatcacaatataggattatgacttttgtactcaatgcaatatatttatctttttcttgaagatcctttttttgaaaataaatttcagagaattttattatttttcatgtagattattatttaacataaacaataatttgctataacatgcaatctaaaattatggaattaaaaccgagtttgaattatacatacagaggttgcgacagtgaaatttgtctcatttcattcaatactctaacccttgattctttattgtagtaaagtatgatcaagtactaaacctgtttctttaataatttgaatttgtaacaattttttacattgactttcatagtgattaagttatcaaatagaattgtgtgggttattctctcaatactttgatgcaaaattaataggggaagaaaaggatgtgagtggcggctagaagaagaaaaggagtgagggagctttttttttttttttttnctttctttttctaacaagaaactgagactaaaaagcttaagtttagtgc

SEQ ID NO: 122118 - DNA, 4215 bp, Cannabis sativa
aaaggagaagcaagataaagttgctgaagtttggagagttaataaagttggcattggagccctagttgagaccaagattaaaggagaaaaaattgaaaaaatgatggcaagtagctttttgtgttgggacttttattctagcaataaggtggaaggtcggattctcctgctatggaggaacaattttgttaatgttgaaattattgaggaatctaagcaacatgtgcatcgtcatatcaaaatgatagggtagaaaaaagattactttgctatctttatctatggagccaacaccatagaaggtaggagtgatctttggaccgccttatccatgataaatgtttctaaagcttggatcacccttggtgactttaatgcggtttttcatcatgatgacaggaagggggggaatgatattagtcactttgagcttgttgactctaataattggattgcccagtgttcggtggggcctataaagcgcatgcgttcaaatttcacatggtccaataagcaagataataggattttttctcgaatagatcatgtgtttcacaacaaggagtgggttgatgatttttcgaatacttctgtccatttctcttgggagacctattctgatcattgtctttgtgtggttcattcggttgctacagaaagtattggaagcaaaccgttatggttctataatttctggattgatcatcaagactacaagaacattgtgctagatagttggggcaagcctcttagatgtggtgggttgaaggagatttatttaaaaactatgagactcaaacacaagttaaaagctttcaacagacactcgattgggaacattggagatgcttatgagaaggccaaggacaactacaaggaggctcaattccaatgtcaagctaacccaaacaacaaccatttccttgaattcgagcaagcggctgctagccaatttcacatccaggagaaaatgtacttggactttctccaccaagaaagcaaggttaattggattcaaaaacgagatagtaacataacttattttctttctatgttgaagaaacggaaggaagataacaggattgtttcttttactaccgaccaaggtgtcctaaatgatcactttccagatgttgtgcaacactttcttggccattttaaaggcataatgggaaaatctaagcctaccaccatggagatacaagctgattgcatagccatgggccctaaactcacccttgatcagcaggttcatctcttaaaacctttttctctcaaagaagtcagagctgcgatgtttagtatccctaatactaaatcccctggccttgatggatttggttcggggttttttatgtcagtgtggcctgaggtggggaaggatatccatagggatataactcatttttttggaactaatcaattcccgaaagagctccatagaacgactctctctcttatcccaaagattgatagtccttctaaagctattgattatcgtcctattgcgtgctgcactacattatacaagtgtgtttctaaactgatttgttcccggcttgcaaatgtgcttcctgctttagtgagtcaaaaccagggagcttttgtgaagggtcgatccattgcctacaacattctaattcttcaggacatattgaagatgcacaatcaaaattgatatcagtaaagcttatgatacggttaattgggattttcttgaaaagcttttggtggcctattgttttcctgccaagtttgttaactagatcatgaattgtgtgagaaatacttcctattctttactgctaaacggtataatctagggtcttttaagggagagcaggggcttagacaaggggatcccatctctccccttctctttgttctagtcatggagtatctttctcgtaggatccaacaagcatccagggaaaaggatttcaggtaccatcccttatgcaaaaaaaatgaaactaactaatctttgtttcgcagatgatttagtcatcttcgataaagggaatgagggctctttaagtgctatcaaggttatgcttgatgaatttagcaagacttcaggtctttccgtcaattttgctaaatctcaagtttactttggtggagtttctcaaccaattcctctcactcaaaagataaatctttctattggtgagttccctcttaagttccttgggatccctctaagaccaacaaaatggagtctagatgattgtgggttgatcttgaaaaaaaatgaaacatagactccattcttgggctaataagcatctttcttatgctggccgaatgcaattaatccaatctacattgattggattaaggaattattggatgagagtcttccttcttcctcaaagtgtgataaaagagattgagaaattgtgtaggggttttctttgggggttgaaagacaatcggactagaactcacttgataagttgggagagggtgtgcctcccaaaagcctttggagggcttgggttcaaggatggttctaagttgaacaaagcttccttagctagatttttatgggatttgatgaataaaaaagatttgcattgggttaagtggagtaactcaatttatctcaaagggagtgatatttggtcttataggttgagcttggatactagttggtattggaggaagctttgtagacttcgaactactttttccgaatctaaaattgttgaagtaggtggagaaaagtttaatgtgagcatgttgtacagaagcatgctacaccaggatgctttctcggctgctagtgcaatttggagcagtttaaatgtgccaaaacatgtgtttcatctttggcaagctgctcaatcgaagcttctgacaagggatatgtttcgccgtttgagcatccctatcccaaacaaaaattgtgtggtttgtgacagtgaaaccgagagccaccaccacatcttttcccaacaggtgctgtccaagctccttaattggttggggtttaatggttggtcaaggaactttgatagttggactttttggttgggcaatacaaggccgaacatcgtggatagtgtgagaacacttttattggcatccgtggtttaccacttatggagcaaccgaaacacttgcttattttatttttattctaactctatcatttgtatagtgagcaaaattaaaagtgatgtataatataggctcttgttgatcaaagataggaaaggctctagagtggagaagaatttactacaaatattgatatgtaattagtaggctttgtggttgtgcttctctttgagaagtgtatttgtttatattggcgagttgattaatgaagttccttcttcttcttgataaaaaaaaaaccaatttttttcactatacgatggtctgatcaatctcaactgcaccgcgaaaaatattttattattattgcataatttaattttctcattaagcacaaatagggtatatgttagattgtgggaccggtgagtcttcgagtggcggaatcaccgtgagcaggttgagaaacattaccaacgagaattttacctccgtcgtgaacataacgaagctcaaacaaaacgacctggtcctgattctctccactcttcgctacatcccataaacttttgcccgctaattctgttactcgattcttgtgtgatcaaaggcgaaaagtaccttctgaagacatcgtattaagtatggaggttcgacgaaggtgataagtcttcgatgttcgatcagattgtggaaggaaccaaatgcggtgtgttggatacgtaccgaggactatgcaaatgggcaagaactcaaataaattgaggcaatttttcaatttttttggaaacgtcattcgatgtttgccgttcgtctcaatttttcttataaattagggaagagctcgattaaccttaaatgtagataccaggggaagttaacttcttaaaaaattaatttatattttcttttttctaaataatttatttactaatatttgaaaacattattctttttattgaagaaaaaatcattattttttattatagaaaaaaaaaatttactaacattttaaaatgtcattaaatttaatctattttatcatttttacaaatgttgttatatatataatttactaacacttttaaatgagattatttcacaaaaatataaaaactacaaaagattacaaaaatacggtttcacgga

SEQ ID NO: 122119 - DNA, 1321 bp, Cannabis sativa
aaaaaatattctaataataatattaataatatattttccttcaaaataattaatttttttaaaaaaataaatatatctcacgtgcgtagtacgagtgtcctcactagttatataataaatcttaattatttataattaggtttttgggatattacaaccatccccccttatagaaattttgtcctcaaaatttgcctgaacaacttgggatattgttcccgcatctgcgattctaactcccaagttgctttttcaaacttgttgtttctccacaacactttaaccagtggaattaccttattctgaagtactttctccttttggtccaaaacctagacaggttgttccttatacgatagggttgttcgaatatcaatatcaccatagcttaatatatgtgtcgaatttgaaacgtactttctcagcatgagatatgaacacattatgcactctagacaacgcgagacgtgaagctagctgataggctacctggcctattcactccattattttaaaaagaccaatgaatctagggcttagcttccctttcttcccatatctacatatccctttcataggcaatactcgagaaataaaaaatctctcacttgaaattcgatatccctacgctttggatcaatgtggcttttttgtcttctctgtgaagcaagcatatgagatagaatcttttcaatggcttcactagtcctctaaactgccttaggtccaaggtactgtctctcaccggcttcatcccagtgaataggtgatcaaaatttcctaccatacaacatctcgtaaggtgccatggcaatggtactctaataactattattttacaagaactcaatcaatggtagaaacttgttccaggaaccctcaaaatctatcacacatgcttgcaacatgtcttccaatatctaaatagttctctcagactgaccatctgtttgaggatgaaaggctatattgaatttcaacttggttcccatgactttctgtaaactctcccagaatttaaagtaaatttgagatcacgattcgaaacaatcgaccttagagcaccatggagtcgaactatttccttgatgtacaaattagcatattgatccatagtataggttacccgtacaggtagaaagtgcgctgacttggtaaatctgtccattattacctatatagaatcataaaatttggtgctcttaggtaaacctaccacaaaatctataaaatttgaagggtgtaacggtaaatttgtctctactcagtgtagatcatctttagaggatcgttgattattaggattataacaaatagataa

SEQ ID NO: 122120 - DNA, 1278 bp, Cannabis sativa
atatttataattttactatatattagaattatatatttaagtaattatttattataatactaaaaaattaaattaaccgcgcgaagagctgttatattgcctagttacttatataagaagaaattttatgatatagtatagaacacaatgactaccattaggctattaagctattaagctagctaatatatgattgtaaatatcattatgctagtctaaaaaaaaaatagaacacaatgactacttaatagctatatatgtttactttgcatttgcgaatgatatctatatttcgaaccctactagctaatactatatagcaaatgcatgtcaccaaagttattagttaatctaacataagtagggaagtaaggcaagcaaggaaaaaatatggtggttgtggtagctacctaaatttttgaaatagaggttgtcacctcttaattaataatatggtaaagaaaaatgggcttactcaagttttctcatgctttttttgctaaacatttctatacaaataataaagtatttagcattattatgagatgacgtcctataattagttaacgattatttataatttttattaaaataaaatatatagaatccgatattaaattacatattacaggtcataaaagtattaaataccataaatactctttaatatttttcgtttcttgccacaataccataataattaatcaaagattatcaaaagattaatttcaactatataaatatatatatatagtgattcacctcctgtttaaataattaataccaataattagaagatgtttgacaattgatacccttttttttctcctaagatatacaaatatcatcaaatataaattaagtccctctactaattaataaacagtgttcaaactagatatttacttaacatgctctgtagtgatatatattaattctaataataggctgcttaagaaaaaaagtttgtatatagctaattttactgtgtacaaaaaattaaacacctactttgaatatttcaactctatgtaattattcacctaacatacaataataatttagacttaaatatctaaagccccgtttgacatgacttttagaaaaactaaaatctgtttttcaaaaaaattgtgacaaaaaaatgtttggtaagcagttataaaacagattattgaaaaatttatagaaaaattgttagacatttatatgtataatataaaatatatgtatgtgtatataacatgcggaataaataaacatatacactatatgaat

SEQ ID NO: 122121 - DNA, 1153 bp, Cannabis sativa
  modified_base (41)..(42): a, c, t, g, unknown or other
  modified_base (1110)..(1120): a, c, t, g, unknown or other
tataatcctactctaatacccacttaatcacatatttaatnnaatatgtccaattaaaatatcaatatatttttcgggatattacacaacatatcagaaaaataggaggttatcaggccaacaatgtcatcctgagtattaacaacagtcccatcctccgtcttaagatacttgatacaattggtcctcttacgaaaggaggcatgcctgtggaaaaatttagtgtttttgtccccagctttaagccatctaactctatccctttattttcaataaacctcctatttatacaacattgcatctaacataaattacagctgaatgaagcgatttttatcaagggtttcaaattttataatgaacaattttataagttaatttttttattttatatatttatattaaattaaagtggtgggatatacttaattactaaaaataaattgataaacaaaataaaaaaaaaaaacaaagatatctatttaggtcatttcacaaaaggaggttaaatatgtaattatatttttgaaggtgtagttataatttttttttttacaagtaatgaccaatatcattgataaataaataatgtcgtacatgctaaaagactatacattctaaataataaaaaatgagttgtctttagccaaacaagttgtttatccatccaaagagcatacacaactaattcatatacagccacattggtcgatcgatgtatatggatgagggacactatgggaaatctggataacaaacttgttatatcctctaacaatgatctttgatcactgaaaagagaaagtcacctagcaaagactaacacaattgctaagggatcagaatcaataaattcaacgaacattgaaggaaaattatccaacgtgactaatatatcaaacaatacgcttgaattacagccgcttgttctacttcttccaaatgaaccaaacaacaatgaacaactctcggcatgaaggaaatcttagcagcataagtatgagaatcttgtgaggattgacttccttgaagagagaaaaagttttaactgcaaataaataaaagggataatttcacaaatacacaaaaaacaacaaaaaaattacaaannnnnnnnnnnacggaattttaaatatttttatgaattttttga

SEQ ID NO: 122122 - DNA, 1223 bp, Cannabis sativa
cacaatatatacacacaatacatatatataaatatattcaataaaatacaaaatacatatatatatatatattatatattaagttaataaatattttttataagcgtaattcgacgactaattgcgataaaaatccagccaccatgcacacacaacaacataatgttaacaaaaaggaaaaattctaaaaaaatttacaaaaacgaaaacaaaacaatgtacattaataaaatgaatagaaatcatatttataccttaatggacgttgagatttaacgttttctccactaaaatcggtaaccgaaattataccaccaattttttttaataggttcggttacagcgaaataggagaaaaaaaccaatttttttttgtgtgtataaaattaggtattaaaaatagaagattttaaaagaaaaataaaataaaatagtgtagaaatgagagagatagagggttttttaggggtggttggcgagggttttgtcatgagttgggttctgctatggtggctagttagtttcatgctgaagaagaagaagacgaagtgccagacaaagcttcagggttttttttatataactctatgacgtcgattattaggaaataactgacggtaaataatcctaaaaaaattttaacccacagccgactctatagggtatagttaatttctatacctacggtttttactaaaacattgcctctaaatgccaattttaaactaggcgggtattatcacactctttagcttccttttttataaaatgggttgaaaaaacagcatctaaaggcccatattgtagtagtgtcagtgcactgataaatcttgggaattaaatagtttgaaacatataatcacagttagtttttactgtggtgacaatactatcattgtaaataactacatatttgagatttagcagaatttagatgttaaacaattaatcatgaaataaatatgtaaataaagcaatagataatagcaaaaaattatcccaaatttttttttgattgaaaaataagattatattaaaattaagttttatttaaggcataaaacatcaacaagtctcatgtttctattcataatacattattatgtaagaaaatgaatagagttgagacttgtcatgatagaaaatattacactgaaaatatttataaggctaattaagatttttttttctcctgaactttaatatataccaaatcatacccc

SEQ ID NO: 122123 - DNA, 1818 bp, Cannabis sativa
  modified_base (1784)..(1787): a, c, t, g, unknown or other
aaaattaataaaaataaaaatagattgtaattaaaaactcattatatcaaataatatatatacataaatttattagttaaaaataaagaaaattctacaacacacccttgaaaaagatacactgatacattcttatctgtttcagtatttaaaaaaaaattattaatctgaattttttttatagtattatacgttgtcgttatttaagatatcctgtaaaattttgaaaaattcaaaaaaataaaaaattaatatgccaagggttcaaagagtatgtttcacacagtacttttttatttaattacatgtgtgtcaaatagacattttgaacattgatttctatattataaattattctaaatttctgaatagttagaaatattgcaccagtacacatgttttagtgagatgtattataaaagtaccctctaatatatattttcttattagttttattgaaagtattttaattatatatatttttaattatcatataataatagaagatgttattttctaattaaaaatattttgcaaattattgatcaaatctataatattactatgttttacaattttaaaagtgaaaatgatataattaatttaataagataagcacgttacaataataatatatatatgaattataatttgattagagtaatatatttaatgttactgtttcaccatatagatatagtaaaacaaacataattattttcatcgtcttgtcaaatggaataattttaccattgttattttttttcttattttgaatgttaaaaatataagtcaaataaaataaacaaatgatttgataatatcccattttaatataaaatttactcaaactacttcaaattttaaaataattatgatatttcatagttgaataatcataacttatgatgagttttttactcaaattttgaaaattactatttcacataaagttatgacttatggatgttttaattaaattttcaacggtatcaaattcattcaaattggactggcagattgaaagttataacttaaatacaatgaaaattttgtaaaattccgtaataaatgaatcaaaccagtaattattgacttattttttactatttaaaaattagaatttaaataatattattttagacaaagatagatttttcaattattgttttaatagtatttaattcattgaaattgaattcataattaaatggaagcattatcatgaaataatatttattaaattgttaataatgaatattatgtatattttttaataatataaagaatattatattaaatagtgatatattcgctaaataattatagggtatatattattttacatgtattttgtaaaagttactaattaaattttttattttattaaatgacaaaatggacactatatttttcaaaatgataaaaataggactctgaactcaattttcaacaattttatatttaatataaccaactttaagataattcataatacgaacaaatatagaaaatgtaaccagatttatcacaacatctttagatcgaattattattaaatttattttgacaaaaaataaatatagggtcatatttgtacaattttgaaaaatacattgtccattttgtaattttgtaattttaataatttaataaaatagatggtcagatggtctaatggtctaattaataatttttacaaaacaaaaacaagatccaaaattttatatttaggaataattacataagacaccattttttataaaatatttatatttttacgnnnnaagaatgtttttttacatttttaaggttttc

SEQ ID NO: 122124 - DNA, 755 bp, Cannabis sativa
ttaattcaaataaaaaactaaaatattaaataaaactaatactacgtggcttgacacgtaacaatcacctagtatatagatatatatatataaaagatttctatcttttttttttcttaacacacacctttgtttccatttcgtataatttgcatttaattcattatttataaattataaataaattacaaaaaaaattagtttgttttcattacactaagaactaatttaaatgtcactttattttgagatttttacacaaagtgccaaatttggctattttttaaatttttaatagttctcgattttttaaacatttatacaaaattatttttttcctttttgaatttcaaaaagtattttaataacaaaaacattaacttcatgatgcaattgttaagtacactgtaaatctgaatttagtcctaattaattcatgagaataaaataataaattagagattagcaaaagcgtaccaaaattcatagaatcgacctttgaatggtatgatcttccaatttttgcaacaatttttatttctctctgaaaccttagtttcttgataatggggattttagaatgaaagatgcgatataaagcgatgcaaaaatagggaccaatacctgtttattaataactaaaataacagttattaatcctttttgactatttccaatttggcccctcatcaaattaaaaattatccttatggtatccacatattaaaattatgacaatcatgcccttaagtcat

SEQ ID NO: 122125 - DNA, 2417 bp, Cannabis sativa
gactactgactgtcacaaaacacataagacattgggataatgcgagagagagacctagaagtgagttacacgagtgggagagagagtgctaagaaaactatatatatcctttgtcttagcaattgtaccatatattatatatcatatataaagtatttaaccccataaaataaagactaataattgtttatttaaacttaaatttaaataaataatttcctaattgaattaggtatatctttatttgtttaattattttataataaataccttatcctataaaatatttaattaaataattattttatattgaatttatttatttaataaaataattgtttatcgagatttttaaaagttaaatatttgagaactaaaaaaatagtaaaatatagaaataaagagatagagaatttttatgtggttcgattgttaattaaccttagtccacgagttagtctcttcgccttttaggaattttgtgatgtgtttagaatatttttgcaaaaaatcctaactctatactctaattttctctcgtagaagaagaagacgaagagtaatcttagcagagttttaactttgtaggttctgatccctccattgtatggaaataaaagggtatttatagggttagtggcaggtatggacatgcccatgacctgcctaagatttttgctaaaaacctactattgggataaattacatgcaaaatgagagctaaccatgggtcccttgcaagctattgtgctcgttcgtgccgcaattggataatggggaccatttgtactatatagacacgtatcatatataggtttaacctttaaaagtagaggtcatgtgtcacccaaagctttcacctttaaaagtagaggattgtaatattcgtatgttaaacaggtggtggaggtgtgtgcactaggggtgtacatcagtcggtttagtcagtttacgttacattttatttgacccaatgtaaagatcgggttacaaaatcctaagtgcaacccgcctaattaaaaaaaaagtttcaacccatccaatgaatttgtcggtttagtcgggctaacccgtccaaactgagcactaatgtttattttttttcacattcaattgttatattttagttatagtgataatgagataaatacaaagattggatttaaagttcaaatcatctgtcatacaaaaaatatagtagtttgaactttttattttttataaatatgtatataaattatataaattataaattatatataaacaaaacatatatatataaactctcttaatcgggttattttgggttagttcgggttgattgggcgagttgatattattttcaacccgtctaatataaagattgggcgggttatattttcgtcgggtttttcggtttacattttttcgtcgggttatctcagtttggtttgggcaggttgttcgcattaggcggtttacaaaaatttatgtacacccctagtgcgcactaccatgcttggacgtaggggacaagatttgatcatttgtgagaaaagcataactatcacttagtgaccttacttgtataaaaggtatacatccgcaacactcgaaggtggttgacatccgcattaggcccttcgactacccgtctaggtatcagctaggcaggcttccatgctaggacccctctgggtctaggagaggcaacacaccttctgcatccgagaagctaaggtagggccaaatgaactttcgtatattctttagtcttgacttgttcccgtttccatgaagcttctccttgacaagatcatagtgggggattttcattagggagattatggaaataatgccttcctttaaatgccacgtgtcacatgttcagaaatccagattacatttaccccataaccttttgggactctctgagatctgggagcttgtagtactcttcaatttcttggagctatgttcttggaacatcgtaactgttggagtcaaggatacaacttgtgagctttcatcaagtaaaaggttgtaagttaaacgtaacataggtgtgacacacattcgatgcctctaatgcaattgttgacaacacgtgcacgttgagggcacgtttcttggtagtagttataatgatggcagtacaattgaaatgacccgtcctttaatgtgtatggtactcgacgtgtacaatgatgaatcataaatgtcaagggaaaattttaaatgtcctcttttcaacttcgcatccattggatcaaagtgttctttgagaagaagaaatctgaaccgtcaatttcaaattgtgaggattctggtgtaaattgattttcccaactcatttcttctttttcatcaccttatactttcagaacaccctattttaaaacttttgaaacaggacctcttattttccaaaaaaattc

SEQ ID NO: 122126 - DNA, 2037 bp, Cannabis sativa
tttaattaaataagaaaattttcattaatcacgattttcattaaccttgttgattagcaacgagctgcacagtatgtttaaaatcacgttaacacgcctatgctagttagggtgttacatcggcacataggccgatagggttgatatgtacattcactggagaagaccgtcgcctcatggttggtctaacttcaccttgcccttatctgtaccctaaagcacccgtgagtcacgaaaattcaacaaaaaaagtaataaagaaaatcaaccattaggcaatgactttctaagatttacgtaatataatcaaccatatatataaaaatgagaaataaatatcttcattaaatcacattgcctaatcaggaaagtcgatgtattacttcgataaccatatatataggaatgagaaataactatcttcatcatatcacattgtctaatcaagcaagtcgatactttgtttgggtactcacacatcacatcacctaaataggtgagcccgtgccataacctggtactcacatatcgcatcccctaaacaggtgagcccatgccacaacttgacactcacatatcgcatcacctaaacaggtgagaccatatctcatatttccatggcctaatcaagcaatcgacggtcaagtaacctgccatgccatatggcacgatatagttttcttacctcaagtttcaatttaggtatgtcggttggcatgcttggagaacaatcgacgatactgggcattatgtcataacaaaacgatagttaaccaagaaatctaacctcgttgtaggtccaaaagttcactcccaagggtcctctatagggcactagggtatccccacttcaaatttcggtataatacaaaaaaataggctttaaaaacaccaacagaaatggtctgccattttctacaggggtaaaaatcttgagtttcgcactcaccgaaacctatccaaattattccaaacttaacaaaacacatatataccataaatacaataatccttataacaaaaattaaaatgagtccttaaatagaaaacgccattaaagttcagacttaagctttaaaaagtttaaactcgatttctaactcaaaagcacctcaaattcaacaagtaaacatcaaaactagtcccatagcgacccataaatagtttcatgaagacaaaatcctcataactactctaaatcacaaattcaatatataaaaccaatcatttaaaacttaaaaaaaaaatcgatccttttattaagccttttctcttcaatgatttactatcccgctactacaggagcttgtgtttttatcttttcttagccactaagaaatctctactttgagggcactaggtacactcctaagtactttttgttgatgtggtttttcgtcaacggatctaagaagatcgtaaaatgagcaagatgaacacaagcaatagttaatcaaagtaaaccggtttgaaaaagtaaattcaccaaagattaacacaagaattttatagtggttcaccccctttcagcggtaataggccagtctacttggagtgttattgatatcaatgcttgaggagagttctccaaagttatgttctgcaagagttcactcctcgagtgagtttttagaatttgagagtgggagctcaagagtatgatctcgtgagtatcaatttcaggttccctttacaagtgatttcacccccttatatagatattcatataggatttaaaaccccttaaacaaaggtataccttcccgtaattattgttgggttaggttcaagatacaaaataataataataaaataattatttaaaaaataaatatctcttcacttatcattttttgactatattttcagaatagctttaaaagcacgtgtctctcgtattttgcggacgcagatggtcatgggtacatgaggggagccaattgggtcggttctttcccatcaggtccttgagataatttggcagctaaggagctctttgcgccttagtacctgacggagttgggagcttagtgcgcc

SEQ ID NO: 122127 - DNA, 630 bp, Cannabis sativa
  modified_base (502)..(516): a, c, t, g, unknown or other
ctttctctcttcttcttctttcttctcatttactttatattattttataacaaaatcaagttatttttaatattaagatgtaaaataggtgtatcatgtaattattcctatttaatataataattattattttgtaacaaatgtttaaaataaagtctttcaattaataatattaaaaataaataaaaatatctttattaaataaaatcaaatttcataataattttgtaataaatatttaaaataatttttatcttgcattctatatatattgagctattctatttagtgtataattttacagttttagaagtttgaatatatgtcattctcatgttgagtaaaaattaataataaaacaaatttaagcattccatcaattaaaatttatgctaaatttatgctaaatctgttgggttttgtgccctaaataaaactaatttttatataatcagatttactaattaataaagttccaaaatcattctatgttgcatggttnnnnnnnnnnnnnnnatgattatatttaatgtataaattctattaaagtccagaacaaatattcagaacatatatataaatatgtatatatttgtttatgattatagtgtcgtcagcacagtgaaatat

SEQ ID NO: 122128 - DNA, 881 bp, Cannabis sativa
  modified_base (832)..(849): a, c, t, g, unknown or other
atttattaataacaacatctagtatgaattatttgtttgaaaataatgaagatcgtaacaaagacaggtatattatttcaatgttttaattatattattatttgcagaaatatttatttcaatgtttgatatgatatgtttgttacgaaattcttagttaaattagagattgcgtacaatgcatatacattggtttggtttctttatttatattcaattataatcactttcaaatcaaaaaagaaaacacgcaccctatcacttaaagaaaacatagtttattttgaattacataaataaaaaaaattacacaaaatatatatctgaaattatatttttttctctttgtatttttaggaatttgtgatattttataatatatattgttttcatgttctaacaacgtttaaacaaagttttatatatatataaaaaaaaaaatctgtaaaaataaataaaatattagaatttcgtaaaatgtaattttttttttgttatttttaatatttctgaataatactctcaataaaagaaatattaaattataatttcttatgtactataaaaataacctctgttataccaatatggccgaaaggtatgtcctaattaatgatcaaaagaaattttctctccttatatatatatagttagaagtttttattagttggagtatcattttgctcctctagcattttctcttcttttccgcaagtgaactcaagcaaaagaagacatggaaggacaggcgaagcatgtcatgttgctcaatgttaaattattgtttatgcatttaattcaaggctaattagtaattttttcccccgaactnnnnnnnnnnnnnnnnnntgccccctgaacttttttggccggtaaaaatt

SEQ ID NO: 122129 - DNA, 1675 bp, Cannabis sativa
ttactaaagcggtcattacatgagctatattttgtatttacatcacttatttgcatctccattagagatgctcttaaagtatacttaggtgccgacaaccctattcagaatagagtatcttggaagattatttgtgttacaaaattttaaaaaaaaattacataagagtttcgccataataacaagttcaattaatatactatcataaaaattaaaatagtttaattaattaaaattaatctcaaaatttaaaagaacattacaaaaaatgaatcttattggatcctaaactaacagtggatctggattgagcatgtcatcctcggagtcatgggaactgttaccctaggttttttccaaaatacatggccacggctatgtatgacatgtggaccaagaggtcacctcactcgggaatcagttaagaatcgtgtagaaaagaataagtgtgattcggggagtaagcccccggagcaatacaaaaggcatgccctcttcttcgagagttaaagatatagtaaggcatctccgggacgagaatggcctattcgaacagtcacctagcatttaatgcagtatggggaaatgcgtctgggaacacccataagaggacatgtcagacatcgtaagccttatttagggcgattacacgataatcgaaggggctagtgatggctctattatgaataatcacatcaatcaaggaaggatgaaggttaatctcacctaatccctacgacacctacagtataggtaatgcatgccctattttgtatcttttgggaacttgtgattatccatagctagcactcaaagacaagtatcactttttaactattccatcaatctctataaataccgctgagaaaaatggaagggggatcgaaaaaaagagagaaaaacacaccaagaacattctctataaaagaaatactctcatcaataacaaatacttgtagactacgactcattaatggccgaaccacgtaaaaatcatctacattaattatcccaaagctcttatcattatctcatttaattggttgccaaaaacgtcgctcaacatttttgtgctttcattgagagttgtgggaagcgttgtttgaaaaatgacagtcaagaatcgaacctgcaatggtggaaactcaaaacaacacgcgcaacctcgtccccctcaggattctcagaacccagaaggtgaagaggctgtttcacaagtgaatgtgggctctgaggaacgagacgagacaaacgatgaggaatacaaagaaaaccttgaagggtatgatacttacgacgaaggtagctacactgagttgctggtcctaaggaaaaaaatagctgatcacgaggccgaatcggccgcccaaaaagagcagaataagaggatgcaagaaatagtggttcccatgcaaaaggccatggaaatagctggaatacatgtgcatcccaaagtcgtgcttgcgggactagaagaaacacaagaggagtcttcgccaagcattcaaaggcccgaaactagggagccaagccctatacgatatccttcagagggaaaccctaaggaaaatcctactacgatccccgtgagaaataagaaggcccaatccatgaaaggtctacttagatttcctaaaagggaaaggtccgcagaggggcaagctccctcgagaga

SEQ ID NO: 122130 - DNA, 1051 bp, Cannabis sativa
tcttgccctatatatatataaatatacatatatatatatatatattatcatatgttttatcttaaaaaaaaaaagaacaatacccatttaaaggttggaaagacaattaggctaggtttagttggagataatgaaatgttttggttggagatgatgaatggaaatacataggttccattccattattggtttggttacttataaaatatgagaatgtacttttctaatattttgtggagtgattatttgttggattttatggcctaaataaaatttaatttttattataagtttaatgtataagttttattaaatcctaaacatatagttatttacaattacgtaaaacgtaattgtgactttatgctttaaattatttagtctcatgatttatcagtacattaaatttacactgacgtgatagccagcgataaagtttgcttacacttggataaatggaatgtcttttccaggacattagtaaagtaaactaggatcaaatgtaatggctatacattggattggaccgatattgttagtggaaaagatatcataaacatactgttatatcttttctaagtcaatgtcacttaattgatcatagattatttgatctcaattctgagatggttgagctccagtttaattgtattacacgagttttttaacttgtttgttaccagcttacccgtaggaccagcccctacttacatcttgggaacttagtagtacaactaagtgggagtgttaatcatagacatggtcgtctcaaatattttagaggccctgttctaattttaaaaaataggcccttaacaaaaaaaaaatataaattgtaaataatatttttaagtattatcatatatatttgaaaatattcacacaaaaaattaaaaaaactatttttttattagaaataagtgctgaccgaagtcagctaaaaaaactacaaaatattggccttaaaactaatatacttgtttttgggaagttgctgaccgaagtcagctttaaaaaaaaaaaagagagagagagagattagagaaaattg

SEQ ID NO: 122131 - DNA, 1596 bp, Cannabis sativa
tgttgtatttgtgatagtttagttattggtgatagtccaaaccacaaaaactacaaaaaccgcaccacaccacaccattttttgcggtgtggtttccacgattttttagttttgcggtgcgggtgcagtttgggaaattaaaaaaaatgcatgtgtgggttggtttgaaaaaatggtcaaaaatcgcactacccgcactgcgaacacccctagaatggatgtctagcgaagcacaagaagttggggcattatggtcaaaactagtagcagttggagagattgggattccccttattccaaaggccgagttagaggccgagaaaggacttatggaggtggttatgaaaatccaccacaggcttcgccagttgtggaacaaaggttgatggaaatgaaaattagaattcaacaacttatgtaggaggagaagaggttgaggcaacatggatcttttgttgtgccttcacctcaagtatgagttactttagctccagagttgccaaccaaacaatttactgtttgtaaccaaatgggaccattacatgggaaatattgcaggcaaggacctttggtcattttgggaaatctagatgtgatgaacaccccttgagtcgcgagcactacagagtttgttcaagagtcctgagggactttaattgttggtggggttacagctctgcttacttccaatcttggcaagggtggtgatggttccttggatgaacaaaagatgaaggtgttagggtttatgccctgaaaagcctgtaaagactcttctgattattaaaaaaagagttaatcatttgatatatgtgtaaatattaagttattttattgaataatttatattcaatatcggaaaattccttattcatatatgatgttgtggcttgtagatgtacaaagaactaagaccacttagctatgaataaaacaatcagcaacatattaaagttatggaatctttaatcaatggttgctagtatggttcattgatgcccattctttggtgcaagtaatcttggtttagactatagatgtagtttgacatctaagtgaagcaactgtatataatagagattatatatgacaaggactgatgtgaatgaagttttctttatgaacatttcattatcgtaaagacctaattcatatcataacaatgattaataatagatcgtcttaaatcttgagttatcatgaactcatgttcatgttattagtttctttgatttactcgttaaagtttctcagagaagatgattcttaaaacttctattttgggaatctaataatatggatggctgggaacattatgtataattatggaatcctgactttcttaacagatcgaatgttggttccctttagttgttaattctggaactcgaatgttgtgcacaaaatttagatgggatctaaattatacttccactagtgagttaatgaaaactaaaggatagagaagtaattagaagggtgaaatggtattttgaccaaatttaattacgaaccaacatatggaggtctagtcactgaaattgattatatcaatggacactacagttaaactcagtaaatataattttataatta

SEQ ID NO: 122132 - DNA, 1083 bp, Cannabis sativa
  modified_base (1025)..(1058): a, c, t, g, unknown or other
tttttttttttttttttatataggtttatttgtcctgctgtaggttcttaaactatatgagttttaataagttggtcttcaaactttatattttggcaaattggtttttaaattatttaagtttagcaaattggtcttcaaattttattttttggtagattggttcttaaatttttactttttcagcaacattaagtctctatcattagatattaacatttttttatttattttatatactttaatttatttattttttttgttaaatttaaatatatattttttaattttaatactttgataaaaatattatattaatatttctttaagtactcatgtaatatatattggataattataatatttaatttttttttaaaaaatatttaaattatactttattcattcgcatatattattagtagtttcatataatgattagagagaattttagtctcacatttctatattttagcatttataatatattttattgtttatttatgaatatatagtattataattttaataatttttataattatatatatatttattgattatttaaattttgctttaataatggtaaaatttcatgagtttgttgcggagcataagttaaaagtaaattttaagatataatttactttcggtagtttataagaaaataataatattattatttaagccttttcaatatttcttttatgcttttttttgacatatttgaaaaaaataaatataatgtaaaaaaatatattatgtagcttagggactaacttgtaaatatttatatagtttaaaaatttgtggtacaaataagtcaattatatttactaatataaaaataagaagaaaaactttaaaaaaaaatgagcaaataaaattggaaaataaaaaaatacaagagaaaaaagaatgataaaaaagtgcacaaaaaacttaaaaaatatttttaaaaagagaatgatgtaagaaaatgagattttttaagaaaaagaaaaaggggttttttcatttttacnnnnnnnnnnnnnnnnnnnnnnnnnnnnnnnnnnattctacatagaaatccctattgca

SEQ ID NO: 122133 - DNA, 748 bp, Cannabis sativa
  modified_base (41)..(44): a, c, t, g, unknown or other
gcagcctcgaggtcctttgtcagcacggtgaccttcttctnnnnagcaaaaagcttcttgttggcctcgaggtcctttgtcttcatatgaatttactatttagctattgataatgttagaagataggacacaccaatatgtatatcatgtatatttgttctgacttgagttttctttgcaggtaacaaagtgaacaatattgacgtttacaccccatggtctaatttgaagaaaacagtatccatggatgttagccaagttagtttctacaattcgaagatggtgagctatatgttagagggtattccttttatgtatgttttggtttgattgcaaatgtgaagtgatatatttaaaccattgtgagttcttatagctaataataaaaattcttaggcatattaaaggattgatgtgatattgtatttatttggtttcagtttttttttattattttttaaaatatttttgcttcagtttataaccgaagcaaaaaaacgattagcgtcggtgcactgattttttgcttcggttctgaactgaaggaaaaatattttttttgcttcggttcataaccgaagcaaaaaatcaattagcgtcggttcataactgaagcaaaaaaaaaaaaatatttgtgtctatggttataacgtcggttggaccaactgaagcaaatactttatatgtcacttaaaaactgaagcaaaaagccctttttgtagtagtcgagcttgctaaatagagataa

SEQ ID NO: 122134 - DNA, 834 bp, Cannabis sativa
ccacattttttttgcggtgcggtgcggtgcgggcggtttgagcggtttgagcggttttatgtacacccctactgacgacgatccaagtgccgttggcttcaagagcatcaatttcagtgtccatgtctttttgccatatgggatcttttactgccattttgtagttggtgggtttaacaagagaatgggcagcaagaaccgctgctcgaaagtgttgtgttaacctattataagacatatatttattaatagggtgagcagtagaaaaaacaacagtagttattgtaaatgtaatcaggaagatatttaggtttggacaatattcttcctcaattttttttttctcttattgccactcaattttcagttaacatcaaagctgtttgctctgataccatattagagataaaatctctcatctactgctatgtagaatacgataaaataccacaatgtatatttagtaggattataatgaaatttatatataaggcacaaaaaaaaagcccacaatacaattgagccgaaaatattgggctattaaacctaataacatcttatatatatatatatatatatatatttttggtttggattctcatatatttgaagggattagcctctcactatctcccctttcccttcttctttctttctttctttcttgccaaacgaaaggatatcaatccatttatctctctcccttgcttcctcttccatctactaaacattttgttttgagtaatttgcggcaaaatcccttcaactatcaatttacttgcaaaaaactatccaatctcatattttggtgggaaaactctccaaagtactgtt

SEQ ID NO: 122135 - DNA, 2755 bp, Cannabis sativa
  modified_base (2717)..(2730): a, c, t, g, unknown or other
gtgttatatatacatttattatttttcattaattctgtgacatatttattatgtaaaggcttactatttttggttaacaaaaatctacgttaacagtttggtgctttcattgagagcctaagtaataaaattctaaaaaatccctccttacaaacagaagtctatccatggctagtcacaatcaaaacgatagaaatcatcctgaagaaattacacatcgcccggggaaagagccaatgggttctcaaagaccccatatttatggaataacatgttcaagaagaaattatggtggagataatcaaaacctagaaggaaagaacaaaaaaaccaatacttctgtaggatatgtacctagaagtgaggatgcttatgatccaactaggtatgtattattaatggaattggaaaatcgacaactccgacaacacttagctgaatctaaccgacaaaatactgagttggaaagagaggctacattggctagggcaacttaaggaactaatacatagaatcaacctgatcctggggtaagaagaccacaaggcagacctcgggattcaagaacaaggaaacaggaagcaaatcaaggaaatccccaaaacacccaggaggagcaacctaggggtactagggatgttgcattggatgaacaacaaaataaccaagaccaacatcgagaagttcctcaaagatcccaatgatttatgaatcaaggaaatgaacataatgatgcaccagaggcttctcacagtaatgaggacacaagttagccacatactaaggaacaggaaatccctcgtaataataagagaaatcctgggactcaacctaggacaagtgggctaccaccgagacactctgaacgtccttctcgatctgagagggaaggtgtatacacatacctaaatagaggacgtgtatctaacctcttccgaaggagaaagccagtacatgacgaggcaagttctagcttgggacacttgaggtctcgagggcacattcgatcaggaaggcaaatgcgagaaggaagcagacctcgacgttatgctgatcaagaaagcatgagcaatacgagaagctatcaatataagagttactcagatacgagatttgtgagtaattatgagcgaagacaacctgatcttcgcaagtgactaaatcagaatgcacctgacttacgctatcaacttaatgctaaccaacaacaaatggaccccatctagttatgaatgaggaaaccgagccattttatcctgatattatgaattttgaattccctcagggattcaaaaatccacacatctcgcagtatgatggaactacgggcccaatcgctcacctgaatgacttcaataccataatgtgagccagcaatattttaaataatatacgatgcattttattcccaacatcatttcttggggcagtgagtagctagttcgataaattcactcaccattcgataacctcttgggaacagctgtccaaagactttaagaaacaatttcaagtcgcgagagataggtgacctgaagcatcatccctaactaacataaagtagcaaccaagcaagtcacttaaggcttacctgagtcgcttctgcactgcagctacaaaagttagaaatttgaatgacattattcaacttactgctcttcaagcagggatcacaatcaacctttcaacagctagaggtgagttgtgggatgacttaccggatcgcccagtaagaaacattaatgaattcaacgaaagagcgcaagtgtttgttcgtaaagaaggagcaaggaatgagatgaaattgttgaagactggctcgggaaataaacccagcacaagtactgccacaacaattaccatctcgacaaaggctgataatccaagtggttcaaacaccaaaagaaaagatgacttgagagaatcatctaaaaataaaaagaaatagaaaaagcatgacaaatatgttccaatttacaccgagtacaccgagttgaatgaaactcctgaaaacatctttctcgcaaatgagcacagggttgcatttcacaagcctgagccaatgagacataaacgagatttaacaaaattttgtcaatttcataaagacatagggcatacaaccgaagagtgtcggcaactgaaggatgagatagagagcgtgatctctcgtggatatttcagacagtatgtgaagcgtcaaaggaacgagcaaaaccatcctaattagcctaacaacccagataaccaaagatcctcccccttttgagggcaaggatacattggttatctcgctggagagagtaataatgcccaaaaaagatatgttagtgaaataaaaaacgagcaatcgatgtttgctccagaaccactaaaaaagccaaaacagaaaaaactgcaatcatattcttggagaaagatacaaaacacgtgaggtatccacatgtcgatcctctcatcattacagtttagctcgctaacaagagaataaaaagagtgtcggtggataatggaagctcgataaataaactttacaaggatatgttgaagaaaatgggattacaagatgcaaagttaaaaccttgcatggtgaacttataaggattcactggtgatagtgtcgccagtcaaggcatcattggactcccattgactgtaggagagccaccattatctacaacactgatgcaagagtttgttggaaatattttaccagnnnnnnnnnnnnnnaccaagtatgttttattaacatcct

SEQ ID NO: 122136 - DNA, 2248 bp, Cannabis sativa
atgttaaagttcagggggcaaaaatcttaattagcctatataaatatatataaattaaacattaataatatatatatatatatatatatatttatgtagcaagtgatatcaaaagaagaaagtttcactcgattgatttgcacatgtaaattactgggtactattagctacaatgatcctatatagttcaatacaaatataggatctcaaagaataataaagccaataagaactaaaagacatattcatttatgtaagggtctactcgtagttaaaaccaaaactgaaccacgtcaatgtgaacaatatcaaataccattcaatcacactgaagcttaatacccagaaacgaattaaatcaatatatattgaatacaatcgattaaaacaggtttatataatatatttttgtcaacacagatttttgttaaccaaatttgagcctcacaatattgatttcacacagaaaatataaaagctatgaaaataaaaaatatgaacacaaggttgttatgtggttttgcagttaaaattatgcatagtccacgagtcaatcttattcagatttctcagtatttttcaaggcctctttcatatgagttttttcgtccattttttgatcttctttgtcactatttatagttacacagtggacattgaattacaaagttgaccgaaatatttttacagcaatcatccttaaaattgtgggatttgattacatatcacgtagtgtaaatgcagtttataatttgaaaattgtataactttgattttcccgcttttactgggtaaaaactatcgtgtattaaacaagtctttaactgttgaatattgtgatgtctcgacagaaactttattatagtgatcccaacagcgagctggggccattcttccttccgaggttgacaatgtatgtcttgtgtcgatcacagttatttacaaagaagtcttctgactcgccaggattgtaagccttgctcctgttagctggatgaagctataggttgtcttctcatagcgagatggtcacctcgcttatttgttctttgaaccgatccatgtttttcacttagtttgttcattgcatgctaaggacttttacggttgatatgtgtcggtttctccggtgccttgctattcggatttagcgatatatggtttctcgctaatatgctaagtgccaacttgtacatttattcctcgcttaaggccttacaatcaacgggttacaaatatactatgattcttatgtaattaatgagttattccataagaggaattgcattgatttatattcccttcatcctgacacgtgtccttcattggggtggccgccaaattttgggtataataattgccccttaaaaaattcttttttagtaaaaagagctttttaataattacagagggtattttcaccaaaatattttcttggaaaaaaattcatcctttgattctcgcggttttacggttttgaggacattatgaattgtctcttcatattctacccatcttccaactgtcagatttcccaatctttagctttcttgtcactgaactttgtgtataaaagggcagctcaagcttgtcatttttcacaaacctctggctttttgatgagatccattttcagaatggatcatctctttcctgctagaatgtcccttctgagttcagaagttcatctttccaaactcatcttacccagacgcaccaaccaatttccatttgttcctaaagactttaagcctcaactggagccataaacaatggattccaaggctggggagcttctgaccaatctaaaccaggggaaccccgtatcctgccatggccgatcctcacaagtgatccctgagggtacaaatcttgtgagtgatcttaaaggtcctcctcatgcggatgaagaattccagaggaaggttggcatggtttcaggtggatcttggaaggaagttggcgtggtttctatcagagaatcaagccaacccaaggccccaacctgcgccagaagacttttgcgcaaacctctttttggtatcgaggaatttcctgaggttgggaaaaagatcttggcttcagcaaatgggatcttctgatgatgaggggaatgaggtctgtgtagagatcaaggctctctacatgtagtcagtctttcttacgctatgtgtagtcggtctttctccgagctacgtgtagacggtctttttcaagctatgtgcagacggtctttctcgagttcatc

SEQ ID NO: 122137 - DNA, 2513 bp, Cannabis sativa
  modified_base (2094)..(2095): a, c, t, g, unknown or other
  modified_base (2144)..(2147): a, c, t, g, unknown or other
ggatttacgtctaattcaaacttttatttctcacaagaattacaaaaaaaggctatgttgttaagctctagtttctagagagagaaagtagagagagagatgatctgaccttatgggtagttttctgaatgtgaaaaatgagcttatggagctctccttttataggtgaaggaggtctacaaaaatagaaaaaaataatacaaataagaatttttttaccgttgatgattatctaacgctgaaaattagttcttggtggtgatgggccatcttttagagcccgacagatcacactgcgggtaacccaaagcttatttttgtaactcccttggggatgaattttgatgacaataactttataattacgtctgaagtgtgagacatgatatgatcgagcattgaattagcttttaaatgcaagttgaatcgcaccaatcgaatcaaaattgagtgagttatggttgtattactgaaggcagttcatgactcagcgaccaggtttacatatgacgtcaacctagacgttgggtaagtgtaaaaaattccaatggatgtactttaagattcttaagtaatactttgacatcacttatcttgattatgtgttctggcaaagctggtcaccagttctcgaagatgttgctcttctgcggaaatgagagatcgaaactctccatttttgagtgagccagaaaagaaacatgcaaagttgtgaattagagttctctgacttcatggatctttgttattgtgaaaaactagatgggcgatcgaaagggcatcagattcagataagcagaacccagcacaccaggccaattgtcaacctaggcgttgggtacttacttttgacctctcaatatttcatttttcatacttccaacgcttctaaacttgaggaagagatctcctaccctgtttttgaccattctggattcaatgtttgcataagatgtgtcatttgatcaattgaaggtagcatcccatgttgaatgttaacctgtgcattgtgtccctctcttggcccttcaaaaattccgtttggtccccaaaaatagttaaatatcaatattttttagaaacaaaaaaagatgctcgaaagtgttcttgaaaaaatccaattaaaattgcccaggttgacaaaaatgtcaatctggtaacaaatcagccctaggtgtcaacttgcgcattgggccctatttttggcacccaaaaattgttgtttcttcttcaaaagaacctatttctctatttcctatgaagatgaagaagatgaaaaatttggatctctaatttgatacttggaaggttcctagattgacagattgtcaacctggtcgtagggtgctcggggcctgggtgctcaaaatcaacttgctctgaatctgattatgatgcctcaaatatgtctgtggtatgtctagtagatgtctcaatgtaggttttgacccttttacactaagacggtcctgaaaactaaaatattagttaaggaatgtcaacttaagtgccaggtgaaaccttaagtgcctaggttgggttctgggttgcaggttcttgtaatttcagctcccgggacttggattaggttgctccatatcttcacggtacaaaatactaaaacatagtgagttggattcaagttaattaagtttgaacttccattttggagttcccaaagtcaacctaggcgcagggctagggacccctcccaggttgacttactatgactcgggactactcaacttcgagatgttatctttcttatcatgtgtcaaacattgatgtccacatcatcaagactactcttggtgtaaacttttgcccgcaagttgttgtggtatttttacacatgcaagtgtacgtatcgtaacaagtagtaaactcaccaagagtgaggtcgatcccacgaggaatgtagctaagtaattttaaataaaatctttacttctatttggctatataaaatttaagaggagattgaaactagaaaacaataaaaatagtgaaagaaaaagcaattaaactaataaaggaaattaacagtgaataagagttaggactttcgatttcaattgtatctattgattatgnnctaatatgattatcttcctattactaatttctatgcaatagcaggtttnnnnaggtaatttatagtcttctcaaatatataaatttcaattacatgcaatttttctactctcgtgatagattaaacatgcaatagacattaaatacaaaaaccctataagctatctaaaccatataggtactctcgtcctatttcgaaattcaattttatctcactatagcatatctgacacttacttcttatatctcacatcaaaatcatagacagttaattggtgatcagtcaattaaaagtaattaagtacgaatgaaatagtatacatagaaactgagaaaaaaataaatcatattaaaaccataaaacaatgtcaacaatatccatctaaaccctaattaagtgtttagctaatcatgttcat

SEQ ID NO: 122138 - DNA, 899 bp, Cannabis sativa
actttttccacaaagtcaataatagtggcctcattaactaccattggggccacaactttcccaagaagacaaaaagtggataatgcctgctgagaagaggcacaatgactaatcttgactgaagcttcctcatgagaataacactttccattagtggaggagttggtggcattaactaaagccattgaaagcaaacaaataaatgacaagctatcaaacaaacaaaccaacctcaccgaatccctcaacccttcaaccagcccctaccccacaaaccaggagaaccccacaaccgagacaacaaaaggaactaaaggaacaaagaaacgagaaaaccaaagagcaagggcagagaaacctaagaccaaagcagaaaatagacccaaaccacactctaccaagaagggaaaacaacaacacagccaaactaccccaaaagaaacttacacaaccactaacattgagaagaaagaggaagaaaagaaagaaaagatatggaagtcacttagctaggagagagtggtagatgaccattctccaaaaagaatattcgatatcccaatggtttcttgctgcactacatgatcctttgaaaatttccctaaaatatagtcagtgttaacaaatgtgagaaatatatatagtgtatgagggtttgtttacagaagtgtatgagattattacaatattttgtattattttcgtattattactttacattatgataaaatacttttatgtattatgaaatataagactatttttcaaaaaagctagtttaactgatttttttattttttattgttttttttgttgaaaatgaagcttaagtgatgttaataactaatatactatatttattttaatatatttttattattatatcaaaaataaaaaaa

SEQ ID NO: 122139 - DNA, 592 bp, Cannabis sativa
  modified_base (41)..(74): a, c, t, g, unknown or other
tttatatgtgtttaaattatattgttttagaaattcatatnnnnnnnnnnnnnnnnnnnnnnnnnnnnnnnnnnagatcctggtaaaataatcccaacagtcttgcctgcagggaatgaggtctttgctgcgaggagtgaggtctctactgcaaggattgtcgaggtgcatcctaccgggtcagcacaccaggtcgagttctctggttcttatccggagatggttctcctcgaacctatatgtcccctataataacgtagactgagtcttgtattctttgtttagaaaaacggcgtaatggtttgccccttgtggcattttcgtaaagacaagtttgtaaagttagctggccaacttagctcttatgtatcttaaatgctccgtacttttgcattcgaacttaatatatttatgtttgcttgcgtttttattcacaatgtacacaattatattttgatcaaattcagagtacgcttggtctttccattgctcgttgttgacttcgcttttagccaacgacaataagtctttttgataggcgataaacgatatgtcgtaataagaatatgtagtaaagcaataagaagacaca

SEQ ID NO: 122140 - DNA, 690 bp, Cannabis sativa
aaaataagttgatgatgatgataaggataagaataactcccgtataatataatagtgaggcacatcgtatataaacaatgaccatgcatgtgtattttatatactatacataaaagacacttacaaaatgtgaccaaaaggaaataatacttatgtgatgaaaagtagatacacagctataggtatacttaataatctgaccaattattgatgtaggacaaaaaagattgatgacatgttacaatattcttgttacaaatacttttgtgttgaggacaaataagacaatacattcttatattattattaatattattattaattttatttttaataactttccattgctttcaaatactaaatacaagagtttcaaaaataagatgttatccgtatttcttgataggtgacacgtacgtgtacttttatgaagtgaaaattacttccatgaaatatgaaattttataaaaaagttataaaaatatgttatttataggtttgccactcttctatgatatttttttacatttaagagtttttatggtatttaatatgccatatttttataaacctattatccaaatccgtatttcatattattgtttctagcttaattaattttatttttttttagtttattttacacttacattttaagttttctttctatttggaaaatttacaccaaat

SEQ ID NO: 122141 - DNA, 3491 bp, Cannabis sativa
aacattctcccacttgggatacattaattttaatacatatatattatatatcaaaataattttgtttaaaagcgactcatgggttgaacaataggaaaatatttgtggtaattttgaaaaataatagttctttgatagcatctcaacataccgatctaatttaatctttgatattgaccttttacatcaacaaaacattcataataacaaacatcaaagtattacatcaacatggtcaataagtctagtagtgtggtaagaaattatcttcagcatgtgatctataaaataacatgatttcattatcagtcatcaattttatttgatactgtgatgcttaataaatatgccagtgaaattagtcatacactacttaataaataagtcaatgttactaagcatgcttaaaaaatgaagccaacaaaatatcattggcattaagcaattaaattgaaagacaataatcacaacaagatatgaactacatgttttcaattcaattattctcgagaatataataaaatataatttaaatcataaatatcctataataaggaattattggcccacaaaacaaaccaagtagttcataatatcaataagaaaattacatataaatgtaatctcaaataataaaacaacaaactcccactaactcaaaggaacaaaaaattataaaatattcatattgataacatattattaaacaacacgacacttaattatttagttagaggatctgctaacattgacttggtcttgtaatattatatcacaatatcttatttattggctaagtctctaacagtgagatactttatttccatatatttgaaagcactactaatcttgttattctttgaaaagaaaacaacagtattattctcataataaattagtaatagagagggaatataatcagccacgcgtatctttgaaatcaaattctttaactacaaagcttgcaaagatgtcacataacatgctacaaactcaacatacatagtagaagtccatttaacacttttccaagaaatagttgcaccagccaaagtgaaaaaatagctaaaaaatgacttttaatcatgtacacaactaccaaaatctaaatcttaataatcaacaactcagagattgtcgacatgcttataaataagcataaaattctttgttatttgcaaatatctcatgactttcttggctgcaacccaatgatcatggcgaagataagataaatatctcccaagaacattgaatacgaaagcaatgtcaagtcaagtgcaaacatgggcatacatcaaactccatgctacacttgcatatgggatgttcttcattgcttctctttccaagtcgttcttgcgatattattgctcagtaaacttgtctcattttgaaaaagcaaaactaaactcctcttaaaaatagaaacttagaaggtacttctcaagacaatcttaaccctaaactataattcaagaataaaggtgctaacatagataacgtcaactctaacataagtgcccactttaagctttgactctattttatttggcttttcgagatctcttagctcctagttgtgcttgctttttttctaatttttcctatcctttattaggcttgagttaagaaatattgtgagaaatttcaatcttttccattttagcttgctttcctcaactacacgtcgagaaattaggtcactaaaaatccataatttattataaatattgtagactatcttgataagactgaaagaggcaaaaaatgcatgaaaaacacgatgaataatgtaacaatcaagaagaggaatattataatcttccaatttggactgaatattcctaattttctgaataaaatctcgtactccttttgattcatcatacttaatgattatcattttattcataagatgtcaaacttcagcgtttttcactagtatcatatagtttttctacagaaccaaaaaactctttgacattgtagtgtttgccaaaccagttaatagatgttttgaaatagatctcttcatagcaatgagactaagatgatttgaattttctcattatgcattaagagttctctaggaatcagaactggtatcagtaagatcaatatatctttcttcttggaggcataagtccaaattcattatgcttaaagtaaattccatatcccatttctatttctaatagttagagcatttagaatttagatggaaacgtttattgttgctcaccaaaaggagaccgtaaactaaaaaattaaaacttgatcaagttatatgagcaatgcaattagaaaatattgtagaatcaaccggtcattataaactcctcttacacatgatctaccttcacgaagttaacaataaaaaaaaaacatatcaattaagaatttattacatttgggcaaataaatctcttaaagaatacatattaattcaagccaaaagaacaataataaataaatatgtatatttaaattattatcggcaaataattaaaatatatacatttaatattaatcatgggatgtaaactaatatatatataactactatatttgggtaagtaattacacatatagtcaactaaaataaataatattttctacaacatatcaaatttggtgataaaataattatttaaattaataacttttcaactaaatttttgaaaagagatatattgcttataatatatcaataattaaaaaataaagtgtccaccataacacattacttttacatcaaacaatcaagttttataattttagaacaataaataataaaaagatgtaaaagaaagaatattgttggagattacatagtcaagataaatcaaaataaaagagtgactatgtcaaacagaacaagaagaagtccaatttttttttatgatttacagatttcgaaaaatcatcaaaaattacttttaataatttttcaattgcataattatattaaattaataataattaccaaacggagtcaaaaaaattaactaaaaattatagaaaaatctaaaattgaattctaagcacactggaaaaaagtatcaaaaaaatgatgtcggacggcaatgcacgcgccccacgaactgctatcgagagtgggcatcgctggaaaaggttgtcttcaaccttgaatcaggtctgaagtgggtcacgcaactcagtttctgcagagcgggtctacacataattttggctaaaaactgacgagaaatcaacggaaaacaaagggattaagatcgggatggatttctaatcgatctatagtattaattttgggtataaacgcatacacttggctagatctgaattagtgcaaccgaaaaaaatgaaaaacaaaaaggtttgaatcaataagtttgaacatattaggttcgaaattatatgtaattaaaatatggataaataacggcataagtacccaaagttttaagtttgtaagtaggataaacccaatgtttatttttagc

SEQ ID NO: 122142 - DNA, 2686 bp, Cannabis sativa
acattcacatataccatataaatctccataatttataaattacgcttatttatccacttatagcaaatttaaaatttatgttgaactaaattagtaggataatctcacttattatttaattaacccataatataattatatacactaattatttactattaggcttatcaggatattacaaatggtctataccatttaaatagctacgatcgagaatataatagatacttagtattattttggtattttataaatcattaaatttaactatttggtattttgcttgcattgctgatgacttaagaaagtttctaggctagattttgactggtttggaagatcgtaatactttcagtccattaatatggtattgtttggagatgtaaatgttgttgtagttgtaatatacacatctgatttttttaaaaaaaaaatatatataagcaacacaaaatgtattacaaacaatgactagctcttcacactttcaaagaatcttaaaagacgtggcacatgttcttatggtgccaagcatcacaaaaggtgtcgtattgttattggtacaaatttcagatcccatacatttttatttaataatatagaaaattgttaaccaattaacgcacaacatcaatatcaatatggtgctaggtaccatatataagatgtctgaaagcattgctctaattttttgagtgaagagtctaatttaaattttccaagtatgtagtttatttttcctactttatccttagacaatattcctactttatccaaggaggcaataaaagaggttgatgagaaacatacaattatttagtaatgaagatagaggcatattttatatgtaccaaaactaacaagaaataacaatcatcacaccatatcaattatattattaaaacatgcatgaatacatacatacatacatacatgcatgcatattatacaactatttattcactcacgtacgtaattatttaaatgcatgcataagaatacgaccatgcatgactctcgtacttattctcatcgatcatactcaaacatatataattaaatgggaaagaaaaactaacacttgattcaagtgcatgtgtttggttttcaaataagttgggaccatttggccggctggaacgccgcatagatgatctggagctcattgattacaccggaatagaagaccgtaaatcccagaatgaaactaccatcgggaacgttaaacgtttgttctgttccaatatcgacaccagcgataatggatctattttcatcgacaaatatgcctaggcgattaattttattattgtcggctgatctggtataaattaatttcttgataaaatcaccttcttcgagcaccagctttttactcgaacatccttcgtcaatgccatacttctccgtgcgccttccagtggtggattcgaaatcaacggtgatgcagtggatctcataattcatggtttgcatctgaatcccggtaatcctcgttttatacttgatgtactcatccaccgttgtgaacaagttaaatgggactgaattgtcctcatcacgtctcccatactcctctgagtaataaattttgtatgtgatgtgcggcataccgttggaaagggacggcggctccggtatggtgataggcgtggttggatctttttgaaaatctaaaaaatttgttttcagtgacaccaagtccttttttgcttggaggaggacattgcatagttgagagtcttcgtagccaccgtaaaaatcatagatggattgtatttcgttgattcgttcgatgagtttcgataccttgtccaattttcctgccaggcccactaacatatctcgatttactgcgatgcacaaaaaatcgctcccaaccacgtgttcatatcccatggtttcaaatgcaagaactttgggcgcattgagtttttggctgggaaacgtgcgggcaaactcaaccatgtcttctcttttgggcaagggtacatcgtccaaccccaacatcatctggttgaatgaaacctgtgactcaacactgtcaagggttttttccagtttaccttcaaaatcggcatcgagcgagccaaacttgaatactccattggccttgagctccaactccaacttcatactttcatttttggtttctgagtgaaatgagtagactccaatatattctcccccacgtgtgatcgacgaaacatatgagtcgccataatacagaaagaagtctttcagattattggtgatcggaacagaaatatgatcagatgccaatctagagatggtctgaacttccttcccttccacttttcgagcgtgcacaacaattaacaagtccttgtccttgatattcagactctttacgaaattaaacttctcgtgacctgaaaccaaactaaggatatcgatattcgcagactgattgaggtctatcaaattcatcagtgacttctcaccatcgcaaatggtgtaagtaacatggcattggactccgtcagtactgctttctcccacaactgcagtcgagtgaccgctcccggtggcgcttgaatacccttgaaaaagtttcactggccccgtcggcataattaatatttataatcgcacttttcttttcttttattttgtaagattattgctttgtttttttttttttttttttgttgaaaaaattaaa

SEQ ID NO: 122143 - DNA, 2930 bp, Cannabis sativa
aggagtgaaggtttcctcatagtcaatgccttctcactgtgtgtactgtgacctttggctataatcatagccttaaagatctgtacctccctttagcatttctcttcttcttgaaaatccacttacaccatatgagtgtaatgtcctccggtggagtttcatactcccagactttgttggtgcacatggaatctatctcttgatccatgacattgttccacttgtctgagtcagggtctttcattgcttccttgtaagttaatggattgtccttgtccgtgtcaaagacaagaacatgtgcttcatgctcatagttgagagattatctcacaattctcccactatgacgatgtaccggggtttcctttctaggaactgtggtaactgctatcggtcattcaactaatgatgctaaaattattggttatgtattctattcatttctgatttcctcgataaccacttgactgcgtggtttgtgacttttcatatagtcatgtttaagaaaagtagcatttatcgatacaaatactttgttgtcttaatgactataaaaataggcacctcaagtttcatctgaatatcctataaacatacacacttcacttctattagcaagtttcccaatcttcggtttaagaacatgatcaggacagcccaaatatagaaatgtttcaaattggattttgtcccatttcacaattccattagattgtcgctcatactctttgagggtactacattcaaaatgtaagtagccgctagaaatgtgtatccccaaaagtttagtggcagtgatgagtagcacatcatcgatctaaccatgtctaacgaggttcggtttcttctctctacaacccgttctactaaggtgttccaggtgttgtaagttgggacaagatcccttcttccaacaaatagtctttgaagtcagaatccaaatactcgccaccacaatctgatgaagtatctttaatgatttacctaatcgtttttctgctatagctttgaagtctttgaacttttcaaaagttttagactttttgaccattaggtaagtatgaccgtatcttgaataatcatcaataaaagtgacaaagtatttataaccacctcaagtttgaatattaatatgttcgcacacatcaatgtgaataagctcaaggttttctttggctctattgccttttgcaaaaaaaaaaaaagtcttttagccatcttgccttctagacaagattcacatatcgaaagagtttcaacatttagttctctcaaaggaccatcctttgtcaactagtttatgtcatagttacgtttcatcatcaattgaaaccttttgcctcttattttgttgaggcaatgctactctaaataattcattatttaaaaataattgctcacttggcttgagcacataaagtttgttactctgttttgcaaagcaaataggcataccattcttagaaataataatctcattattaataaaactaatgttgaaaaattattcatgcaaaattgataaaaaaaaataatgtcccttgtacattcgggaataaaataaacattgttcaataacaaatatttattattaaattttgaatggactctgccaacacccttggtagacacttgttctccattcccaacatccattgtcacctcctcatcggccaactcccttgacaatttaagtatctacaaaaaagaacaaatgtgattagtggctccaaaatcaacaatccataaggatttatcatcctccactttgttagtttcaagaacaaatgaattgcatttacctttattaagctcggagagatacttgttacagtttctcttctagtgtcatatcatgcaacaatggaaacacttgccctttgcctttttttccttgaacttagggttggcgtttcattgaagtcatcctcgtcccagttacaatcttcagatccgactgacactcctccgtcgaagatcttctgtctccttatctaactccttctccttttggttagcttctcctgcaggtccgtggtggttggctttgttttcttttcgtttcgaagtgaatctaccgagagcatctgcttctcggttgtggtcttttggcagagcttttctctcaagtctccttggaccactttggacttggtctttttggggtcgcgatgagggctccaaacttttttgggttgaagctcttcgcggggaggattcaagggtgttatttgtcgagtactttgatactcccccatcttccagcccacttgctcctctttttcctacttttggtcctcttcacccaattagaggtgctttagaacgacctctcaagagctcctctaacgccctttgcatgtttgtgattgtttcttctatacgcaagttgcttgtcctcagctcattcatcttctcattatacagtcgagtccgagagctagaactcatcgagcagactcacttttccttttttggccagtggtgtgaggttccgggatcccccagcctcggtggctgtggtggccttataggagatggggccccaagcctttgcactccgcctccttcctctggcatgatggaggcaatcgctccatctcgctagttgttttgttgggtggtcctcgagctaattttttccttatcctattgagggctcatggtcattcatgcctcctctgttctgatgcacctagccaattgctcttcctcctccagctaataaaggtgacgggtcaggccttgagacgatcagttgaagcccatcaagtcaaacctccacttcctagcgacagtgagagcgtcttggctttttttttaatgattctaggtaaagaaacaacgctgcttttgcatgtcatttcccacaaatggcgccaaattgttgatggtaagaactcatcaataacataaaaaggacttgaaat

SEQ ID NO: 122144 - DNA, 1260 bp, Cannabis sativa
  modified_base (1205)..(1224): a, c, t, g, unknown or other
aaatggaattttatttagggcataaaacccaacaattcctactctatccttgcgtgtagggaacttaaggcgcaagtgtcgaatggaggtaattgttccaaagtcgactagggttggcctgccaaggatgacgttgtaggcggtagggtagtccaccaccacgaagatgcaatatttaaaggtgctttgtggggtgtcagaacacaaggtgagtaggagtctcacctttcccatcgggatgagagttgtcccgttgaaccctatgagctgtggaccgttgggagctcgatggtcgtgaaagcatctttaaacggaaaaattcacggagcttccattatccaccaatatcctggccacaaccttattggggatgggagtctctatgaacagggggtcatggtgagggaaacacattggctttgcgtcttcctccgtgaaagtgatgggctgatccatgagcctaggcctctgagctgggagttgagtgacctcccatacctcttcatcatgctttagggctccaacgtagtgcttaaactcgttcctggtggttcctctaacatgaggcccttcggagatcatagcaactctcccattcgaccggggtggcagttcaggcgtctactgagggggcactcctttaggaggcacctgaccctcgagcgtacccccagttcctccttgaggtaagggacctctgacttgggctaaatttaagttgggtagcctattgttgatccactcatacaagtggcctaatcggattaggttttcaatttcatccttcagatttttacactcgtttgtgatgtggctgatgttgttgtgatagtcgcatcttttgttggggttcctctgggagctatccctatacaagggtggaggcttctgataatgcgtatttttttaggtggcaaagtacacacgttcttgagaatctgtgagctcagtgtactacgtgtattggggagtataccccctttgttgccttttatcctcagtttacgtgctacctttagaagatctcttacttcgggagctttgctgagctcctaccatactgatggctggtgcggagtgggacggaagctggacgctcaccccagagggatcgcttacgggcaccccaaagtgcgacagtgctggagttaaggtgaggttttggttttatctgttgggttatgtgccctaaataaaacccattnnnnnnnnnnnnnnnnnnnnaattaataaaagatcaaaaatcattttatgttgcat

SEQ ID NO: 122145 - DNA, 1393 bp, Cannabis sativa
  modified_base (27)..(44): a, c, t, g, unknown or other
aacaaaacagagggtccaattggtaannnnnnnnnnnnnnnnnntccaaaatagtatttacccaatatatatattcttggtcaaacagtatttatgcgataattactattattaaatcaattttaaattgtgagaactctaaattatagagttatgttcaaaataaagagaaggaaaaaggaagcataggaaggagaatgacgaaaaagatgaatgaatggaaaatgaagctcaaccatctcggttagctgagccactatatttatattaatcaagtacagttacagctcaacaattgagtatagcagaccttaacaaacccaactaaccattaactaacttgtaattcactttcctattcagttaatctaatatatccctcctcaagtaacattggtttaaaccaagtgttaacttatcgtaaaggaactaaaaagttgtagttgggagtggctttgtgaaaaggtttgcaagttgatattgtgaggcaacataacgaacatcaaattgttgagcaatgactctgtcttgaacaaaaatgtcaacttctatgtgcttcgtgcgagcatggaagactggattgggggcttaagaccctgcccctaaattgtcacaccacaggattggacactgggagagtgttatacctaattcagtgagaatagactggatccaaatgagttcagaggtggccaaagccaatgcttaatattctgattcagtactagatcaagcaacaacagtttgctttttggagcaccaactgattaaatttcctcccaaaaagatgcaatatccacaagttgatctcatatcatcatgacatctagcccagcctgtatcagtaaaaccttggagatcaaataagttggctggtttgaagaggagaccagcatccaaagtaccagcaaaattccttaacactctcttacgggcagaccaatgctaagaagtgagagattgcatgaattggctcaacctatttatagcaaaggctatatcaggccttgtcactgttaggtactgtagagcacctataacacttctgtacatggttggattctgtataggagtgtatgatttagcagtgagtttggttgtggagaacattgggattggttgtagttttgaatcaaggagctgagttctggataaaatatctctgatgctattcatttaacctcaaagccaaggaaatattgaacgagtccaaaaactttaagagcaaaggctttgtgaagatcatcaattaaatgttgaatgtgagatgaatcagctcttgtgattagtatatcgtcaacatagattagaattagtgtcaactttccattgatgttgttaaagtacaggcttgtatcaactttttgttggaatcattttaccaggatcttag

SEQ ID NO: 122146 - DNA, 520 bp, Cannabis sativa
aatataaatataaaagggtatataagtgatcttcttcttcttgttctcgttcttcttcttcttcttcttcttcttgttctcgttcttcttcttgttcttgttcttgttcttcttcttcttccacgagaccacaacttcaaatggatactagtactgtaatggaaggtgatcacccacatgatcctccacccccaccacctcctgataataagaagaggtacgtataattaataataaaaatactgtaatttcttgaagattaatgttattgttaatttgttattctttttgtgttatttgtaaaataatgttattataattaattttgttttatttatttgttcttgaaccagctttgacattatttcttgttacaaatggattttctaagtaaagagtaatccttgtgtactaaaatttgactgaaaaaattgacccaaacaagaacagtttatgggaataagaacatctctacctgttttgagtaactcaaataaagatgtgagattgtttaagtgaa

SEQ ID NO: 122147 - DNA, 2180 bp, Cannabis sativa
  modified_base (58)..(78): a, c, t, g, unknown or other
tgaaccatgaaacataaaatgttatttctgatctctattaataagtaaatctgattannnnnnnnnnnnnnnnnnnnngggcacaaaacccaacagtttcctctggggctatgatccaagactcttaaaggcttccaaagggtaggcctccaggtcttctaacctcaactaaggattgacttttatcaaacaactctctttttttctattttaattgctttacttttagttttgcaaaaatagttttaacaatgccctaactgtagggtcgtcagtaatatcttttaagacaaccgtttttcttatgcatgcttactttatttccttgcttattatttgcttatgttttttgctcttgtttgattgcttgtgccactcagtagattgcttttaggattttgtgaagctttttggctccaacgaccaaacttgataccttttggtctttctgactttgtattattttatcaaactttttgaagtatgcaaaaccgcacattcttcgggtgttaagttttgtcaaagtattctcatcgtaaccatttaaaagctcttggcgaatcaaactttaacgaagaaattgtaagctttgttccctaattgctatagaagtcgcagagcttaccttctgtccacgtttttccctgttaattgcctcgggcgagatattgtagaaaatccatgttatttagattagtgagggaagagaggccaagagtgtatcaaagtcctagccaggatccttttagggagacgatgttgggtttgttttaatgcttagaaccatcattccttcatctagagtaacataactagctcaacattagacagacttttcccaaatttgttataagagagctgctggaccacggagggtttccaggcgtgcttcttttttctcactctttgtaggaaacttgtcgatgtagtcaacagaccaagacaactgtaatagcatttaaacaatgttccctttttaaggatcacgttgaaagcacattggttgtgccttttgcgagaaccaagtcagacatgcaacagacttcaagtagttctcctttttcaggaaggaaggttgaagacgtactatattcaagcatttgcttcgctctcaagactaaaggtgaaaactacagtgggcattcaatagactttaagcaattcctctttccaagaagaagtgttgaagacgtattgaggcccaaccaatattttcgaccagtagtttgacagctttttggagtaaaatacaagtacaagtacaaattacatgtaaacataaagatcaaacaaaaaggcaataagtaagaaacttgtatatttttgagggcacatagctaggtatgctacccccaagtgatctagaaagttgggacatctccaaatttgtgatcacatgtttaaaacatagtttatgtgggaaacaaacatgttaattattgtgcaaatctcttctgttttcatttcattatatcgaaggtttacattgagagaaaattttcaaagaactacataaaactgtaaaggaatgttagacccagatccccctagcctattggtaatagcgatgtagataatatgcattccaagcacgagggatttttgacttatcaattttcttgagttgaaatgttccttctcctactttgtattgtatcacataggttctttcccaattggatcctaagaccctactctaggttcttatgaagctaagaagactcttcttaagacaagatctctaacgtcaaatgtacgacttttgagtttagaattaaaattcttgataatcttgtcctgatacatcttgagttagaattgtgactatcttagagctattcaattagatccaatgattcttggagtaaagaatggtttcgagttgggtcataagtgtctcgtctatgagaacggtctacagattctactgagatgaccgtttcacactcggaagtcatcaaatatggtgtatgccctgttgaagttctctccttcgttctatatgcccaaagaagtcgcaaaagctccttcggccaataggctttgcaagcttggagtttcttcttcaacgtagtctttaggatcttgttcacagcttcaacttgtccattttcctgtggtctagccacggctgagaaactttagatcggaagagcggttcagcaggaatgccgagaccg

SEQ ID NO: 122148 - DNA, 1346 bp, Cannabis sativa
  modified_base (1277)..(1298): a, c, t, g, unknown or other
tttatccttttccttgatgccaacctttacagctgtgacctgatcctctgcgagcttttatagtccctcagttatgttgaccttggcttccagccctttgatgtagttatttctattttggagtttgagattcctgactactgcctagttctcaaggtctgttttggccttcagggcttccttgagcttctcgttgagtatggatttggcagcctctaactcctcaagatgagccttatatatttcctcagtatgaaacgtaaatgacgccttatacttgttgtacttttacaagtacttcttctcacctattagattagcttccttataatgttgtttaacctctttcttgatggcttcaatttagagttctaagttcttctgagtagtcaaggaaaggttaagctagacctccattatctacacctccctgcaggtccactctgcgaagaatgccatataaaataaattgaaaaagttagggaaaatagtgtgattttgtactaagaaaaaggtaaaattaaagtggatatgagaaatacccctaccattttttctttgaagcattggctaggagcacagggttgaaactactgccaatagcccatttcttagtcattagctccatcaagctagctgtaatatcctcgatcgcatctgaagggtgccaactccctgctaaggcgagcaactaactatttgcccatagctggcaggtccgttatgagtgctaaatacctcgaattgcgaatgcctgtctgtgatctcgcccttttaatcgcggataattgatcagtcctagactggacaacggtgcattcttccgcaagcctacattttatgtatgcattggatttttgtacttgttccaagacctcaggcccaaaatgagcggacttcataagaaacttaaagggtaaaggcgagatgtttggcaagttagtttagaggccctgagcaagcttagatgggttagctgaagatgaggccgagagtgcttggttgtctaaggatttattgggtggtttatgttggttgtattgttgttttgactgaatttaagtcaaagtattagttgccaagaggaccattttcctgtcattggcgctaccaattggtggttgagtggatggtggtggttattagtttcaagtaggaaggcttcccaccctggcagatcttgaatctcgaggagcagaatgtttgacacttttgtcctcccttcttagatgaggggaagtgtttgttgggtttggtgccctaaataaaacccattnnnnnnnnnnnnnnnnnnnnnnttaataaagatcagaaataaaattgtatgttgcatggttcacatgatt

SEQ ID NO: 122149 - DNA, 1040 bp, Cannabis sativa
ataagtaaatctgattatgttgaaatgagttttatttagggcataaaacccaacaaaggtacacaataatagtccaattgatgtgaagaaatgtattaactctatttgctcttcttttgcagatttacatacttcatttttcccttcccctgttccgtgctcaaaggaggcttggaatccacccccacaggattggatcaagctgaattgtgatgtccgagtggggcttgatggtatatgtatggtagttgtggttaagaaccatcttggtagggtggtttgggttcaaacggatcgattaaatttttttgatgctctatatggggaggcggcggcttgctgtttggcactttcagttgcgaaagatcttgggtccaagtttactaatgtggagagcgactctagagtagttatcaaggctctaaacgggattgattctcactgggcaattgaaaactatgtctcattttgtaatagttcttctcccttgtttattagttgtaatttttcgatattagtagatcttgtaactttgtagcccataatgtagaaaattggatttttgctcactagaggtttggttttattccactatcaaccataccttcaaacttgttttataataaccgagaggtctaatttttccttctattttaagtacgcttttattcaaaaaaaaaaaaggtttcaactccaaactttgcacgatgaaaattaagagtcaaaaggctagtaactttttttgaagttttcatgtgggtaggtggggtcttaacataaaatggaagagagaaacaaaattttaaaacttaaaacatttttataaattattagttgtaaataatttatttaattattattaatatttttgtaataaattaattaaatataattagatatataataatttaaatatttaaaatatggatagtttgggaaccttacaattttaaatgcacttaaggtactaaaatatagggttgtacaaaaaaaattgtaaaccgcccaaaccgaatcgaaaaaaccgataaaaattacaa

SEQ ID NO: 122150 - DNA, 756 bp, Cannabis sativa
cattaacaatgtgagactaacttgaatttgatatcacaagtgtattgatatatttttttttttaatataatgcaaataggatgtaattgatgatgaatattattattactattatatatgcatataatacgatgtgataatcaatttgtgtagaataaataaatttcatagcaattttctaaaaatgataaaaaagacactacaatattcaataattaattttagaatcatttatggattagaaagaaaataaaaaattattattggaatcaaatatatataattcaataaaagtcaatatttatataagttacctatttatttgtattttttaaaagaataaattatttattgtatttaatatttttattcataatattaactattagatcaacatccaaagattctaaactaattaatacaaataataattaattttaatcactactatacaacaaccctagacacccgtatataaaatatatactttaggactcattttcattctacttgatatattatatggttgcgtttggcgtcaaactaatatgcatatattatctcgagcttgcagcctaattcaaccgtctcaactaatccattattttatttgtaataataattaaatatatagtaatatgatgaaatcccagctttgaataaacaaaagtaaaaaaatgttagtttatatgatctcttgctagctagctagatagagttggtaatttcttttatatctcactagatcatcatatg

SEQ ID NO: 122151 - DNA, 1669 bp, Cannabis sativa
tctctctctctctctccaaaccacaagagaaaaccaaaaacaacatttcaatctcatctttcaaatattcacattcatttgtagtgtggcccttttctccttggtactcgtattgcttgttttgatctcgcctgttccttctgccatttgacatgcgcaggggcttccgataatggaccatgttacacgtcgccttataaacattctcttgagtatctatcaaacttgtttactcaatgtacttcgggtcctactcctataacagtttctttactgaatcagtacagctgtgattcttacctcccctcttacccagcgaatgccccgcactagaatctggacctcggctttggattgtccgggagccataatgcacccaatttgtgccgccccatacccagagaaatgggtctgcatagggacaagatcggatgcagtagtttcgtagatagacggagagaactggggtcctgtaagggacaaagatagggcaggagtttgggatgctaaacttgtagcagctgttgttggagttggtgtaggagggactctgaaggcctgaatgtaggcatcctcaaggttaattatgccctgagccttagccataaattcacttaaggtctcgtctctctttctctgcatctctccacacagcaaggaacctataactagtctagactagagggccattagctttagatcatcactaaccttggttttggcggctgcctctatcattctttgagtgaaatatttcagacgttcgttgggttgttgcttgacattggttagggaactgacctccatatacttctcgcacgcagtgttaaattgcttgcgaaattctaactgtcaatccttcctgatgtcgatcaatcctaaggccaactgcttctactagtcttttgcgaaattggttagagtcaaggaaaagcacaaacacttagcgtcattgttgacacgggccacctgcatcatcttattatatttggctaaatttggttgcagatcagttctcccttcatactattcgatatggggcatcttaaagttttctgggagtggaattcatgtgatcctccttacacaaggttctgaatcttcatcctcagagtctgacaatgctccacttttttttaaccaacttagtcaaagcaccaatctgttcctccaatctcttggtatcacttttgggaagatcacgtcccctcatcttgtcactctgatgatttcttaggtcactcccacgtggcctcaccttctcgcttttatacctctcgtattttgcatccaactaccgatgcagatctgccgtggaccaactgtcttccgaatggttgacaagaatcctcccgtcctgattgacagaatcattgggaggctctacccatctcctaggtctaggaaccgtggcggctggtcccttcagcacggtattgcgtcgacggttagaggggcatccaggctcgaaagcaccggtggccttctccgtcctcaaaggtcgtccgactgggggtgcatctctacgtgtagggttaggcatagatttccatggaggttcattcaccttgcccttacccttatccatgtgagggtttaatgttggaaattattttaccaggatcgtagatctactcacaagtatcttgattaacaccctaaatatgaa

SEQ ID NO: 122152 - DNA, 2134 bp, Cannabis sativa
gtgcttgcaatattagcagagtgttgtcgatttttgaactgtaacttcttacactcaaacttggtgtgatctggtttcttacaatagttgcagatgatgctcccagaatctagtcttcaattatcatgtccttgtgaattacctcatttgtatccacttggagtagagtattttttcggtgcagaattgttacgacctaccaaggcgctattaagaggagttgaagagatagtttctatgcaaagaacacgagtaaacacatcttgtaaagatgagacatcggtaccagagagaacttgtgactttccagagtcaaattcagatgagagtcctgcaagaaaactcataatagccatatgttctcgttggcgctgttgaactttaacatcaagactaaatggcaataacacattaagatcttttagatgttttttttaaatgccataaagtaactcataagagacttatcttgtttctctgcacgataaaatgctttacaaatatcatatatgcgagatatgttgtctttgccaaaatacaaaaactccaaataatttattagttcttaaccaattcacaatgattaatcaaactaattacctcattatcgataaaattttgaattcgaaggaacaagtgagcatccttacagagccatattttccttgaattatcttttcctaatattttaattatatagaattgccgagtattttaacaaaagtgtatctaaaatctgtatcaaaggaaaaataaatcaattctaagccaaatcgatactctttgccaattgataacatcatatttataaaataaattaatcactttatacactacaatatgagagttgatgttaggtattattcataaattcaaactacccaaactttaaaaatacaaaaactcataaacaaaataataaaataaatatctataaaattatagtctccgtttaactaataataataatgattcacacacttttatgtagaagttatatatgtattatatttgaaatttttatcatgccaagaaaatagagatttttttttttgaagccataagtaatttgatgctactattaataataaattataaaataatataagtataaattaatatgcatataaaattcaattgttgctgctaaaaataatatttaatcacatatactaatcaaaatgacttgaggaagaaaaaatgattgggagcatgcgggaacgtatcagtcttccactagttttggagctacgaaactaactgggaagctcagtcctttcatgggaagggtccagtcgacgatctccgacgccgttattcttgcttctgcttcggttttctgtgattttctgggtggtattgcggttttctagggttgtattacgatttgctgcgatttactgggttacggtacgattagagttgcagttttttctgggttttattcgcagttctttctggggttttctgcgattctcgttgtgcacagggctggttgtctgcgattctccatggatttggagttggtgaatagactttctgaggtcttggttcttgatgagggtgatggccctgttctttccttgaacaaggatggtattgaggaaggtaagaagaagatggagttatgtttggtggggaaggtaatcggtcccaggccagccaacaaggaaggaatcgagaaggctatgaatggggtttggaagatccaccaccggtttcaggtggaagaattgagctccaagaatgtatttcggtttttctttggttgtagggaggatccgcagagggtatatggtggtggtccttggacaattgacaagcaattgatttgctttgtgaaaccaatggggctgggtgaaatttcaaagatgaactttgattttacatcattttggatatcgattaataacgtcccattagcttgtatgactgaactttttgcaagagaatggggggagaggattggaaagctagaagacatcaagatttttaatggtaccatgaaagtgagggtgtgcattaacattacggagcctcttaagcgtggcttacgtgtggcgattgatgatcaaggtaatgaggtttcacttctttttcaatatgaacatttacctgacttttgttttgattg

SEQ ID NO: 122153 - DNA, 1545 bp, Cannabis sativa
  modified_base (159)..(160): a, c, t, g, unknown or other
aaataaggatgtgttggacggtgttgatttggtcctggtgggttgggggatgtttctactttttgtgacataattttctacttttaaatataatcaagtcgttttgttctgctattattttagctttctcttaacttctgattattattattattattnntattattattattattaagaaaagccatgcaaatatatagaaactaagtcaataaggaaagaaaaacgacaaattttcttattggttaaagtgagtgatttggttattcataaaagtatactcaaatgaagaataaaataaacaaaataaatttagaaggttaaggtttatctatagtttatacttatttcttctttttagtttcaactttcttacatttcacttcacctttctcctttacatatccatatcttttttcccaagttgatgataagcgggattcgaactataaataactaaatattactgggtagtttattgtacactctccataaacaattgtttagggagtttgatattttccatagctttttagtttattattttaattatcacgaacagttatttaaggtcatttttacattttaaaaaatttcaaatacttttttttttcgaaacgaaaaaaaaaaattcaaatacttaaaaataaaatttaaatatgattgcttatttttttctttatatatagtaaatgaatatttgaattttatttgcaatactgtaaattatttgaattttttttaaattttaaaagttatcataaataattataacgtaaataaatacaaatacaaataaaatcagtatacacctcttttaaaattgtattacaaatcttttcaatattattttatgcttaattttattggtatatacatagggactcattcggtacatcatatttgtattgtattgtgttggagggtattgtattatattgtattagtattatgtaatataatactatgtttgatactgacttgtattaatagatcgtataaagttataatatagtttcaataaactcagttgaaaccgactactagtcaagtctgagtcctaggtcccgagtctaggttcgggatctaggtttggctccgggtcccaaatttgggtccctgtcccaatccaggtcttaagtctcgggtctagttcgaggtctgggtttggagtccgggtttgagtctaggtctcgagtccgggacccggtctaggttcgggtctgattctaggtccgagtatgggcccaagttcgagtctgagccttggtccgagtctgggtctaattctgggtctgggtctgggttcgggttggggtcctaatcttgggttttggttcaagtcccaagttagggttccggttcgggtccaagttagggttcaggttcgggtccaagatattaatattattactactgttgcccccgattttacccaaaatacgtggaccaacgggatgatgacacgtggatgggaagggtttagcggttaaataagacagctaagtcttcttgaaagcaaaggattatctcggacatgcctcc

SEQ ID NO: 122154 - DNA, 1197 bp, Cannabis sativa
  modified_base (1140)..(1154): a, c, t, g, unknown or other
tactcttggtatcttcactaatcaactctagacatctttcaatgagatccactgctccgtcgagtcagctctctcagatagaagctgacattcaaataatgttgactacttaagttcaccttgtcaccaagaactgcgattgccagataaagcgttatgtcttcaagcgcagaaacgacgagacttacattataaacctcgaaaagacatgggaaaagctctagctcgctaccagagttattattgctatgtttccagcaagatgtcccagaacgatacgcgttacaacatatttaataaacgtatgtattgacccagtaaaagcggaccaatcacagctgtgtgatttttaaataataaccgcatttattttacgtgggacgtaattaaattccacaatttcaagggattattgttgtaagatatctgtctgattcgtaattaactgcattcctatgtaactattaataggagtaggttacactgaaaaagggacaaaaaatccttaagagaaaaagcccgaagagttgatcagaaatatctaataagatagactcgtagaattttaactgtaaaaccacgtaaaaaagctttgtgttcttattttctctttactgttattattttctatgcaaatccatcacgatttaggctttaatatagttaacgaaaatatgtgttaatagtttggcgctttcattcagagcctttgtgaaaaaagctttgaaaaaaatctcttgatattataaaaaaaaaaaaattctccatggctgacaacggagaaaatgttgatgctcctcatgaagaaatcactcaccatcctggaaaaaagccaatgggctcccagaggcctcccaactcacgatttacacggaccactcgttccaggaggacttaacctgagggtgacccaagtacacgggccactcattccaggaggacccaacctgagggtggcccaagtacacggtccactcgttccaggaggacccaacctgagggtggcccaagtacacggtccactcgttccaggaggaactaacctgagggtggcccaaatacacggaccatacattcaaggaggacccagaatccagaacaaggtatgaagaacttgaaatgaacattggtagagcccannnnnnnnnnnnnnntgaggatggtgcctacgatccaacaagatacgtgccaatcgtc

SEQ ID NO: 122155 - DNA, 1097 bp, Cannabis sativa
gatcataatcgagtcacaaccaatacatatcgttaatctcaattgagattatgttacaacaaacacatatcaagatctcgatcataatcgagtcatacttataataacattagtcatatatggtgcttaatgctcttcttacctcagtctagaaattaagcgtgcataccggcctaagtggaaaataaagcttgacgactccgggccctatgtcacgacaacaaaaaccaataaataccttaaaccaaaactctgtgaattaaccctgatttccataaccggaccaaacctaacttccattagctctaaaataaatcaaacgatactcaaatagcctaaaaaggatactgggtacaaccccgagccaaaaatcaattccgaggaaaacccaaaaattttcccctttaaggcaaccgatcgaccggttctgttgcactagaaccaaccggtcgaccggttctcgcagaccaacaactcttgggttttcacccccaaactcgagccaaacctttccaaacctaatcaacagctccagaatagtttattatcataaacataacatgtacaaagtatcaattcacttcagttcatcaatttaccaaagtcaccaagctaaaactaagaaattgaatttttaacactaaattctccaattttagcaccacagccaccaaaatcatataaaccaagctttaatcaatcataattcgaacctaaaagcatctcctaccctcagtttaaaaatcacagctctaaaatcccaaaatctatatttaaacctaacctacaacttctagaaagtcaaggaaaagatgtgagaacttaccttaaagcttaaagaatccttggactaggttaaattctgctaaagcttgagaattggtgaagaatttccctcccttgcagctgctggtcattggttcgaaggggagaagaagaagggaaatggtgttatcccatttcttagtttttggtttttccttcaaaatgaattaaacctaagcatataacataaatttatatttatttattttctttctcagcccaaaagtcacactaaagacaagaataataattctaagaaaagactaaattgc

SEQ ID NO: 122156 - DNA, 2881 bp, Cannabis sativa
ccactccttatgagattggatattgcattgatttggagtttgttctatagcaacatcggtttggatacttctactttagccaagttggccaccagtggctagatgataccaatagttaacctatgctgaaagttggtgagtacactaataaatacttcattgcttgggaagttaaagaggttttccatcagcgcttctagagaatgccatttttcaagtgttctatccccaccttacaaataagggacagagtaaaccacatcctgtctctctcggcagagtagagaaatctactctaattgactagtttggccaacttccataagtatggtttatgtcctcctacttctagagctacaggagtcccagtaatagagggagtctatcttggagatggacatgttcctaacttatatgatgatgtacctttatatcacattgcacagaatctagagaggaaggagagggctcttcgctgctgcctggccagcgggggtccgattggtgatgcttctctttagatcgggcttagaggcctagcttctgagggacctactcaccccatgcctacatctaaaggcaagcacaaggcagttgtagaggactctgatagttcctcttctgatgagttgataacaccatattttttgtcttgcattaaatttttatgattgttttcttactttgctactttctttttgtaaatatgtcttctaggctgagaggtctcactaggggaccttcaaatgagcccacgggatgagcgagggccaaggtggcccaaacttctcgtggtggggatgatattgggtcatccccacctcctcctccaccaaggcccgcacctgttgcgcagcctgcgatacggcccacaggccatggtgctcggaggcccgacagaggagcggggtcaactacagggtagagggctgttgaggtagcatcgagatagcttttcccttcatggataaagagctcaaggagcttggtgatggtgagctaaacaagctctactctactggccttcaggaccttactatagtaagttgtactttcagctttgttcattttctaacactctttaagttggttggccataggttttactacatgtatggccggccttggatgtacctgtgaagggttggccagccatagcagtcccaaagaggggttggtcgaccagcgttgtaattttgacactaatgttgtcttgttttgtttttaggccttgatgaagctgagctcagtaggcgattgctcctggtggtccttggatgctctttgagggtacgcgaagaccctacaggcttcttttttggcaaaggacaaacccatgtctgacatggaggccgtccttattgagagacagagtatgatttctggcctagagaccatgcttggtgccacaaataaggagaacaccactgaagttgcctttatctctaggttgtagtctaaacctactgagaatgaagagaaactgagggcggctcttgatggccaacaagccataagggaggagtattttaacttgtcctctgagctcactttatgagttcaagctgcgcaaccccagagctaatctgtcatacatcgatagtgaggctttcgtggagtgtacattggcatgaggaagagtgctttttgagagtcgattgaaagcgaactagcccactgcctatcgagagggttcttcatcaggaaaccatgatagagggttggttggcacaactgcagagggggtggccaactaggaaattgaccaccaggccggccaacatgttgatgttgaggccagtccagactctcgctatctcgattttgttacttcagacaccactccatctagccttgaacacacacagataatattgttcattagtattatttagcattatttttgtataacatagacaatactttcatgttttgtatggcctgtggcctttttagaacactacttattttcagcccaagggccttcatgttcgtatctttggcctataggccctttcttgaacattactattgtttgaccttgttgcttttttatcatgtgtcatcccaaatttttttaacctgacgtggcatgtccacgtaagccagacactgagtataagtggaatacaacattgccaatagcaagacagggtctccatgcaaggtatggcaaaattttcaagtagcaacccaaaggagtgaagcgagccctcaaagagttgtaccaacatctcttgccaaccaagtgaagcctataagccaactagagtgagcctataagccgaccacgatctgggcacaagctggacgaccaaaaagtgacttccaaaccaagggagcttccgtttgaccaagggaacttgacctctataaggaaacagtgtacaaatctgtcatccacttgtaaaaggatagcctcctcttggtaaagctatagtgacatgcaagatcttggcatatacatgacctgccaggtcctggtaggagcatggctggccagaccttaacctacacgccttggccggccatacttcccttgtaggtatatgggcggctaggattaacctggcaggactctatgtatagcctaaaacgtggacaataagctacctgtgaatttagcccttaacaccccaacaaactgatggaaagtatctactttcaaggggcaatttagtcatttgtatttaattaatttaatatgtaaatatctaaggcattcattgtaaattagggtcttaggcttcctatataaagccttaactttaacctagaaaacctaagtcattaagcctacttctagcctccaaacaattctatgtctgaaaccctaatctcttctctctctctctctctctctctctcttgtacacaccca

SEQ ID NO: 122157 - DNA, 832 bp, Cannabis sativa
ctgtatgtcaagaagatagttaggcttcatggtgttccaaagtcgattgtttcagaatgagatctaaactttatatccaagttctgggagagtttgcaatgagcaatgggtaccaaattaaagttcagtttagcttttatccttagactgatggtcaatatgagaggattattcagatacttgaggattttctacgggcgtgtgtattagatatggaaggttcgtggaatacaagtaccttcctctgattgagtttttgtacaataatagttatcagagtactattggtatggcattgtatgaaattctttatgaataaaaatattgttcacccattcattaggatgaagctggtgaatggaggtatcttggacctgatgcagtccaaagaacgagtgaggccattgagaaaatttgagctcgtatgcttgcctctcagagtaaacaaaagagctacgctgattcaaagcgtagagaaactaaattcgaggttggggccaattttgtcttctttcgggtgtccccaatgaaggggaaatctagagatttgggaagaagggaaagttgagtcccaaatttatcggcccatatgaggaaaaattggtttagaacctgtgtgggaaagagaaagtattgcagaacaagattattgtgctagttaaaattctgtggaggaacagcgggattggaaggcaatttaggggttagagtggcagatgcgggagctgtatctcgagatgttcagataaaatttcgaggacgaaatttctttaaggaggggatagttgtaatatcctaaaaaatatactaatatttaaatggacatatttta

SEQ ID NO: 122158 - DNA, 1205 bp, Cannabis sativa
atttcgccacagttttaaaacgtggcccataattttgccagacggttcaaaaccgtcgggtataggtctcaaaaaattaaaatacccttgcacctcttgatctcactcattccccctatcttgctctcgaacccatcaaactctccatctgaaaccctcgcgcctccatcttctccgatctcacttcgtccatctctctcaatctcactccgtccatctctctcaatctcactcagcaactcactccgtccatctatctcaatctcactcagcaactcactccgtccatctctctcaatctcactcagtaactccctccatcgctctctcgatctcactcactcgggtctctctctagatctctccatccttcgtctctctctctctctctcccacggtgacgcaacatcgacaccaccagcgacgcacctccgccgcccctccaccagcgatttaacaatgaaaggtttgttttttttctcgatctcatcactcacttgtttttgtgattatgagtatatttcgctttacatgatgggtatcatcacttataagaagacatatttacatagtgtaattagtttatttacatagtgtaattagttttagaagcttaggaaacttcaaaagtgtccacgatggtgatgactttttctatacttatagtgacaaatgatttcaatctgtttgcagacctttgcctcctcggtcttcttgatttagaaatttctgagaactttgtcgtgattgctgccgatttactgcgagtgtgggttaatcaacataattaattgcacgagatattgcgattggtagaaatttgaaatagttcttccaagttaggtgttaccatcccaattaaatttttactccagtaaatttggtcaaattatacaaaactttgttgttttatttgcttaacttttcttttttaatattactatggatggccaggttgctttagttttatgggtgacatcttatattggaagtttcaattcagttcatgggttaataatttgaggtctctaggctatcatatataagttaatctgagtttagaataactgagtgtttttctttgcaaagcactatgtaatcggatgcatttggtgtctgagcaaaatgaatgagtggaagtagtttattagttcctgtcaaaatgaagaacagttgaaagatcaatttttactaggaaaatatgc

SEQ ID NO: 122159 - DNA, 1025 bp, Cannabis sativa
  modified_base (979)..(979): a, c, t, g, unknown or other
gttttaggtttttccttatcttaaatgccttgtactattttcatttgaacttaatacaattgtgtttgcttgcattattattcacaatgtaaacaactatattttgatcagaggtaaacaactatatttctggcttttgtatccctcacacccgacccctctctctctctctcaaaccctttcttttagaaatcttgattttgagaagaaaagcttgaatcttggtttgctttaaagctttatttggtgttcttgtaagatgtttaatctttaattatgactaaatttaattttaagatgagcatgaaaaggggtgtggtgttcttgtttatgcatgtttatagttttgatgtttgatcttggtaaattgagtgtctaaagcacaatttagttgtgatataaggttattgagcatggaatgtgagtttaggtcagaatttatgagttattgattgagtttcaagctttgattttagtgttgttcttgagtttgtgttttgggatttgatgattcaaggtgtgaggttgaattttgttgattttgctcaagctttggagctttggtatgattttgttgattaatgttggaattgatgttgttacctctttgttgtgatgatttttatctgtaagaagttaattttgtgtatggtttgattaagattcgaatatatggaaaagtgagcattttcagactttaaaattaggctttttgggtttctcgaaccgagtggccgtggccagatttattgttgccgcggccgaaaacccacaagagagccatcccttttctcaattttgttttggccataacttttgactcgggacttcattttggacgttctttattttgttggaaagctcgttttgagctctatatgataatttgtattttgaatgtcgactttatattatgtgaaagagtaattagggattaaccctatttgtgaactcccagattgtgtgactaggattaccngcacctgatcaggagcacctaggggtttggaatctctgttattgtg

SEQ ID NO: 122160 - DNA, 890 bp, Cannabis sativa
aaaaattggccgcttcagcgttttctacagaattaataatttaattgagaaattaaaataatttttattattattgatcttgaatgattgttaaggatggagatcgacgcttagctatttttaatagcctattatctatctttatttgctttctatttatgttatttaatctttatattaaaagcctcgtttttaattgttagttataatttttgaataataaattaataatagttctcgtgggttcaacatttatttatcattatattgaaataattgttaatttagaaataaaaaaagaatagtaaatttgttgtggtaaacgatacgacacacattaataaatcacactcatgacaactatttgtcaaaacggtacacgatattatcggaacggggcagagctacaaaaatgtcaccgaaaaaaatattgagttgggcgaaatgacttagtgcaaattgcaagttgacaaatcgtcaaacgaacaccggaggtgatcaaaaaatgtgttcaaagtttgaaattctaaactttgactcacgatctctccctaacagtaacgaatgaggaggcgccgcttgaaagttgatatttatggaggccgggggtctgaatggtgcaacttgtgggttagtggtggcaggaataaggtcgccgacagtagtggtggtggttatagttttttgagtgtttgaagaaagagaaagaaagagagaaatgagaaagagaaagtgtgtgtagtggccagtgggtatgggaaagaaattgagtaaataaaaaaattagagtggttctacaatgtacctttttaaaatggatgtactgatgcacccttaacttgtttcgacatctagaagaatttttagtctaatttttttttcatattcat

SEQ ID NO: 122161 - DNA, 900 bp, Cannabis sativa
tgtatatgatggtttaaaattgtcgctataggatagttgacggttttaaaccgtggtttatagtagcaactatagctgacgattttaaaccatttgatttttttttttgttgccgatatttttcaattgtcgcgcctattctacccagtattcgcgacaatcaaataaattacggttttaaaaatcaatgggaataaattttccgattgtttaattaaattgttggaaaatcagcgtttttttagtagtagttacacatcaataagaattcttttcttaaaagttgaaagaataatagcttttccttaacaaaacaaataacgaataatagctattacaaattgtgcaatttggtatgaaaaacattaatttgatgataatatatgtccttttataagatgggccgttaaacaatcaaacatatatcaattgtaaactttgatccatttattcaattaattctatttcaattattaacaagcaaaggtcattgtttgtgaccttttttttggtacctttgccttgaaaataggcaacacagctacgtacaactgtcgagtacaagaacaatatatattcattgtgtacattatgtacatataagccggcctagctaaaggtccaacctatagtactctcctaaaattattgttctcttcattgtatacaccattctataaatagcttctttcaaagtatgattagcatatccaaaaacacacaacaccaaaccaaataataataataattttgaaagctctctcaattgtcacaccctttaatcatggcctcaaaagcatcatctcccactttattctcactactcttaatagtgttctactttggatatcttgaaatgacaatggctggggacccagatatcctaacagatttcgtact

SEQ ID NO: 122162 - DNA, 746 bp, Cannabis sativa
  modified_base (86)..(91): a, c, t, g, unknown or other
aactttaatttatactaaaatattatatatttaggtgctcttaaaagttagttttacatacaaatattgtataaaatacaattcannnnnntactatacaatacaatgtaatacggcataccaaacgaaacctaaaataatactcttaaagatgatcaaatcataattcattgaaatttactttaaccaatttgatcatttccagcatcaacgaaaactttatctgagaaaataagctgcccgactgaataactagcaaaacccttggataataatcctttgcgagcaagaagttgctgagacacatgcttcattgttggtctacactttggtttaacattcagacatgcaaatgctattgcggcgacaagaacaacatctcgtgccacaaccccacttgctggtcttggcaagcgtttgtctaatatatccattagcaacatattttgagtacttgatgaggaagatgatgacaatgacaacgacgataacagttcttgaggatgcctgcccattagagtttcaagtaccacaactccaaagctataaacatcacatttttcagttatagccatagtgtaagcaagttctgcaatcacaacaaatggaatgtacacttaatatacaatgaaaatgtagacaataggatattgaacaagcaacaactatacatacaacttaccaggagcaatatatccataagtaccagcaatcatggtccgattggaagaatcaggatctagtag

SEQ ID NO: 122163 - DNA, 1684 bp, Cannabis sativa
  modified_base (321)..(325): a, c, t, g, unknown or other
tttagttcccgataatcaatacacattctgagggaaacgtcctgctttttcacactgggtcggataaagcctaaatcaagcattccttgaagttgtatttctagctccttgagttctgatggagccattctacatggtgctttcgaaacgggttctactttaggtgccaaatcaatcctaaaatctatttctcattgcgggggtaatcttggcaactcctagagaaaaatgtcgagaaattatttaacaactgactacttcaggcccaaatgtttcaggtctacaggagtcaatcataactgctaaaaatcctacacatcnnnnntgtagtaaatctctagcccttaagactgaaataatcaggatttgagaccgttgaacagatccaacatagacaaatggattttcgccctccggctaaaaagttaccattttctgcttacaatcaatgctgggagaatacttggacaagaaatctagcacaaatatgatatcaaattttgctaattccaactctactaggtcaacacttaactcccaatctttgaccctaacgggcatagacctaattcaccttttagagataaccaactccccgctaggcagtagggttccaaaccctcttttaataaaatcacaaggcctacccaattaattaattacccgtgttgccacatatgagtgtgtagccctagagtcaaataacacagtaaaataggagttgttgacaagaagctgacttgtcaccacagaaggactcactgcagcgtcaacttgagtgacagcaaacacctgagtaggtacgggttttgcctctggcttttactattctttcttttcctgagggcaatccttcttgaaatgcccaaccatgccacactgaaatcatgtcttccggttgcactcgcctggatgatgtttcttacaacgtaggcacttagggtaagaataaccctggcatccacctctgccttggttcccacggaaccgctttctctgtcctaaaccactagatgccggggtatcctttcttttttgattagtggtggaatcaccactatccctaccatatacatgagtagtaagagtgggggtctcaccaacacttggagtcactcggggctcctgaagaaattttaccgcaccctcagctcgcagagctttatcaaccatctattcatatgatgtcgcttcattcgtagtaatcaccaagtcgtgtctaatttttgcatttagacctcctagatatttctcctttttagtgaagtccgtaggcataatacctgaagccaacttggccagacgatcaaattttgttgtgtactctgttactgacgtactcactctgcaccaactcggtaaattctttctgcttagcactacggattgccatgttgtaatacttgccattgaacaaatctcagaactcttcccatgtcataatagtgacgtctcgagtgagggacactaattcccaccacacgagtgcgtcttcctggaactgaaaagtagcacaggtcactctgccatttccaacgacccccatgaaattctgaattctctctatcactgtgagccaatgatcaaccttgattacaggcgaaagtatatccatttttggcaccgttccaacatttcttaactactagtgttacttcctgattaaccaaaaagtagttgccga

SEQ ID NO: 122164 - DNA, 3020 bp, Cannabis sativa
caaataaatataaaattagaggtatatttgattaattgattaataaaaggggtatttttcaacttacccctaaatttttctccgtagtaggcccatcttcagggacagtttctaaaacctccaaaagctgaggtgtcgctatggggatttcattttggtcttgttccccaagagcattttagcaggacgaacagagtccctagcggcggacatgactacgtccgcaagaggatcttggttcaaatccagggaaggaaggttaaactctttaaaaaaaaaacgtaaacagatgaaaaggagagattttttacgcacacagtattgtcgtacctcccaagtacggccttggccttcacctagactaaaaccttttttgaaataaaaaatgccaagaaactcagacaggaggttagagcacttacttgacagaacaaaaggggtagtcggcgatcccaaaatgttcgtcctaaaactctgtagctagctgatacaacggtcacactcatcctaaaagttaagagtcccctttgacgaagaactttgcaagttcagttgaagggagacagcgttttgaaaaagctcagcacgatgatgagtaaacgttgaattaaaccatttaattcttcctgcatgcaaaagataaagaaagaaaaaagacaaggagttgcagagaaaaagtcgagctttgaataaaagaataaaaaatggtaatgccgccattgacagcttttatgtcaaaaagaaaaggaaattttacaagatcaacgacttggagaggccacaaagaatcatatggttagggaaattaggggtcccatatgctgatcttgggacccacaaaaatatcaagaccttttttcctcataacattcagccgtcaaagcactcctcctttcttgctaagcacgctttggaaagtaagggagagatcaaggaacaccctcaagcgtaccgcgtggtcatcacgtggaaggtggtaaaaatcatgaatacctctcaaagaatacagttcattcgaagaagggtccgtgatcgaagattttataacacatgtccgcgatcaacactgaaaataatggcaagcttccacgatccaagaaatctggaaagcttagggaataaatgttattcaaattttccttcaatagacacgtgtggcacaatcaaggcagggatacgagttccgcatgggacattcgggaaaattatgggaaaataattcccggatctgggtgtcgataagaggtaatgtctaccgggagcagtttctttcagtaaggaatatgaacagcgatgtaggttttgaaagcccaggacacgtcagctccttgcaaaatggcacttcaaagacggttagacctttttttgacataggatcaaatcttgtccctgtgctagcccatggtaatgcgtgtacgcgtctttgaacacactttttgccccacagcctgcgtagagactatttcgtagaggagagacctttgcacgacacgtgtccaacgtcgtacatggcccctcaccagtcatgttaaactgcatgatgaagaaagttcctactagtggatggtcaaatcgtccttcctgcagtaccaaccttagtaacgtgtggaagatgaaatcctaaataggcaaagagcatgccctttgccccatatgcgcctatatatactatagttcttttgaagagaagggaaagagacttttatctaccattaccctgcaaaaataccttgccgtaactcttttgatacaaatttcccacgctataatacattgtaatctcatactatccgccctaagaggctaataatattaactcgtggactaaggatctttaacatctaaaccacgtaaaaacttgatgttcatattatttatagcttaacattttctttaatctcttaatagttcccaaaaaacttggtaaacaataatggtgaactattttataaaattggtgtggaatttttacactatttaactccaatagcacaccaaattctacactattaatgatggttgattttgaatctacaacaacttggtgtagaacgttttttttacattctaacccttaatttttttaaaaaaaatcttacattttagttctcaaatgaaaaattatcacaaaagtaataattaatttaaagcactaccatattggaaaatgtaaaataacaataataaaatattaatattaaataaaataaaagcaacataacactaagttataaaactaaaaataataacataaataaaaataaaaattaaataaaataataatttaatagttaaattggttacttgagtacttagctttgaataatatcaaagtaatttaatagttttttttgactgacatagacaaatcaagaatgcagatgttcaatatgtccttcaaaatgtattaattgatcatatattggaacaccacaataatttagaaaattaaattatgtaggtgttactttatttaagttatttttctaaaaaaatgtgcaatgttcagttaatttaataaatattttattttacaaaattagcttaagattttaaattcttactagtagccatgatatgattatatcatagattagttatttaggttaataatgtaaataatgtaaaatgtgagatctcttttaagtaaagtatatttatttgatgtgatatttagtatgatatttggtgtaaatcattagagttgttgcaccaaaaataaaatattctacactagtttagtgtagcttctacatcaaattagagcatctccaatcactacaagaaatgtcacttttgctagcacatttttgtgctggcaaaaggttgtattgtgctggtaaaatagaatttacttgtaatgtgttgccaaaaggggatcggcaaatcaacgttggtattagaacttatgccagcataaaatgaaaagcgctggctaaaatgacttttcccagggcgtaaatgtgctggtaaaagttagattttagccactgcacatgtacgatggtaaaactttgacc

SEQ ID NO: 122165 - DNA, 856 bp, Cannabis sativa
gcacaagtcaagaatattacaaagagtagaatttcttgtatttggccaaaaaaaagtgtccaatatagatagaatttagtttgaaatcttgtaaatattagagattatatatttagattctctagtttggagaatgctatatagtgttgtacaaattttcttagagtaatgaaaatcacctgattcatcagaaaaaaaaaaatataggaataataatttataattaatcacaatttttttagttttagtcacaagttttattgtgactaaaagtaagatttttttaaagtacgtcgtgtagtgcagacgatttgtgcagtgtgaacaatttaatgaacaaccctaatgaaaatacgtatatttatgaatgtatttaattaaattaataataacattaaataagctatgtcaattaaaaaaaatatatatatttactacagtacccctcacattattggagctgcagaaaagtcaaatttgaactgggacacacatctgtgtattagggtcagttttggcgacttacattgtcctccacataaacaggaccatcattttaataataatgtaatgagagaatattaaataattatatatctttggttgtaatattggatgaataattattttatactatatacttataattaacttaatatatagattactgttaattaactagattatctgtaattattaatagcccggtacatttgactaattttataaaaaaaactacagtaattaatcatgttctaattatatatattaatattattatatattgttcaacgccgacaatccaggatgagctcaatgtcgtccgactgcatagaaaagaattaagcaagcgaga

SEQ ID NO: 122166 - DNA, 860 bp, Cannabis sativa
attcccaacgacttcttaccaacggaatgtcctcattgatgcgcaatactgacgaaaacaggggtttttaccaataaaatttgtcctcagtaatgctcatttttcttgtagtgaatgtaggctgcagcacctaagaaatacaaatattttttttttctttctaaataagtatatatacttattatgtgaagagtgaagtagtcacaattttttaccaagaagcaccatgtatttcagatgtcagactaactatattattacgtcattcatattggtattattgttttatttttttaatctatttatttatttatatatatatagtacaatccatgtatatgatatatatataattaattaattaatttactaattaatattaatacatattatatatattcgatcatgaattgatctccgacaaatttgacccaatttttgtttgccatgatcgaacttcttctttttaccctgctaagacacctgggatttcaattataattaattttggattaattatagtatataaatatatatgtgtatatatagtcatgagatatttatacataatgggagacagacgaaacacacattaatattaataataattgacttgatatatatgtctatatatatcatagattttggcgtgtttattattactaatgtgtaaataatatgtttattaattcacaaatgtttattactaataatgcgtaaaataaaattaatcactaaaaaaaataattttttttagtgataattttttagttaaaatataattttttttaaatatacattagttacaaaaattacaatttgttgtgactaaacatatttttagtcacaatacttgttgt

SEQ ID NO: 122167 - DNA, 1961 bp, Cannabis sativa
cccaacacccagaagtgacagagtgattttttgaagttggttcacctcgaagtagagagaaaacacaatgtgagagagaagaaaaagatgaaactttgagataaaaaaaaacaagatacaaagagttgagaggagaaatctttgagagaaacaaagataaatcgattaccttctgagatgtggctagttacgatgaactctaatgtaatgttggcctgagtaataagattgactgagcaatccttgtggcgagctcgacagaggacgtaccccagaattttttgggcgaacctctataatctgtttgttcttcttaatcgtctctttactttgttgtttgtagtgctaatcattgttgattaatcttcttgcatgaatatctggagaaatattgctaagctttgtgtatttgatcatttgtttcatcgaagattgatctggaacaatgaaatcaaaagcaagattagtaaagtgatatatgtgtgtgatgttttaaactactacgtgttctattgtctgtccaacacgtgttttcgattgaaggttaaaagagttgaccttaattcttctccaattgaatattgtgagtttgtgtaggtgtgtgtgcacatgtctaaatcctacagtggtatcagagcgaacattcttggggcaacaatttaactcacaaacacaacaagtagataatcaacactgggaaaaggaaaagaagatcaagatcaccaaatcttgattattgagaactgttcaaacattcataaggatgatttcttgaaaactcttgaacctagattaaatctgttttcaaaattgatatcatgaatactatcaaggctgacattgataaatttgatggttcgggagattataggatatggaggaggaaaattggatccttggtagcccaacaaaaattactaagggtgcttgatgaccctatagaatggctagtaggaacaaccacaacccggcaagaagaacttcttgaaacagcaacaggcatcatcatattcaacttgtctaattcaataatcagactagttgaccaagaagaaacccctgctaagatctggaagaattagaagatcaattcaaacaaaaatctttgaccaataagatctttctaaaagaaagaatctttggttataagattagccactcaaagttcttggatcagaaccttgatgaattcctaaggttgtacatagagctagcaaactcaagggagaatggggctttgagtgatgaaaatcaagccatcattatcatgaattcactaccagagtcttatagagaagtcgaaactgctatagtatggtagaacctccattacactagaagaagtgatctctgcactaaagtcaaaagacttggagatgaggaatgagaaattaggaaatcacaatggggaattgaatctaagcaggggtagacctaatcaaagaaaaccatgacataatagagagaggagcaatggccagggacacaacaaaggacaacacaacagtaataaagggaaaacaagttctaaaggaaactctaacccaaatggttgttaccactgtggaaaaacaggacactatagaagagattgttatttttggaagaagagcagtaagcacaaagatggatcaagagaaagattagacaataacactagcaggtagaaagaagattttcacaataccaacctaagttatggatatgatagtggagaagtctacatgacaacaagatcactcaatggtgattggattctagactcaagttgcacttttcatacgactaacaataaatctttactgtctaattacagggaaaccaaaggtggtaaagttatcctaggcaacaaccaaacatgtgaaattgaaggagcaagaactataagcttcaagatgtttgatgggttcattattgttggaaatattttaccgggatctagatttattaccatgtatgtt

SEQ ID NO: 122168 - DNA, 897 bp, Cannabis sativa
aaaaaataagattatgatatagtgacacgccaagtgtgtcgggacacatttactcagtcacacctggggcgtcactaaaactccaaattgtagtagtgatatgtattatttatactaaatgtgaaatttaatatttttataatttttgctcggtaacgataaaaaatgcgacgaatgaccgataaagtcacatgggttactctagaacttttgttttagcagagtattcatatattgatatttggaatatctaggttaggcgaggttatgattttggaccattttatcctagacctattggttgcttaagtgtgaagtaaggggtaaaattagaattttgccatttattgatattttgtatttagtggggatttgtagattaattacacttaatctgatttttgtgtgaacaaaacaaataaggattagataatccttttattagacttatccaaaaattaagagaaaactaactttgtctctttttctctctctattcgaaccctaagaataactagtagaaaccaagtgttactttgttaattctctggggttttcaacaagatttcaagaagtgtgaacccaaaggcctccattcagcgcataattttttattaaggttgaccaacatacttgaatttggaaatgaggtaaaatcagtataaaatatatatatgtatatgtgtacgtgtattatacatgttgtttatgtgattcatatgctactaatactagtatgatagcagtgctgggtataatggtacaatatatgatatttaaatgggtatgatccagtgtgttagtgttattattttgtgacagtgtttgttctgttcaatgtctagtcgtatctggatttttagtctgttatatctgcactaacgtttgtttacgaga

SEQ ID NO: 122169 - DNA, 785 bp, Cannabis sativa
aaaaaaaaaaacaaaaaatcaaaaaaaaaaaaaaaaacaaatcaatcaaaatcattacccattaagtagggtcattaaaggaccttaatcattcaatctatttcaatttctaaatctaaacttgtctggtaggtcaataattcggataagtaacaaaatatatttcagtgaaaaatcggcttatcactttgtgctcttcttaattggagtagttcaattaagtgacatgggttgattttgttcaaattatgtaactgtttagatagtttgataaaaattggtaaaaggcgagtgatggtgcctatcttttgtatatattccgtcaactcccatcacactgagattttcttagacaatatataatgggatatgtgtacattattactaaaaaagaaaaaaaaatgaatgcattttgtaaaatatttcattgcaatcaaggtaaggtttttaaatttttatgtgtttgatttcattattttagatatattcatatttaggatgttaatcaatatacttgttagtaaatctagatcatggtaaaatattcccaatatgcgtttcattagatatgatattaacttgctctaaatgaaagtaccaaactgttaacttcaaaaattggccaattgacagcggagtcgtactaaactaagtcttgccacgtgtaacacaattagaactagaaagtaaaagaacacaaggatagttagcgggtaatggcctactccccttttagttgtattaatactgagagataatattccagatcactataggtgggatct

SEQ ID NO: 122170 - DNA, 1468 bp, Cannabis sativa
gttacactatggttggtcagtctcgggactgcaccatggctagccagtctgctccctacaagggtctggctggccaagagaagctctgtaaggttctctgtgaacttctacacgtggacaacatcatttgggctacgaattagaccctaaaagcctaatagaataacttaataatatctatgtttaagggcattttggtcttttgtaattaattaattaaatatacaaatatctagggttttaagtgtaaattagagttttaggcttcctatataaaggccttaactctaacctagaaacctaagtttagtttaagcctaatactagcctctaagctctaagcttaagtctaataactctgttcttcttcactttctctcacacgcccatacaagcactttcatcacttgagatttgccaatcttgattcatactttgtatccttaagggtgctatatcagatcccacctatagtgatctgaatagtattaaccctcaatattaatacaactaaaaggggagtaggtcatttctctcaatcacacggggtcaaacatctataagaaatctatgtgctctttacttttccaatttatttgtgtaacctgtggcaagcatcagattcatatgatcttgttgttggttgatcactttttgaggtcaacaataggaaaagacacattgtttcatttaaatgaaataaagtagcataaatctaactctaaagcccaataagcaattcaggcctagagttaaacttcagcccaagtctctattttaagcccaatctcatgtaaacctaaccctaagtgaagcctataaatagaaagagaagagagctttttcagatgatgactttctaagctaaaaaattgtaaaaatctcactttttcttgtcttttattttcaaaaattcagaggccattatttcttgaatttcttcatgaaattttgtgctccttggtgttgagagcttgcccacacatgtcaaagtaatacctagcatagtgaagaagattatgtagttcaatttccattagaagaagaatccaggtttagatcttggtcataatctgcaattgaaaggatcaatggttagagatctaaacggaaggagtcatattattctactaccatcactgtaaggattactgaatccctaatgtgtttatttatcattttttggaattttaaatttaggatgttagattatagaattataatccaacatacatgttagtatatcaagatctttgtaaaatatttccaacaaaagcatcatcaagagcataaaggctcttaacataggtcacaatcttgaaatcgtgctcatctcttgctaattgagaaactgaagacataaactgttagaataattttaccgagatctagatttattaccatgtatgttgttaaacatcctaaatatgaatatctaaaaaaatgtaaataaactcatataaagttt

SEQ ID NO: 122171 - DNA, 1007 bp, Cannabis sativa
tggacaaacttctaagatcttattagttggtgttgatgtacttcaacacaattatgcaactaatttattttctgtagcattattctaacttgtgaagtgtaatgactcaactaaatttggttggggagtttgtgtaaagtgtaaccaagtgatggggaggtgtaaaaagcattgagagattttctaagttagcagtgacccatgaatcttcattgaactcattcttacaagaaaaatcatttatgttataatgaagtaatgagattgtcttatatcatgctctccccttaaaaatgtgtattatatgcaaaaatagtggggaagactcttcccatactttttatttttacatagaaaattgttctcactttttgcaggaattcaaaacttagtggtgtattcctattaagtgctcatataggtctggaatggtggattaatggtgggttattactagtattttgatgattttgttttaaagccccatgttatgctttccttgtattaatttccattagtagtgttttctccaagaaaatggttcaccatgaatttgttaaatcagagctctttggtcttacaactcaaagctaaaaggactattttgaagtgcccaatttgcagtgctattttgcagatcaagatagaacaaggacacaatgattctagatctaaatctaatgagattaatacataaataaaacaattcaattgaggaaaagctttaagtagtttcatttgtatcattcttagggacattttaatttcaatccctaaggaaaaatatttacatggtaatggtattgacattctttgctatacaaaattgttacaaataacaatcatttttgttagtggttatgtattagcatctatctatactcatcatcatcatttatcaaacatttaagcttgaaacaagattgatgaaagcatcttcactgcagggaattgttagagcacccattggatgatcaaatccgaattcttcttcagcttgacatagc

SEQ ID NO: 122172 - DNA, 1135 bp, Cannabis sativa
  modified_base (60)..(60): a, c, t, g, unknown or other
aagatgattgtgaagaatgagacttgggagcttgtagatcgtccacaagacaaagatacnataggagtcaagtgggtctacaagacaaagctaaacgcagatggctttatccaaaagcacaaagcaagattagttgcgaaaggatactcacaacaatacggagtcgactacaacaaaacattttctccagttgcacgccttaactctattagggcttaaatagctctagctgcacagaagaaatggaagatttttcaactcgatgtgaagtcagtattccttaatggttatcttaaagaagaaatttatgtggagcaacctcaagggttcgtggcacaaggacaagaagataaagtttttagattgaaaagggctttatatagcctaaagaaagctctgcgagcctggtatagcagaattgatagctactttaccgaccaaggattcaggagaagcaaaagtgagccaacattgtacatcaagacacaaggtacgaacgttacagtaattatctctttatacattgataatctcgtctacacatgcaataatgagaagatgataaagaaggttaaagaaggcgtgatgaagagtttcaagatgactgacttgggcataatgcattactttctcgggattaaaataactcaaaaggaatatgggatcttcatctcacaaaagaagtatacggagacactattgaagaaattaaaaatggaaggatgcaaaactgtatcaactccactaaacaataataaagctctcaagaaagaagatggctcaccaaaagttgatgaatcaaaattttgaagtctaattggcagcctactatatctaactactacaagaccaaacataatgtacaagtcaagttcactatggagcaactaatgcatgatccaagtcaagttcactatggagtagctaagcgaatcctcagatacttgcaaggaataaaattctacagaatatggtacaaagttataagtaactcaaaacttgttggctacatagatagtgactggacaggatctatagacgacatgaaaagcacgtcaggatatgctttcacacttggatcaggaatattttcttgggcatcaaagaagcaagcaactgttgcacaatcatcagc

SEQ ID NO: 122173 - DNA, 2379 bp, Cannabis sativa
ttagtataaattaaagtttaacactattatataaaaatatgatatataatacaataaaatacaatacgacttaatacgatattccaaacaagcccttgaagagaaaattggaggaggagattacaattttatctacacctaattgagaacttgacgcaagtacactcgctcaaccactcatttctttttgtttctttctcttaattaggataaatagtcttcttactgttatgtttttttcttccttatttctttacatgttatttaaatataagaggtttttttagttttacattttaaaataatttttcttttatatttttatagaaatccacataaaaactctcatagtaactaattgagcaacctaaattacaaccaaaatccacatagctaacccttataaaaactagtaaagcaacccaaatcatatatattaaaaggaaaattaaaaaatcgtatataattttccaaaaatctaatacaatttgtctctattccacatatatatagatgcacgttttatgcacatttacataaaaagagtatcaaactttgtcatgatgagtgaatgagactattcaacaattcaataccattagattaggcaagtagtagtggtccaatttttattttggagtttttcatattttgggttaatattacattaaataaatatttatactactacaagcaaaaataaatatttataatatttcaaatatactattttgaaagttttttatatataaaaatacggtatgaaaatacacttcactaccatatgcaaattacataggtatgaaaataactctaagaaactaaaaaatacaactaatgtataaattaaaataaatgtgtatatatatatatattcattttcacttggttgaataactaaatataacaacaaataaaaaactgtacaacaatttattataatgtataaattaaataggcatgacagaaacccctcttttaaattgtaatcatataaaatttaaataataataataaccaatggaaaaaaaaataccttcacttaatcactcctttaaccattttttaacagtcatgcatcctcttgaggaacatatcttcttgttttcttaacattataactctcaataattaatttggtgattaatgatgctataaaatttatttgaagatttatgtagaatctagttgctctagtagagaagttaattttatctattcagcttaaatataaactaatgcacacaaacatatattattgtatattaaaatattgaatgacagtagaagttactatcacaataatagatcaccatcttttccttaaaagttatctttaatgtgactaaactatatataaaaagtaataaactgaataataagtaaaagaaaaacaaataaactaatttgttaactttgatgtttctttttttttaacaatttcaatatcaccaacaccacataattaacatcgaatagcatcgatatataatatagaaattgtataaagatattagaatataaaaatgaataattaaataaaaaatttaaatataaaaaagttaatatttttttttttttgctaagtaaaaaagttaataattgcataaatacctgagagtattgtgttatcatcaacatgtaaattaaccaaattaagagactttcatattttataaactctaatctttattttctaactatctatattactatttaattcggtaaggaaagaatattagataaataaaattaaagaaagttaatgtaataaattgaattatgaaactaatagaaatagtttgatatatatattgagagagtttatgaattgtttaattttataatactatacatttatttagaaatagagtttaggaatataatttatatataatagagttttaagtataaatgatacatagagagagaattagaggagaagattgcaattttatctacaccaaattgagaatttttttttttttttttttgagggcaccaaaatgagaacttgatgcaagcacaatcgctcaaccactcatttttttttttgtttctttctcttaaataggataaatagtcttctcacgtttatgtttttttctttcttatttctttacatgttatttaaatataggagtatttttatttttttattttaaaataatttttcttttatatttttatagaaattcacataaaaactctcatagtaactaattgagcaaacccatataaaaactaccgaaacaactcaaactttaaattaaaaagaaaattaaaaaatagtatataatttctcaaaaatctaatacaactggtccctattccacatatctttatatattaaaagtgcctatttaacggcatttcttg

SEQ ID NO: 122174 - DNA, 1124 bp, Cannabis sativa
  modified_base (39)..(41): a, c, t, g, unknown or other
  modified_base (146)..(148): a, c, t, g, unknown or other
  modified_base (434)..(442): a, c, t, g, unknown or other
aacgttcgtacgataatactattgaccataatatcagcnnntactcggtacgctagtcatactctggtcataccgatgtgatactgccaagtagtacagtactatcggccataatattagcttatactcagtacgctagtcatacnnnagtcgtaccgatgtgatactgtcagatagtacttaagccatcatacatttatcgatatccaatataatactaaatatattgataccgctattataatataatttaacaggcttaactaacatgtacgctaaacatgtaaacacatatactgtatatcattataataatcttacctcgtttccgaattcaggtgtgacgaccaacttgagtggaacaactgctcgatgatttataggcccctaaatcacattattcgtaaaactaatgagtgacacgctaaatcacnnnnnnnnnacttaaacttgaaactaaaaattttcctatcgatggataacatgacaataccctaaatattacaaaaagcggaaaaactaggatttcctaaaatgtcccaactagtaaatcggttccccaactggaattcaagttctgtagggttttttggggaccaaccgaaatcccggttcagtgcataaactgcaaaaaacctcaccataacctcaaatcgaccccaaatgcaactaaactttccagagtacctaattacactataatgaagagaattcatgcaataaaaactagaaacaacccctgaaactcaattcaccattaaagaccaaaatttgagctctaaagctcaaaccttgtccaaacacaaaaaccaagccattgaataacaccaaaacaactcaaaaaccttcaattaaattacagaatgccttaacacaaacaaacactaactacaataacctagaactcaaaacatacataaaacacaacatggaacataagaaatcaaagagggaaagctaagggaggtataccttagatcaacataataaaattttgctagaaattgttgtattgcgttgcctaatcaggcaagtccgtgccatagcctggcaccgtttatcgcataattgcatcacctaatcaggtgagcccgtgccaaaaacatgcactcatatatcatata

SEQ ID NO: 122175 - DNA, 698 bp, Cannabis sativa
taatttgtatggatataatcttcttaaaccataaaaatattgatgataatgtgtcgtttaattctatattccatcaagttttgttgatgcgaatatcatatcattaacaccatattagtaagtaattgtttcaaaaaaatgaacaaaatatatataaaaaaaaaatacatgttcaataattgttataaattagaagaagaaaaaaaaatagggaacaaaacactataaggattaagaaaaaacctattagttccaaaaaaaaaaaaatgaatttttgtttttcgaactttgacatatacaaaaaattgtacctccaacctttaagtctgttgaaatcccaaattaatgaaattgttgaatttaagaattttcatctaattttactaacagaaaattgattcaagaacttatttgatatatgtcaaataagatcgagatttatatcaaataagttcgggaaatatatgaacattattttacattagaaaaaaattaggaagagtttcaattaatgaattagagagttgaaagtagaatatccagtttgtcttagattataaattctaaatcaaccgcacacataaatataaaaattattgctaattaattaagcacttaacaattattttacaaaaatttttacttttagtcacaataaaagttgtgattaaaaggaaaaaaattgtgattaattataa

SEQ ID NO: 122176 - DNA, 746 bp, Cannabis sativa
ttcgaactatacaaatataccaagctgtccttgatgacttgtaactaaatggtcctgtccttctaagatctatttgcattaaaggagtttccttctttgtcgtgtctaccaagctgttgttaattaataaattttagccttttctattaacaaaatttataaaaacaaaatctaagtgaaaacttggaaacgactaaaaaagaggaagcttaagttatatttataatcagatgacataacttgtaaaagagaagaaaaggacaaatgataactatttcagcactgccaaattgcccatgccatacatatgtcttcttaatatggtgtgattaaattttttcaaaaatatatatttaatttaaatgattagtaatatttatttctatgttttttttttcacatatttatgtcaattaggtatttttttttaacttttgtgaagagttgtattagaattactattatctaattattaatttaaataataataataaaaattaaatttaatataaaattatattttttaaatatattaaaattaatttaattttaaatttatttataaaaaatatatttaactaactttattaaataataaaataagtaaataaatctaaatattttgaataatataactaataaaattgttaattaaatatgattaatcaattgaattaacgtctaatttaaattaaaattaaaattaataaaaaaatattattttttttcaaatgttgcattggaat

SEQ ID NO: 122177 - DNA, 931 bp, Cannabis sativa
tggaggcttgaagcggggacgttacaaaaactatcttgcatgacaacgttgatatgatctttagccattaagcaaatctatcattcactctttagttaccaactcataagtcacgacaactatttgttgaaactttatatactatctaaaaattgaaataatatgttatttaactcctaatacaaataaaaattaaatattattagtaataggaatacagaaagaatgttataataataataataataataataataatggaatcaaacttatgagaatgaaaagacattcataaacaagaagttatgtgaatgaataatataggtacacaataatgatggaataataattatgagaatgaataggcactcataaaaatatagtatagtaattatttgtaattattagtaattatttatttaaggataaaaatataaataaaaataaataaatcttaaaaaaatcataaaatagaaaaataacaatattaaaataataaaatatcatgttacctatcccaacataattatagagatatcatatcatttactctaacaacacaattatataaaaaaatatatatatagattgattttttgtatatatatacatattgatttgttgtaagtctacctatacatgaaaaagaaaaaatatgtataccttcaattgaaatagatgaattttataactatttttctttgataagaagaagggtagggtttttaacgtaaaacctaaaactatttttttaaaaaaataaaattaaaactaattaaatatgaaatgaaagaggccaagaaatttattttttaatggagttatgagaatgaaaagttactaaatttctttaattaaataatactaaaaattaacaaaattttttttaaaaaaaatgtgtaaagtccttttttggcaagttaggtgacaa

SEQ ID NO: 122178 - DNA, 2224 bp, Cannabis sativa
gagtatgtggagccttcttccatcttctccgggagttatcttctcgttgacactcctgtcgccaaagacttagtcgatttctttaagagttgagcctctcagctccatgtgtcgtcattacactagtccacgtattttggacaaaatcaagggcaacaattagtttaacaactaagaggttgagagtaactaagaggttgagagttcaaatcccaatagcctcacttttacaccccaatttttatttttacctgagacccaagggccggccctgaacatgtggcccaatgatatatcaccagtatttaataggctgacttggtatttacagtcaaaagagtatgtttacaacaaaacattaatgtatttttacaattttttttattagagctatatgtgtaacaattaaaaatgataagggtttttgccgcaaatatcccgctaaaacaatactcattaattttgccataccaaaaaagtgaaggacaaatccaataattattctaaactatttgtttaaactaaattataagtaaaacatattattaaattttaattttactttcgaaaaataaatgtatatatattctgaaagatttgtacatacatacacatgaaacttatatacaaacaaaaatagtctgaatttttgactttttcgttttgggaaaccattgcatgttcactataatggcaatgttttttcaccccttgtttttggttgctcttattgctatcttgcttaataataataatgttaactgatcgacaagagacttattattatgccatgtataatatcactattaattcaatttgtttttaattctaagattgttttttcaccagtatacattatgttttatataatgtatatatcatcaattaattaattaatgactgatgatcacttattaaaacaaactaatccgtttgatcatctgacatataattgatcttatagccctgaggtaatgagggcctataaggcacatgcctaagaacatggtaaatcttataagcacatgctatgcaaattataaattttattgggcccataaaatttttgataattaatgataatcatgacattaaatatcgttttgatattgtcgaattattttatgtttcttcatcaaagacatgtttttgtccaatcgtattaatttcgttttgtttttctaagacaacaaactgctattcattagtaagaacatataaaatgttacattattttcaaacatataataaatacagtatatatgttgattttgcagataattgattctgttggatacctaatatatatctgcattaaatcctaattagatttatgttcattgattttaggcaaaagcttaatcattatatttaattctcacttttaaagtaaacattaatatatatttaattctcatcactacgacatgaagaatcttgatttggcagctgtggaacccaaactaacccatacatgctctttttcccccttcactaattgtttaacatatttagtttttagtttctattaattatggaataagcatatataattctatatgtataatctttaattttacgagaagtggataaaaacgtcaatcatttacacattaataaaacacattgttatatttcgagacaagattgtattcggcgtttgattcatattccaatcatttaggatttttttgtttctaaaaaaatattacgtatttattatagcttataatgttaaactatattttataatattttcaggtgaaagccataaagattcagatctcaatatttttaaatatattgctgtataggtaagtattttggttgatcaaaaaccatttgtagttttattcaaaaaaaaaaaaaaaaaaaccatttatagtttatagtatataagctatagttttcttttatctttatattgattttgtataataacatgcttcaactttttttttttgaaagatcatatatatgcttgaactcaaaagtgacaaatatatatatatatatatatatatatatacaatatatttttttttttataattaactattacaaagaaaatagcaggcatgaatgagatcacaatctaacgttccaaatataaaattacttatttatatataaatatttttatttgattttttttagtgtagggtgtggcgtgctgccccatgacacacccacaatagggccattttgtaacatgagcatgcct

SEQ ID NO: 122179 - DNA, 611 bp, Cannabis sativa
  modified_base (541)..(560): a, c, t, g, unknown or other
ctggtaaaatatatccaacatttagagattcaatacaacactatttttctccattaatattttaaatttctcttaagcttttcatcttcaccaatttgcatttgattttctaacttaagtttagttgacgagtttttaccctccatagttgctaaattgatttcaaagaaatgtttctgttgagctctttcttctcttcaagtgatcaaagcaaggtagaattgttgttactttgaccacttgagagccatcttaactcccctcggataactcaacattcagttggttgattctgttattaaccaactatcttcagttggttaattttgttactaaccaactgtcacagacagagtactataaatacccttggctctgaaccatacaatctagagagagagttcgaaattcattgttagagaaagaatcaactaggatcaccattgttcagttactgtttcggcttagtgttttggagatgttgaccatggttttaagtagtaattagagtggtataaagtagggttgttcatccgatccnnnnnnnnnnnnnnnnnnnnaacaacatccaatccgcactaagtgcggatttcattttttggatccaatcc

SEQ ID NO: 122180 - DNA, 649 bp, Cannabis sativa
cattgttattacttaggtcaattagcatttttgcctataaattttaacatgtgttaaataaactctaaatttatatggtggttaaattattttaaagaaagtctagataaaaattgagagattttaataatcgttaaaattagagtggcatgatttatttagtacatattaaagtctaaagagcatgatttagtatatatataatcgagaattagtaaaatataatgaaattggacaaacgtacttaaatccaacaatttcaataattcagaaaaattttttaataaagaaaaaagttcagaaattatgatttggtaaatattaaatttcgagtgataaaaattctaattaacttattacttattagtaagtgatgtaaatatcacatcacgaaatgagggttccaactcatacacgaaaaaaaatagaaaaatttaagctgtgttacaatattaaaaaaagaaatttattaaaagatattatttatgtctaacatattttttggtgtcatgttactatacaatttaaaaaataatttttaaagaatattactgacaaattctaaaatatcatttatagaaagtaataactattaagtactactagtagtttttttttttttttttattttctttatattttttttatt

SEQ ID NO: 122181 - DNA, 1352 bp, Cannabis sativa
aaaaataaaagtagctcatcgcctcgttcgacacataaataaataaattttattgaatgacaatgacaaaacaattattaccatatacaataataataacaataattttgttcaactagttaaaaattcaattatataataaaatcaagatagtccgaccactaatcaaaattaacatatgtccgaccaattttttttattaatagcttttgttagaactaagtttggaatacaattaggatagtctgtctcaccactaaatagaattaattgatattgtaatgacatatcatatttaatttaggttatcttatatactattttttaatttttttatatttaattttacaatttgagtttctcagatggtttctctgataataatttctaaatggttgttgctactatacggattttgattgtgatttaagttgctccgttagttgcaatagaagtttctatataaaattctataaaagaataaaaaaaattattttaaagtataaaaataaaaaatccttttaattaaagtgtgaggtactaccaaggtcgggacagagacataggctaaaggaagtatgaggagaccaaaatgttaaaaaaaaaattaaggggttcattaaataaatttgtaaagaaaaaaattataatttataactaatttttttccaacaaaaaaaaagaaaattacgggtgactggccccataatccaaagtcagggttgatgtgagtgtcatttgtcgggtttgcaatctgagtgctaaaaccatggtccattcttgttgtcttgtcctgttgctgcggccgtatgggatcgagtgggcataggcacggtaatgcagcaagaggaatgataaagtttggcaaaacaagtttgtgggggtggaaagcattgtgaaatctacaacaaactaccttattcagtggtgtgttgctcaaaatttaaatgagttgtcgttcactggttacataccagggatggggctgtgcaatggattgctccaagtgttaatagtattaagttcattgtcgatgtggctatgtttaacgaaacctctaattatggtgttggttttgtggctagagactctagcggtttctttgtggaaggcgacactaaactctttcatggctcaatttctcctgtggtggccgaagctattggggtccgggaggtattgagttggatcaaaaaccattcgtggcttcatgtgacattggaaacagactatctctcagtggttcaagctattcgtagctctacggttatactttctatatttggcaaagttattagtgattgtaagagcttgttatatactttgcgtaatgtttcttttcattttgtaaa

SEQ ID NO: 122182 - DNA, 1284 bp, Cannabis sativa
tgtgtaaaattttgaaataattttttttttaataaaaagtaaccaattgatatcttattcacatcaaaagcaactaaaaggttgcttttttcaaaactccttaaaagcgaaaatttctggaaacgagatttttccagtttttttccattttcggtaattattttaaattctggtatgtatgctgacgttggcacaatgttatttgtataaataattttcttaaagatatttttataaataaaattacttttaggtataatattgaaaaaccccctaaattatatgggactcgatacttagttagaccaataacgatattaatacataggagagtactaaacaccgctgatgctcttcagtatttctatctctcaaattaactttagtggaaaaaagtaacatacactattgtatattgctagtatattgcaacttggaaatagatactttaaaacaaataaataattgtcctcaatataagtgacaaaaaagtaaggctgctttaataataataatgcgctccaatgtacatataggtacatatataggtagcctataattacttaagatacttaaactagggttattgggatgtgatggtcttctcaaccaaggccagtcaataaaaaagaaatattcctataatatattttgtgggcaatctaatctatgaatgagaatctatagaagaagaagaaaaataaatggtgttcccatgtgcctgtcatattcactaaaaaattatgtatattttaacttagacttctctattgtgacaataatttttgttattaaaagaaataaaataagaacaactttctatgaataaatattgctactccaaacagaaactacttctaccacttctttcataccaagttgatccaacccaacatttacttctattaatttgacaacaaaatataaaataatatctatgttgtattaaatttggaatagaatatttgtcaaacatttataaaataaaaataaaaattaggaatagaatacgtaagtggtgacatgaaattgaaaatgaaagagagagtgagtgagtgaatctgtgaaatagaaaagagaagaatttttttcttttattcttattttttattggtaaaagttgtttttttttttacaaagaatgaatatttttattgacaataatcaaagttgagtacattaaaatggtggagaaaaatcaaacttaactagtttatcatcctttttaatgggcattacttataaaaggctaatattagaaaattttgaattttaagtttaatt

SEQ ID NO: 122183 - DNA, 1561 bp, Cannabis sativa
  modified_base (30)..(48): a, c, t, g, unknown or other
tagttcaggaggcatttttaacgaccttannnnnnnnnnnnnnnnnnnttggtacatgtcaaagttcacggggcaaaaatcctaattagtattattattattattattatgaaaaaaaaaatcttttagagagaaactgccattataaattaatgaaaaagttcatttacaacaacagaatgatttagttaaaccatacgacgtttcattagtagaacgacatacataactcaaagaaactctaggaaagaaggacgactaataaataatatctcaaattaaattgtggaagcggttataatgcttttgttagacattgacactttgtgagacaacaagagcatgcgtttcaataaggtgaataacacaaatagaatgatgcaactattttaactaaaaagaaatggcttgggtttcaatctctttgacttgaaaacaaccccgaattggcttataaatggcagccacaacattaccacaagagtctttaacaataccaccaattcccataatcccgttagttgagtcaagggtagcatcaaccttaagtttcaattgtcccgaaggaggctaccaagcttgataaatttttgagggagaataagagctcctttgttgccgactggtatgagaccgaaattcaacaagaaagttgagagcattttcaaagatgattgaaggtggatgggttcgcttaccatagatattattattgcgatcataccataaataccacatgaggcaaatgatagtttccatttgagaattatcatagttatgaaagagagagagagaatgcacaaaatcactaccacagcaggaagatacagcagcaaaatcaagtcgaaagggtgatttaatgtctcgttgtgataattgcacttagagcatttcaaatctagaatgatatgcctcctgtaaagattcaaaaccaaaggtaaagcattatgtatcacatgccaaacaaatatcttaatttttcaggacagattgagatgccaaaaataagaccatcaggctgaattcaaactcaaagaagaaggtgactttttatccctgatttttgtagccaagtgattgcccgatttcatattgtaacaaccatgaggagattgctgccaaataaatttatcaacttgagcatataaactcaggagaatgttcaagatacgctcaacattataggggcagaaatgccgatgtagagcaacacagtcccacgaacaatcacgagtaatcaagtctgagactttatgatcatgactaccggtaggatagaaaacaggtttaaaattagttgtacctggaagccaaggatctgaagcacaagagatggaggaacccgtgccaactttctaacaaagaccttcaaccaaaagatctctaccctaaaagatattgcgacaagtatacgaaagattgtgacccaatttggcttgtaggaatgctgagtggcaaaagtagcgatgatagagagtacgataaagaagagaatcagtgttattgttacgaaattttgtaaatagtacacaagtgcacgtaatcaagtagtaactcacac

SEQ ID NO: 122184 - DNA, 920 bp, Cannabis sativa
aagatatcataaacttattgttacatctttttaagtcaatatcacttagttgatcttagatcaataatctcaatcctgagatggttaggttgtagttcagctatattatttgtgttccttgacttgttcgttaaaattgaccaattggatctttccaatacttacatcttgggaacatggtagtagaattgagtgggagcactaatcatagatacggaatctatggcttctataaatgaatagaagtaaaaagatgattttcttggagcttggataaatgagattaaatgatggagtactcaattaagtaattatattaatttactaaaatatcatttaaaaggagctaagtgttttaaggataaaatgcattgaagggtagaacaggttatttgtccctacttgatgtagatcattatttcccgcgatttttaaaaataaaataaaaacaataagagttgaagaaacaataattgatagaaaaaataggcatgctggtttttacgtggttcaggcgttaacaagccctagtccacgagtcagttttattcggtagtgtattacttataataatctcaaaagtacacagggtgtatgttcctatattttcctgagcaaaagtacgtaagagaattcaacctttaatttatgagattagttggatatttatagtggttggagaagtacattagggtttttccttttcactctattggggagtttacaactgaacaatgtccatgggcttactcatgaagtcatgcccatgaaggatacaatttgctgacaaggcaaatcgggcttgagttgatcttgtcaaaaccatatgtaatcttaatggtaggatattctgaaataactaccctgcacttgttatgggaagtttcctctttaatcgtgatatcatattatgacctaat

SEQ ID NO: 122185 - DNA, 918 bp, Cannabis sativa
tataaaacttatacagtatttttaaaaaaaattccgcctacaatataaaagaaaaaattaaaaaatttaatatataatgtaattatccttttttaaaaagatcgtatttaaattttattttttaaaaatattattaaacaagtcctattcagctcaaatatatacttataatacatgaatcatgatataacaacccacgatgctgaatggcgacccgtagataccccatagcataaccgaacatagtgaatatttgttggtttcttcgtttcatcattgaagaaattaataaacacacaatgttgtttctttttcctttttctttatctctgcaatataggaccctctgccaaagcaaaattgaattttagtttatttatttatttattttgaaaaagtatttgggtttatttagtaccattaaagtctcttatacttcttttcaaaaaaaaaaaaaaagtcttaaaattaatatcatttgatgggtttggtttgagtttaatgtacaaatttagtatagaagatcgttagggttgtataacgtgtcgaaaccctctccatgcatatcgacaattgtaaattgcacgaacaacaccttcattcatatcaaaataataataataacaacgaacaacacgtaccaccaccagaaaaaatcaaacggcttttattttttttcttcctcatttttgtttttaagagttttatttacattttaaaaattaaaacacttatttattattttttactttttataaaatgtataatttaatttttatataattttattttattttctttcctctcatatttttttttataaggctcttttcttatattctaatgagtaaattgcggcataaatacgtaatgtttctgattttatacacttaaatacctaatgtttattttttgtgg

SEQ ID NO: 122186 - DNA, 1118 bp, Cannabis sativa
aagaaatattataaacactgtacatgtagtcttaatattttttaagtctaaaaatttacgacacacaatctttaaaaatatcgaaattacaaatattaaatggtagaaaaattttgattcctcgatttgttttagctaagactcaaagctcccacctagaaaaaacaatggtaatttatgaattttttggggtgggatagttttattagacttttttttttttgaaaaggtaatttgattcaatttagattgtcagatgcttatttttatattattgttattaaaatcgaaatttgataattaacaagtactcatttattattaaggtctcctctgattggatcatatatatatataaatattagaatattgtaaaaaacgtgtaatcgtgttccactcgccgagagagagcgtgagtcaacattatattcaaaaacattgtgatcgcagcactggcgccgcaattaaagagcgtgtattgctcgcgtgcccgctcacgtgacatgttggctcccaacccgcgccgttaccagcgccgtaaccgaaccacggtccatcagaccatatatataaataaaatattaactacggttaccgttaagttctcgtttcgtttctctctctcttcagtctttgtcattccacgtcggtagctttaaaagttgcggttgtgcatttatgacagccttgcatagatagattagataagacaacctcaaccgttcgatatctaatcatgatgtcaagaaccaactttttcatcatctttctcttacttaatccaacggatgtgattctccatcaccgtctttttttgacctttgtaccaaaacaagaaaatttgtacataatatggcactcccccaaaaataagactttgagtagaagtgactagaagtctttgtggctctaaaaaagcttctttttttttttctttttaaaaaaaaaaaactcagaaaacactaactattttataagaaattaaactctgatgcatacgaattatttttataattttatgtttaaaagcacacttaaataaataaaaattaaattaaaacaaacaaatcaagaactaaaacccaacagacacattaaactagaaaaataacacaaat

SEQ ID NO: 122187 - DNA, 2771 bp, Cannabis sativa
tctctacctctcaatcttttttttttctctctaactcttaatctaaatttgaatcatgttctgaagatgacaagccaaggtggtatttataggcttaggatcaagatcctaaagtcggtggctgcaagaattgaagttgttaagttagttagataagaactaacttaaccaactctcctatgagcgagatctccacgttagcataagtcttagtgcatttaggaacatatacgtgcttccgggatcatggaccaaagacactcactgaagaagcttctgaataggatagaaccaactggagtcgactatccggtactgccttccaaggagaataaccttccaggagaaataactagatgttcagaattcctttctggaggagggctagctatcttgaagactaaacccggactggacatgatagttatccaggaactcccttccggactcaactatcattccacaagactctttccaggatggataagttagctatccaggaacaacatccgagagacacttaactttccaggaacaatttttggagacctttttatttggaggaactataccatagttttgtcatattttctttttgttgtgatttttttttttcatgaattataaaaattgttgcatatattattttttagttgtattatatttattttttaaacaatttattgatatagcactttaatttcccatactttaagagtccaaataaaaataaatacataaataacagtcaaatgataaattatgagaatatatatttaaattgttataggggtgcacatttatacccgaaacctacccggtctaaaaccagaaaaacttggaaaaaaatggatttcaattttagttgacctagttcaggtgtaacctggttttgtaccggtccgggttcaggtgtaatattttgaaaatccaaaactcgaaaactagttagtaatttttttatattttttttttgtatatatactatatatattatatatatatatgtctttttttaattatgaatttgtgagtgtgtgttaaattgttaatgtgttaatttatgtaatatgtatatataataatatactgtataattatattattttgtagttgttttttttggttaaaatattgatattaaaaaaagcagagcctaactcgaaatctgacccaattcgccccacccggacttgaaacccaaaaaacccagtctccattcgagcgggttcaaggggagaaattgataattgcctctttttattatacattcaccaaaaatagtgcaaaataatttaattgaaatataccatgttttataattgaactgcctaatataccctcactataaggcatgttgtttatctaacaaggtatgttgtttatctagtaaaatatgtattttgtcgtattttaggcacgctatttacctaataaggcgtgtcgtttactttattttagggtagtaatttttgtttgttttatttaaggcatgttatttaccttactttaggtacgttgtttaccttattttaagacacacttacctaattgcatgtcgtttacctaaattaatgtattttatttacctaataaaatatgttatttaccttattatagggcagtaattttgtttaccttatttaaggcatgtcgtttaccttattttaggcatgttatttaccttattttaaggtacgttgtttacctaatattacatgtcgtttacctaaattaagacatgttatttacctaataaaacatgtcgtttacctaatttaaagcatattatttatctaaaataagtctatgacacatataaaatgattctttaattgttaagatgactgacatagatgctataataaaaattgttaattaattaattaatttggagaatagcaatgaaaaaaatacttaaattacaaattatttttcattaaattttttttatgattgataagaccaacgtaaatgatatagtaaacatggtttcttcttaatttatttcgtatattataaacattgtagttaaaattacaagtctaaccatgcatgcatgtaaatgcaattgtagtagaaaatagttaataagaagagtacaaaaatatcttaaattattagagaaaataaaaataaaaaaagtgagaaaagcacaaaagagattaagaggggaacactagtacaatgtttgaaaaaagatatagaaatgatagactttaaaagatagagtaaaattaaaagagggcaatataaaaaaagtatagagtttaatttgcttcgggttcaatcccaagattccaaaacctgaactcgaaaactcaacccaatgtgcacctctatattcttagaattaatgtttgtatatttaatttcaacaaattgaatttgaagtagattaaggttgttaaaaaccctttgtactacaacactatatgactatgagtatatgtgactcataaccacataagtaaattataataatttttacagttgttatttttgtaataaaaaaagtgcatgagacaataatatacgtaaatcatagttaagaaaaaaaaaagttacatttattttatttttttatttaataattgtagtggtcaaaaattgttctaagcccaacgaaaaaggcccaacgatcgaattacttacgaagtccacttataagtcagaaacaaggaacccgtaagcccaatggctcacatgggccacgcccaatccatgccttttgggtcatacccatattcgaatgtccaacccacaataaa

SEQ ID NO: 122188 - DNA, 845 bp, Cannabis sativa
  modified_base (801)..(819): a, c, t, g, unknown or other
tttaattaatagcaacactttattattttaaaacagttctctgccctacgctattgatagatttttttttattattattctaagaagaaaagaaaatgaaatttcacatggaataatttaatattatgtatttgctgtcatagcccatgtgaattgaatagaattaattaaatattaaatgctaaattattggtatattttatggattaatgaatcacccctaagcatttattttattttatttatgggagaaatttattttatatttactataaaataaagagttttggaaattaaatatatacaccttttatttaaaaataaaaaaaatgtttatgttttttatattctagcaaaatggccaaaataactaatatgcatgcatattgatatgatatttttttattataataaataattcagttaatgttatttttttaacttgaatttaatttggcctaagggtttatccaatgaaactataaaattataaaaatagtggagttttaacacaatattatactaactgagtactaaatattaatctatatgtgagactttataatttcacactaataatagtgagacagtagaaatcacgacaattattattattattattatttaataatttattaatcactttatataaaaaataaataattaaataatttatttataatcaaaacttatattatatttataaaataaaataataataaagaatatacattttagtgttgtgattggaatgtaaaaaaaataggatgcgtttggaataggggtgttcatccgatccannnnnnnnnnnnnnnnnnnaacaacatccaatccgcactaagtgc

SEQ ID NO: 122189 - DNA, 650 bp, Cannabis sativa
cctgacactcatctaatgtaccctaagacccatcttaatgtaccacggaatacattctgtgaaagtacatcacgggacaaaatcgtgtccctatatattatatatggggactagtaagttaaaaattgagtattttacttattgataggtataacaatttttaaccattgatctaatcaaatggttcaaagtaaactttgaaaacaataaagtaattaatattttttttataattcattttaaaccctatttattatgttcaagtaataaaaatttcaaacttaatttttattttatttacttatttagttttatgagtaactaaaattttatttttctatttaattttaaatatataagataatatttttttatatgattttcttttccaaaataataattatacctaaaaaatacgatatttattaacttatgtttatctatataattttataataaccaatacaaataataaaataattataatataattggtaagtactcttattttaatgatgaaagtgcatgggttcaatacttggcaataacatattttcttttaatttctttataagtaagtaattgttataaaataatataaaataatatacagtagatgagaagaaagaagaagatgaagagagaaagag

SEQ ID NO: 122190 - DNA, 2059 bp, Cannabis sativa
agtataaataatccatcttctttgattgagcactttgccaatgattaagaaccacgcttgctgacaatataacctctgcagtagaagtaattttttgcttccaaatcacctcgtttcgagccttctaaaccgcccaagccaccatagctaattcctcacgcacactcacagtatgatgttgcagcacatttgaaacttcaaagcaatcacagtctccaacactctacctgcttcaacaagcacgaacaaacgaacagatcactaaactatgtagaatagtttcggcctcatcatgataggcatggcgcaaactatcaactgacacatgttttgacatcaactgtattttggtaggtaaacaactagtaagagccctccatagaaaatgacactctttaggaggaatatgtaaactccacacaattctctctacgcgtcagaatccacattagctaccactaacacaataaatggttgaagagacttgtaaacttgtttaacaatatataaatcgacgacatcatgactccggtaccaaccatcactatgaatagagttgtcaaactgaatactcgaaattaaatcatggtcccttagattaaaattatcaccaacgagatccacatcccattctcgatgacccacaaccataagattatctacagtacaattatccaaaccagttaactaagaagtcacatatggtagcttcaagtctggaatccaaggattacgaagaacgttaatagaagtacctggcccaactgagggtcgagctccttctcgcaccaaagattgagctttaaaaatattcttccaaataaaacttggattctccctcaaagacggataagagctacgagaataatagcagactttataaatacaacttactagtgaggtctcatcagaaactaatctctaaacttgttttcccaacatagaaagattatactctcgcaggtgacgaaagcctaacccactataggttttatgagatcacaacttcaaccaattcatctaattcatcccacgtttcttagcataatgagatttccaccaatatttactcatcataccttctagtttattacaaatatcaatcgataacaagaagatagacattgcataagtagggcgagcttaacactgtcttcaactatacctctttggaagccttaagagttcgtttagtacattgtattacactgtattgtataatatgagaatgacaatctttaagagttcgtttagtacattgtattacgatgtattatatggtataatattatattgaattgtattctaaatcatattttaatgtaaatactaaactatatgttgtattgatgaaaatttaacatagtatgttatacaatataatataataccacctgatacaatgcaccaaatgaaccgtaatatgcttatacttggtatgaatattttgtatttaattttataagtttcgaactttaaaaatattgctgtgaaaataataaatttacatcatgagaatcttttgttaaaattttaaacattctcattcataataatattagtagctttaatttataggatttttgtgtttaatgtaatttaattaatatgaactaattaaatatttgcatgcacaatcaaatacttacaagtttctaaaagattaagacctatattcgggtagattcataggtatggtaataattcagaaaacttggttaagtaaggggcaaaagaaatagactacttttctttaaagaagttttaagggtaatgacttccattaattgaattttttcttttaaaaaatatattaaatgataattttgttcgttgaaatatatcttataaaaaactattctatgttatattttaattaaaaagagtaatttggacaatttaagcgttctgaatttctgattaagttttttttatttataaaataaataaaataaatcatcgtgattccctttttaaataattttaataaataacatattacaaatattaattttgattttttttttcatttattttgatacatttctctattaatttt

SEQ ID NO: 122191 - DNA, 1027 bp, Cannabis sativa
tcatagattcaggacaaagagctcctctgttcccagttgccatatttctcgtgtcaaaacagcttcttccgatgatcctgccttaatccaaactccataaagttggacagcttcaccaatggggggaaacgcaagttccttttgtctccagcattctttttcttcatggaacaagtaaccacagttaaagcataagagaggaattttacaatacttgaactgcacccactcctttcttcccctattgatgcttaggtgaaatcccgccggtatcctctgggttaaatcaatctccaccatcagtttcagatactccctccgggctatgattctagggtcagatttgtcgaacttcacataggttccaaccttggctccaatcaccggagcgttctgtaccgcaagatagggcgttgggaggccatgaatttcaacccaaaccctcgccaagttcatatccactccttgccaccttccacactccggccattctttaagatttgacctcccaaaatccatggtctccgttcaaaaacctgcttcaagtcctcctcatgttcaaagaagataccccatagtcccggttcaagagtttccatccaccatttccctcgtagcacccatataccgttcaagatttgcttaactctgttctttggcaatggtagctttccgaagcacttagccagtgctacttttctccctacttcctctgaaatatccagttcagaaatcagctccaaagtcgattctttcaggaacttttgtctcatcaaagccattttttcctcagcgcttccttccatcaaggcagtaccctttcccgtcacaatcgacgaactctcagtcatattacttgggtccccttcagccctctccatactcgtcccttctcctcgattcttagtatcctttgtcattctcactcacacaaaacctttcagacacacacaaaggcaaagacccactgtcaatattggctcagccaaaaatttaatttaatatttgtaaaatcaaacttagatgg

SEQ ID NO: 122192 - DNA, 982 bp, Cannabis sativa
  modified_base (937)..(942): a, c, t, g, unknown or other
tggtaaaataatttccaacattcgcttggtaagcccttgaaaatagtggcaatatgatctcaataagatagaacctctccaactgaggctaaaatatctatgcgttgcttgacttatagaagatggtcattgaggttcagtgtccctttttttagcttctgaagtttggttctaaactcgagatcttagatgaaactttcagattatagtgttgttcaagagctttccagatttgtctcgcgaaattgcatcccaccattcgagtcaataagctttcagacattgaaaataggagccaagacatgagaagttgatcttgaacttcccaattcagaaactcgagatttaaatttagtgcagctttgtctgcatcactgaagaactgaggaggaggtggaagatcttgatgaatctttgtaatctatttccacgaatggccgcaaggatctgttgtttccatagaagataattgtaatcattaagcgtgatcgagatcgtgtgattgaagtagacagtcacatcttcttgatctttagttcgatttcttggagctggaattgaagctccttattgagcagcttgagagcttgagttttcaggaccaatggtggccatgttctccattaatggcggccatggctctgatacaatgtgagagggactcaacctcttagccattgaaaccgaaaaggaaaaatagagcaaagaagagagaaagagaagaaaagagaaagaaagaaagaggagagaaagaagcctctattattgattaagttacaggtttgatatatacatgacaatcaagagtaactaacacctaaaagactcaaccaactagagacagttggcagctaaccaaacctaacaactaacgattttaacaaactcctaacaacatgtcttgatagtactcgactgtaaagaccgcttagtttannnnnnaaattagcagttaattaagatttaattatgaaaattattt

SEQ ID NO: 122193 - DNA, 1062 bp, Cannabis sativa
gaatcagcgagtgagtactccgtcgagcctccatcgtgtaaggggcctgggccagatgtatctccctcggaatccgcacctggactagactgctgtttggaactgagcttctcgacaacggatttgcactcgtgagcaagcttggcatgcttgcgccatgatgcgttcttgatgatgcggtctagggctggggacaccacctggctcagacgggaatcgacttccgaagaagccattccctaaatccttacgagtcgcgattcagtaactcggatctagaactcagaattcaaaaggtccaatactcggtgagcgacttccttggaggaaatagagtttctaactcggggttgatcggagcgagttgactcagtggctggttgccccgttttgaaacgcattagggagagagtggtgggttcgagggagagtcacagaacggactgggaggactcaagatttagatcgacttgttccgaagaatggatttcttttctttttcctaattagttttttaacaatagtctgtatgtagcattattaaaagtcataattaccctttttgtctttcttgtcaaaatcaaataaatagaagaatgagaaatattagtatgggtattttcggtgtttggcgtttggagatctcttactgtattttaaattggtttacttttttcccttttattttagatattacataatcgatagagtgataaataagtttcagggaacattttctcgtgtctattttttttaagagaaagctggataacattttgtaatgctgtatttctttttaatttttagacatcctctaaattttgaataatacaaagagtcaagactcaagaacctgggcaatcaattaatattatgatgtgttaaatattaaattcataaattattattatgatgaatgactaataatttacaaagtgttagatactaataccgatattaagatgggagctcgtcggggggttggtccaggtacgaatgttagtgttcaatttgacccgtggcttgcggatgagtctcaaccgtgggttacttctagagcta

SEQ ID NO: 122194 - DNA, 540 bp, Cannabis sativa
  modified_base (493)..(502): a, c, t, g, unknown or other
gaaaatcaaatttcccatatatttagtctattattacaaatacactgtcctatatcgcaaaaaattggaaaattaaaaaataaaaaatgtagaaaattcaaaatttaatttttggacaaaaaatcaacgaaatacaaaaattaatgtgtaaatctattagagcaagaaaacaaaaaatgcgtgatggcgagtggtggtgagcagagcgcagtgataagtttaggtggtctttcataggagagagaataaaaataatgagacgaaaataaaaaagaatgtgaaaattgaaatgagaagagtatttctgaaattaactaaaataataatatatttttgttgtaagtttaatgagtgaattaatttgagttcatcctttacatttaagcatgataacttatatttcctttttagatcaagtttatttaatgatatttcaaacaaatgaatatatctttatatattaaaagtacctatctaacgacaattcttggtnnnnnnnnnnttggtttaacgattcttttttttatttagccttacacg

SEQ ID NO: 122195 - DNA, 1477 bp, Cannabis sativa
  modified_base (46)..(55): a, c, t, g, unknown or other
ttctgatctttattaataagcaaatctgattatatgaaatgagttnnnnnnnnnncataaaacccaacaggtatcatgtaaaagggttagagtgttcaaacctagagcccaacgggaatcagctagcaagatcaaattccatgttctcactttccaaactagccctttcataaggagatctctgccctaaagaaaacttctccaagtcatcaaaaaacagtgtcccttagacgcctcaaaaaagttattgctcttaaagtatcttctttgaggagacgaaaaagaagtgaggatgggtttgtccaaactctccaagcctatttagcaagaagggcttggttgtgacttgtgaaagatcgaaatcatagcgccccatagaacttagagagacacagacttggccaattcttctaatggattttatttttattattagaggtaccccaccaaaaatttgctataagttcttggagactcttacatgtgctgctgggcagcctgaaacaagacatagcataggaaggagcagcttgaccatgactttgataagcgtttcattaccagctttagaaaaaaactatgttccacacattcattttggaagagacatgttgaactagataatggaagatcaagttgttaaccctatcaacacgatgtggaactcccatatactaactaacaaagccctcattggtaagccttagaggattgcaaaaactttctttggctttggggctagtattaggggagaacagaatagatgatttggtaaaattatccaactgaccagtagctcattgtaggtttgaaggatgtccctaatggatgtgctagagtgagcattaatagggaaaaggataatgttgtcatcagcaaagagcaaataggaaataacaagggcgtttctacagatagaaagacctaaagactcgcttttggattccttaacacgaatggtagctaagagcccttccaccaccaagaaaaatagataaggggataagaggtccccttgccttatccctcttgtaggatgaaacacctcagaaaaacaaccattaatcaaaattctagaagagatagaagagacacactcaagcacaagggagataaatttgggggaaagccaacatgttggaggagagcctccacaaagcttcattccactctgtcaaaggctttttctatgtccatcttaagagcaacccatcccagttttccaaacttcctactgttgatggcatgcacaatcttgttagaaatgagaatgttatcaaaaaccagcctatcagacaaaaaaaaaactttagttattggagatgataatatcaaagaccctcttaattctattggcaaggacattagcaaccactttgtaaagtgtagaatagagattgatgggtctgaaattcctaagttttgaagcattctttttcttacggattaaaataataatagtatggttgatgaggga

SEQ ID NO: 122196 - DNA, 605 bp, Cannabis sativa
gagagagagagagagagggaaatatagagagatggttgggtcgtcgttggcgtgggttgttgggttccgcgtggtcgtggtcgggttgggttgggttgttgggttctttcgtttcgtgggcagggacgaagagggaaagacagagagagaaatggaaagacagagagagagagggaaagagagagagggaaaattaaatggaaggcgtattttgggtcgaatttgaaaatagtggaattgttttgtacaaattaataaggggtataaattttgatatgaggtattttattaagggcaaatagtgaaatttccctttgataacaatgtcgatcttatgtgttacaaattaatttctctattgatttggaaaaaatttataagattttgagaaatttaaaaaaaaaaagtaaatgaagagctaaagacacctaagaacaccccaacctgaatggtttttttttttttttcctattttaatttaaaagaaatataaaatgtaaattaataaaatggtgtttaaagtgaaggttagttcatgtagctaaatttttaaaaacggaggttacatagctaatagtgttataaatattaataattatgtggat

SEQ ID NO: 122197 - DNA, 1920 bp, Cannabis sativa
accagtatatatattttaacaaggcaaattgttcaacatgcagttatttctttggttcccacaaccccgacaatgacatgctcaatccaggcccactaaattagtttaggatcccacaagactcggtctttataatttatttttaatttgagattaattttaattaattacacaattttaaatctctatgatagtatattaattgatcttgttattatgggacaattcatatatgaaatattttttcttaaattttataattattgtgaacaataaaataacatgtgagataagacattaatgtatcatccaaatataatactttatgaaaattttgaatagtaagacatttttcagacatattcaataattgaattttcaccttaggtatctcaaaagatcaacagttgtattaattaagttgtattataattaagattatttgtgttgagtcaaactatcaaaacgatttaattggtttagaaatcgttgtcgatcaaactcatatgttgtatcttttagtaatgctagttgataattagtgtgtggtttaattatttttcttttcctatttatacttaatttaaaattatgacacggggtcccaccatgtcaagagtttgtcccatacgtcagacccagaaagtgcgtgcacccctaaaaaaactacaattttgttaacaaaactcatatattaatttacctgttgtttataatttttaattaattatttaacttacttacttactattaattattttttaatttcgaatttatatattaatttttaattaattttatttttcactcaacaataattgtagctaaaaaagtacaaaatattcaagttattctaaagacaccctattttgatatttttattttatataaaatttatatatttaattatgctaagttttttaatttttttttcttccaatttatattcttaaaaaatatatattatattttaaacattatgacaaaaaattaaattaaaaaattatatgaaattttcttaaaaaaaataaaaaatacatatatacatgatttaaaaaaaatatgaaaataaaactaaaatatgtattgagatgtaacaccctactagtttagacatgttatcgaattttatattaactatgcaagtcgttgctaatcaagtagttagttgaaaatcgtaattaattaaaatttaatttaattacccttaaattaaaagtaaataacttctatataaattgggatctcgtatttaaaattttacaagtgtaatacaaagtatttgatacaaaagttatcgcctagcgactactcaaaatatagcctgctatcccaaagatcgtacgctccaggtctaaccgccccaacatgtacaatattcatctgctcgcactcactgttgttcaaccttagcttttcccttacctacatgtggaaatagtaatgtgagtcgacgactcaataagaaaaagcataagtatatcataaagataaatcagattataattaggcacccatacacccaatcgtaacccatgtcccatgcgtattgagtctagaacgttcgtacgacagtactattatttataatatcagcctattctcaatactctagttgtaccaatgtgatagtgtcaatcaatatttatgccaatcatacattcattggtatctaatataactctatgtatactgatgtcgctatttcaatgtaacctaacaggaaatcataaacatgcatactaaacatgtaatcacatatgcatataactatactaatcttacctcgtttcctaattcaagtgtttcggtcaacctgaatgaaaattcatgtgctgaacagaggctttatgtcacaatgtaaaatggataagtatttaattactctagaacacttctctaatgcccgaatagaacata

SEQ ID NO: 122198 - DNA, 939 bp, Cannabis sativa
acttgctgaattctgtgaattttgcggacgtattacccacaagacggatgaatgccctgctgttctcaatctacaagaacagggacttcctgttgaacgtacctattttcctttgatccgaactgctggtctccctccaattgctctccccaggcctccagtggcacgcccctatcaacaaaatcctatgataattccgtctcttcctgtggtgcttccaggaaacaatggttttattctatcttttattactctttttttcctactaatcactactttttttccaaattttatttatcactattggttattcaccgtttgtttctttattctgcaacttagaagtccctgctattgtttctggggttgttggatctgctccttccactattatccaaccaactttgaaatccgataaaggaaaaggaaagcttgtaattgcatctgagtcttctactataactaagtcattggatatggctctaactcaacaggggtcgaatactggaaatactactcaactaatccatccactatcactctctcctagtaaacactcccaagaaagaactaaataccttggtatggataaaggcaaagccaaacttgttgatgaaacttcaccaactaatactattggaactactccagacatcattattgctaagagactgaaagctaatgaagataccgtcactactaaaaaatacaagaaataaattgtattctgcattactgaattcttctgtggttttctgttgtccttttattagtttagtactttcttatttccatcttatcttttttatgttaagtctatgtttttcagttcttgttggtgctgtaatggctggcagaggataatctagtgatgatattataagaatatttttatttaaggaaatatatttttatttaaagaaataaatttttatttaa

SEQ ID NO: 122199 - DNA, 634 bp, Cannabis sativa
  modified_base (35)..(59): a, c, t, g, unknown or other
aattgtttttaaaaacaattttctgtttttaaaannnnnnnnnnnnnnnnnnnnnnnnntgccaaacatgcacttaattttcatttcatgcctttgtttagttaattgtattttaaaatattattccaagggaatgaaatttttactattttgatgaaataactattctatttgaaaatgtaagggaagattatgatgaattttttttaatcttttattattttttgtatgcattttaattttattcactcctatttgtattcttatatttttattcctcacaaactaaacttaaccttagttttatttgattccattcctacacacttcgggttttatttttggtttgtataaaattttgaatctccgcagtccttaagcttttaatttctattcctaaaacttttgatttcatatttttttgtcctgaacataatcatggaagagaattcttcaatcccaacacttaaattcatgtctcaaaacatctcaaaaaattctccttttttatattttgatctatatttctttttacatcatttttattatgaaatattagtattatgtaatattataatttagagaaagaaaatagagaagagatgagaattttctgagtgttttattccaatag

SEQ ID NO: 122200 - DNA, 679 bp, Cannabis sativa
ttttttttttttttttgggagaatatgtactgatttaatggaagaaatttaattttaatttatatatgataatgagcggttaattaatagtttgatatgttggtctatacgtggtaatttaattttcatggtgggactgggagaagttgggcttgacaagtggagggacacgtgtcactttgttcttaactcgatgccttacgtgggttagaagtaaaataataagtacagtaataacttaaaaaaacttcttttccctctcaaaagaaaatgcaaagaaaatactagaaaccctgttttttttaattgttttttttttttgaaagttatttaagggtttttttatttttaaactttaaaatagttttttctttttttatattttaacgaaattttatataaaaaattttattgcaaatgacagaacaatttaaatcgcaaaaaaaattatataacaacttatatagaaattatgggagaaaaaaagttaaaaaaaaaaatagtatcttgattcttgagtagttagaaaaaaaaaattaattagaaaaatttacaacaataatttcaaggtatttttcaacattaaattatatggggcctaagttaaattattgggcttcatgggcttttgtggaatattgtatttttttttttttgaataattaacttttttagtccc

SEQ ID NO: 122201 - DNA, 3053 bp, Cannabis sativa
  modified_base (1994)..(1996): a, c, t, g, unknown or other
  modified_base (2431)..(2432): a, c, t, g, unknown or other
gaaaaaatagtcaaaaaccgcactacccgcaccgcgaacacccctaatacaagcaaatatgaacaaaatacgacccatggcaaaagtttgcggtcataattcggagggagaataaaataaaaaatatattctctttctatattacatgtgttagtatgttacctaaaattagtaacgggggagagtaaaataggggacaacttattaaaacaattaatttgagaaggtaaattgctaataattattaagaaaattttataaaacaccctatgaaatgagatgtactaatgtttttctatttatgtaggtactcgaaataatttttagttgaagtttttcttgttatagttatttaaaatatcctacaaaattttaaaaaaatttcaaaaaattaaacacgcaaaaaatagagttcaaacattgtgttgcactcctaattattttattatatacgcctgtgaaatagattatttaaacattattttctatattgtaaattattctaaattaatttcttaaaattttataaaatattttaaataactataacttacacgaatatgaaaaaaaaattatataattttctggatgctaaaacagataaaaagtgcatctgtatataccttttaaaaggtgcattgtagaaataccctaactattatatatatatattatttaacttttacttttacatatcaatttaaataacatttttttgggagggacgttgctggtggctctgtcaatgcttaaaattgacactaatagtatgtttggtaggaaggaaaaagagtaggatggatggacactaatagtatgtttggtaggaaggaaaaagagtaggatggatggagagtgtagaaatgatggggagtaggagggatggagaggatatttgttctcctttgtgttgtttggtgttaggagtatatgtggaaggatggagagtaaaataaatattaaaattactattttatcatttttaatacaattatatatttttttcaagggtagaaaagatattttatataattttttttatctttttcttgaattcccccatgttaagagggattaaaaatagtgtgtttggatggagaccctctccttacatctctcctctccctcttgccaaacaaaaaagattctccaatccctccacccttctccctccctccttctctcccttctaccaaacatagtgtaagacctggggtaaaataaccataaccatgtaccccgagatactccgataatacaaacacttactaaaacttcccagtataactaaatctcaaactattattgcataacatttctagctaaccaatcgagtttccacaattaccgaacctggaaaaaaattatttcataaatagcatgcatactacccatatattccaataaaatctctataattaataaattatatttatttagtcatttctattaaaatccttaattatcacaattattctagtaagattgtaatcttacccatttatgcccttaatacacatattactacatatttttttaaaatatattttaattaaccacaattaagtttttgagataatacacctagaactatcatgtgaagtagagaaacccacgatccactctcccaatctcaacacatgacctatatgagttcgaaatttcctttgtaactctgtgagcttctctaatttattaggaataagattacatagttataatttatttctcgattgaataaagacttgacaagtataacttaaacataatgtaatccagtgcgaacttaaaccctataatagaattgaagtaataaaaataaccggacatctaatattaaattataccatcatggataaatatctcttgtatgtcctagcaatactaaaaacaaaattgaacactttttattttgggattatttcacatatgcacaaaaacaataaaaaaaattacaaaaaacggttatacacaattttaaatatttttacgannntatttacagaaaatacgatcttttgatatatttttatattgtattcttattaatttgttgttaatttttattatttgtatgttattttttgttgttcttttgatgtggtcttcttgttacttttatgtaatttttttaattatttttcgtgttgtttttgtagaatatcgtgaaaatgtaataaaaaatctttaaacgtaaaaatataaaatttttataaaaaatagtgtattatgtaattacctcttttatttttggggttttacaaaaatactagattttgggtaaaaatttataattttactgtcacacggaattttttacaaacttaccggcttttaattttataaaaccaccgtaaaacaacaaagcagaacagttgaaacaatagcaaaataactaaaaacaattgtgaaacaacagtaaaaacttaanncagtacacaatataaaacttatattgtatttttgaaaaaaattctactccatggtgaaagtaaaaaaattaaaaatttcaatatgtggtgtaaaaattccaactcatattgatgaccatgtttggtccaagggtgggatagacaaggcaatcgtccaaacctctcaggtctaaaaatctcaatttatttctaaaaactctatatgtaaaatcttactactatttattacaaaaatacaattattttctttataatgattaaatttatttttttagagatgttacgtttttagattttatgtataaaaaaataccattatcttttagaaatgttacgtttttagatttcaaaaatgctataatttaaatttttactactacataacgaatgttagcttttcaaaaatgacacaattgaaaggtttggcccaaagccttggcgtttcaattatcatgggcctcccatttgtagattacgctagcaacccgaacacatgtgatgtggcataattgcaatcaaattggggtttattgaaaaatacttcttttatttagggaaatttacatggtatactaatttttgccattttttttacaaaaatactgtcaagcagtatttttt

SEQ ID NO: 122202 - DNA, 1062 bp, Cannabis sativa
tttttttgtagtgttttgacacttctctaaaattccaactcttgttattatattgtcctataatttgttgataatgtggcccattattgctcaacaaacaagagctaattttattaatgaaagaccacaaagttgggtgagcaccccactagtataaaatagattttttctttcgaccaacacgatagtcaaaaacccaaaattgatggaataaattagtatagaaatttcacttcggttgttaaccaatgcaagttatcgtccaattaaaaatgacataaagatcttttgtgtccattgcactactacaaaaacaccttttagagtcagtttttaaagcctttcagtgtcgatttcgacaaaattcgctaccgacgctgattcggacgacgctgtagggttgaaaataactgacgctaaatggtaccctatgacgccagctattatatagcaactgatgccatagggtacatatggcgtcggtttatagtgaataaccgacgccatatacccataacaactgacgccaaatctgtaatatttatttttttcagttaatttaatttaatttatttaaattatgtatttattaatttatatattatattatattatttgaatttaaattaaatgtttattttttttaaaaggtaaattaaatattttttaaattaattttatgattagccaatatacctaatttaatttcatagaagccactaaataaattacaattaaatattacacaaatattgtataattaggtccaagtaataacaagttaataactctaactacaagttaacctaaaaaagtaagctagggaagataaatttttaggccttttagcatctatcgtccaagccttcgtgaatcaccgccatcaatcgttctatctactgccgttttattggtaataattcgatttttggattgtattcctacttatctctaaactgtaaaaaaaagttaaaatttatattagtttatatatatattattatttgttattataataaatactataatcaataattaaaacttacaactttttgatcttgt

SEQ ID NO: 122203 - DNA, 658 bp, Cannabis sativa
caccctgcaagacaatgtgaaacaaacacagcaactcgaaagcaccttcaacacaaaagaaagggaagaatgacatgtttcccacataattcaactcgagtaggaagacaattggaagcagccctcctaaccaaatccttaactttaggaggaactctcaattctcgcaactctttccaaaaaattgagttaccaactttagatgattctcctttaagctcctgaataagttgataagcactcttaaccgaattagcaccaaagttttcacctatccattgccagatgtctcaaagattatcttcatcccaagaagtctctcctaagagcttaacatcctgctccacaaagatgtctttaagatcctcttcatcccaaggcgtttctccaactttcataagactaaagatcttttaatttgccaaactaaggtgatctaaaaccacaaatatggctaaacatcaggtaggtttactgggtttcgagtttgggggtttcgcaggttcaaaagaatgaaactgaacccggacccggatagggtacgggttggcgggttggcaagtttcggtttgccaggttgacccggtcaactcggtcaactctttaaaaaaataattttttattcaaataattatttcttttattttttatttattaa

SEQ ID NO: 122204 - DNA, 815 bp, Cannabis sativa
aagtacagtaggagaccatccacagttattacctcgggatgcttcttcttcagcttcccgaggggataatttcttcaagaaatggatgcaagccacataatatctgtattccttgtcaactggaatcgggacttgctaccacttagaatattttggattcttaaagttgcaggtagattgtttgctgccaaggagattgcaggtcttcaaattggttttgtttagtaaaagattggctgatcgcaatccaaacgagagacctagaagaatcttgtgtcatttctccatctcgagagttggaataggcctcctcgagaccgctgtcaatactacaagcaagataagaaaatgccaaccatttatatattgaaaactcgaaaccaagtttttgagaaaatgtgttacttatgtattaaacgaaatgcagttgtattgatgggagagaggtcgaatgtccagaagaagtcatccttgaagttagttttgttgggtagacttacaataatccttcgatcatttgtgtgggttccgaggtaataaaaaccacctaatcctcgcttccttgagggataggccttcacagaatagaagtataagctctcgagtggagtgggacactcccactccataatttgatataagaccttcaaattcaatatgaactcagaattaattgaaaaggggcaatttcgagataattgcaaaaatccttgcagtagtctctcagagggagtatctctagctttgatgtgcacgagggtccaggggcctttcccatatgagccactagtgctacacccctcttctcgaataat

SEQ ID NO: 122205 - DNA, 939 bp, Cannabis sativa
atatatgtatttatgtacttaccgcacgtgtgtcggtggagacagcggtgacaatgaacatgaggaagaaggtgacgacaaactcgacggcaaaagcttcgtgaagggaaacagtaggaagggtgagtccactggacatgaaggggtgaaaggctgccttgagaaggaaagaggcggatatggaggccagaacctggactgctatgtaagggaggacttgaacccaagggaagtgcttgaaggttgcgaatgcgatggtcacagcaggatttagatgggctcccgagatgtggccagtcgaaaatatgaccaccatcactgccagacccgagcacactgcgtttccaactaaggctcctgctgatccatcgtgctcctgattcaccaggggcgctgctgttgctccaaacaccatgatgaacgttcctacaaactcagctcccagctgaaaacaaaccacacacaccacatatatacctataaaattaaaatctagccgcgtacgttgggaagaaataaaattagcaagtgcaagtgcacaataaattttttatacatatataatatatgtggaccccaattgatcaaataacttggatgctgaaagaaagaaaaaaaaaagtgaaccaaaatcaactgatttttattaatatcatgggcaattaatagagaatcacaaagcccctttggcatatagtgagctacagtccaatatatagccatgcaaatatatataatgttcatacgacggctagctagtcatatatgtttatttggtaaaatatattatatatatatattaatataaattatatataaaatataaacatacatatagttatttgataatttatagtttcaactttaagtttgtaagcagttaaatttaatgtttatttttagcgacataagtattattgtttgtaaaactttaatttt

SEQ ID NO: 122206 - DNA, 1002 bp, Cannabis sativa
tttttatttgatatctagatttttgtgctcactattttttgaggtagaaaataaaaaattaatacataatatatgtatcctgcatggaatatttatttttcttctaataatactacactgagcattttaaaatttttattttaatgctctgacaattttttttaccatgttttagttttagtttgactataaagaaatcatgtactaaacaaatgaatatataaaaataatatgtgcatgtgctgccgcccctggtcacgcgtgtaacacactactttaacgtaatttttagcgtgttaaacttttccgaatttcttataattttacagaatgtcttggtcacgcgtacaacacactactttaacgtaatttttagcgtgttaaacttttccgaatttcttataattttacagaatgtcttaaataactataatttacatgaccataagaaaaaatttaactaaaaaattatttcaaatactaaaacagataaagctgtatcgatgtatcccttctaagaaagtgtattataaaatttctctatatgtgtgtttttttaccctaagaaatcagaaagtggtaataaggatagttttttttttttttttttgaaagttgtaacaaggatagattaggagggagagaggaaagtgaaagaacgtggggtgtacttttttaattttttttaaaaaaagcctaattttgtaacaaaatggggtgttcttataaaaaaagttaatattttaaaattaaaatgggataaatttagatatggggtgtaaatatatttttgggtgattctacaatgtattttttttaaaatagatgtattaatacaccatctacttattttagcattcagaaaaaaaaagttagtctaattttttttttcatattcatgtatgctagagctatttaagacatcctacaaaattttgagaaattaagaataatttacaatatagaaaacaatgttcgaatagtctattttacacgcgtata

SEQ ID NO: 122207 - DNA, 1961 bp, Cannabis sativa
agagagtatggtcgaggctggccaaccctgagcctggtagctattcatggttggccagccctgtgtcaagcagggcctggctgcccattcttccgtgactggttggtggagcctgtgcgttaacattgagtagatcacaccaattgcagagtttggtggatctaaatgtcttaagtgattaggtcaaggtttgatggttttgggccagctaagtccttgagcatgtctcgtaattgatccaattgtgctttcataaaaggatctattgataaaggggtctagttgattggccattcttgattaggatggaaccgtagattggccaagagcctagctggccataccctgggagagagtatggtcgaggctggccagccctgagcttggtagctattcatggttggctagccctatgtcaggcaaggcctggctacacattctttcgtgactggttggtggagcctgtgcattaacattgaatagatcacaccaattgcaagagtttggtggatctaaatgtctgaagtgattgtattcactcctcgagttattactgtcttggctgtttccacccattctcgaacctagccagttaaagattagcctttaagttactcattcctagatgcttcgagacaggaattcaccctgttagccagctaaaggtgcaccacttaggtgctggctggccgaaggttggacgattgggggtgttgttgtactgaagacccttgggcggcccccatgccaatggttgctagagtctggctattctcgccactagatcttcatgacaaggcttgtcctccttcgggttaggaaacgtttgtcctagttccagaggaacttggttggaaagtttgtctgtagaacctccccgatttgtcgattagtctcccttggagaggatctgtgatgagatctattgacctcgcttctagccaacgacattgagtcaaaaataaagcgattaaataagataagtaaaagaaagaaaaaataataaaataaagtgaacactagattttaaagaggttcaaccccgtaagtatggtaatagcctacttcctttgtatttgtattgacttgagagaaggaaacaaagtgttcttcctctcaaaatctcttacaattgatctctgagtaactttctctattagatcactctttttttctatagaatgtatttctaaagcaattctctcgatccctttcatagtgaggttaagccactatttatagggatttcatacatgagggatgatttcccttttgcctatactgagtaaaataggaaactatactaattccataattacaatacaagaaataggaaactagaatgtgttgtcgttattctctgactcaatctcgtaattacagggattgtcttcgcatctggacacaacgagatcgacctctggaatttcaatctttcatgctttgctcaggataaccatgtttgcaccttggtcggacatcttctcaactatccttctcagatgtctgaatgttacagatgccaaatagtcatctgtgggctgctagggatattttcctctgtttaggtatctaaaatatgggacacgtgtcatccatacctatggccacgtcatggtgcaataagtaggataacaagatccttacctcttccagtagttctttcattgaacttcctaattagatcactagcttttctattatgacggtctaattccacctgatgagattggaggatgtactcttggtcatcaatccatttaagatagggtaaatggcggcaaaacccccaatactttcgttttggtttcattaaacccccacaacccaaatttctgcgggtaaacccgcaaaaccacgaaactgttaggaatttaccctttctgtccaaatttacctgttaagtgccaggttggcttgtccacgtggacacaatatacacgtagcacaattttattggt

SEQ ID NO: 122208 - DNA, 1399 bp, Cannabis sativa
gatttgttgaaattcatgatatacttagtttgatttgaaatatctaactaatttaaattagtgattactttgtaatttgaaaaatcaaatcacaatgagaaagaaattaatgagaaaattaagactttctaattttgaacactaaagtcgaaatatgattattcaataatcattcattaataatctcattaattatattcaatacataaagatgatattgaatataaaactttaataagtgagacaataatcttattaaaataaaaatttattatggtaatcaatataggtgtatgaaataattcacaaaggatatccattaagaatgcaatgacatagtcattgaattcaagagatagatatatgaattattatatgaggatttaaattatgagataattaaattcaaacaatataataaatttaaaatagaatattatattgattatatcaatggactacaagtaaaaattatgcaaatataattttatattatgaaagagtacaattttaatttatagcagagtaataatagaattaataaactaaattattctattaatgagatcgataataataaagtctttattggagcttcaaaatataggtccatggtcccaaagtcacctctacacaacattgtgaatgagaaggtttaatttggtgaagaaattgggaaataattaatttttacgagaaaataattatttagggcaaaatagtaattttgtgaaaattattattttgaataattatatcaagtgtgaattgtaaattagtatttaactatttagttttatttgatgaaactatattaattagttaaatataatgttatttttaaacaatattaaagagagaagtatatatttttatgaaaataatatttattttaatcctagtgaaataagagattaataagaattaatcaattattatgtattggcaaaataaataataaattttatttgtaaaaattaaaaaattaattttgaacattaaaatattactcacatgtgtagggtgacatataaaggcccctaaaaatttttcttgattattaaaataaattgaattaaattaataactatcttttaattaattatattaaatatattactagataatgtatttaaaattaaaatgataatattaaataaaagattataactaatttctcttaatcagtatatgatatttatattttaaatttgaaatttgattttgaatttaaaataaatattatcttttattttagaataattagcaattttacccctgaactttcgacaatactcattctgccccctaaaatgtattgtttgttaagaatcccccttgaacttttacatttacagaaatttaaagcatgtttggtattattttctgttttttgttt

SEQ ID NO: 122209 - DNA, 1052 bp, Cannabis sativa
  modified_base (857)..(871): a, c, t, g, unknown or other
agtaattataaagaaacaattaaaattaagtgaaagactctcaaaattagttttacctgtaggaacgttttaacatgatccatcaagaaaatgtcatagctggagagagtagtgtagatctttcgacgaatgggtaaggtgaagtagtttacaatgaagtcatttgttccggcgcttattacgaaaatggccttattaatgtgatgttctgtttcttgcttcccaatgcttgattcaagccttttcttgtactctttgaagtactccaattgttttaacaccggaagtacattctgacatatacattatatagataatatataaataaaatattcaattatataccaagagataattataatctcttacagaatctattcgtctaacattatataattatatgttagaaatgattttttaaattttttataacagtaattattatagttataatactatttttataaattataaaaagttcttatattcgagtactttcatgatctttttgaaaaaagtttcaaaccaattttcggcaaccacttaactttttcaaaacatttacaaaaataaagttataataatgaacacaccataaaaattaaaaaatattgtgatcatctatcttttcgagtatgtgcagtgactaagaaattgtactcttgataaaatattacttgtctaaatttgtataactcttaacgagtattacttatgtatgggtaaaattagaaaattttaagtttttatacttaatttttcaatctaattaaaaaaaaaatctctaatttttatatcatatgggctgagattgttccatccgtaaaaaaaaatttaaaaaaaagttttttagcaannnnnnnnnnnnnnnaaaaagttaattttgagttaaatatttttgtatgaacatatttttgatatagtataaaaagagatattttttgatattttttttgaatgaagtaattaaattaagcatagaatttcaaatttgtgatttcattattcgttattagatcaaaattcgatggtttgatatttttaaaattaat

SEQ ID NO: 122210 - DNA, 540 bp, Cannabis sativa
taaatatcaccttttatttaagttgaatactccataaaaatatcattattacaagtgtaatgcaactaaaaatttgaaataagtataacaacattatcaagtaataaaatagaacatctctgtctccgtcggaatcaccacccgcggtggaaccctccaccatcgaggcccacatgccttcgctccttctctcgtccttggaatcttagagactacctcctatgtgcccctcgtccattggagcattccctggccttgccgtcccagtcgcactcccggtctccccgccagcttcgttccttggtggttatacccatctcctagttttggttttctgggtgaatatatagacttaaacatgagatatggcaagcctcaaagatcctatagacaatctatagtctcactgttaaggttagttttctctttttacctagaagtaaaacattttcttgttttttctgggtaaaataattttgttaggaaaattttcttatgtaacattcaaacaaacccttatagtgttgggttttatgccct

SEQ ID NO: 122211 - DNA, 1803 bp, Cannabis sativa
  modified_base (1738)..(1778): a, c, t, g, unknown or other
atgggtgagtgttagtcagataggaaattctaatctttttttttttttttttaattaataagaaaccgggccgggtgggttacacgggctacataaggcccaacccgattccgagggtcgaaacgaaaccccggctcgctcactcagtcaccttggaatttggaaaacaaacatgatagcaaattcgaacattattgatccatttgtgattcaaaaattgtgcttttataaatggattttgaaaataaaaatttaaattttgtaagtgaaaaattatttctaaatatgtgattggttgtagtgtgatttaatatttttgaattttaaaaaattgaatatgtgattggttaagaatctcaaaataaaaaagtaggagaatagttagagagtttttggattccatgatttgaaaacataaaaaacataaaaatagtattttcatttgttagcctaaaacttaaaataatattcaaattttatttttgaaaacactcaaccaatcaagaagtcttatggtatcatcacgtaatttcataatcattcgttctacttaatggacgtttactgcatagtattttcatagtattttttttttttttgataaattaatgagttgcattgcagaaccaagattttcttacacactatgcgcacccaataagagtcaaaatctatatacaagcaagtatcaatctatacaatcaattacatttgcattatgaggcaagaaatcactctctatcactactcttaaccttcctaggcataactctatcaatccggaccttaagagtccactttgtttcctcaattattctatacagattgacccttgtttttgccagattgaatcattccgagctttccataagttgtaaaccaggcctgttgtagcagcagctaaaacactctttctgaattttgacattttggttctcccgatccatctgatcagttattggagattactagtttgagcatgccaatccaaccacttcttcacttctagcaagcaaaaacctgcaactttacattcaaaaaatatatgttggcagtttttaggttggagttcacacaggtagcaagtgccattcacctggacaccaaatctaagcagcttgtcctgagttttcagcctattgagcatggctagccatatgattacactatgtttgggggtgtttagccttgatcaaactttcctacaccagttcagtcgatttagggcaggcataaacagattataacctgcagagatagtgtatctttgcctctgaaaaacaccagaatccattaacattgtgatctgatctttgagggctaccatcttctttcagcaccagctagaatgtactgaagcagagtagttccaccactcttggttctcaatatacgcattgtgaacccatcttagccataagctctcttgtttatttgagataacccatacatatttacagatggcagctttattccaatgctccaagttcttgattcccaaaccacctgctgccttagattgacaaatgttattccaagctactgaccctgctccttggaacattgcttgacatttctaaagaaaagctctacagatggcttcaatggatctcagaactttctttggcaagatcatcatttgactccaataggcttgtatgttgcgttttatgcccgaaataaaactctatttcaatgcaatccagactactcaatatcaataaagaaacaaaagtannnnnnnnnnnnnnnnnnnnnnnnnnnnnnnnnnnnnnnnntatttgtctatttgatttataaatt

SEQ ID NO: 122212 - DNA, 753 bp, Cannabis sativa
taaacttttagcgagatattgtggttatttcttgtttgatttatttagtgtgaaatatcattctttgtagaaggtagtttggtgtctcgacctccactgcttaatgactcaaactatctatattggaaaggatgagagctttcataaaagctcaagataagaaagcaaggagaacaatcttgtctggatggttatctcctactgaaaaaggtgaaggtggaaacacaaaggtaaaatctaaacttttttaaatatagaagaagaaaaattatgcaattataataatagaactccaagccattttcaatactgttggagaaagttccattaaacgtgtttctacatatctctcgactaaagatgctggggcaattcttccactcaatttgaaagaactgcatatgtcaaaaggtctagatttattatgttacaaattaagttgatgatcttaagatgtatgataatgaaactttgtgctgcaaaatttatgctatgcaagtgcacacatcgtactttgtaataaatctggtaaaattaagtattgtcctcaaggactgaatcaccaattaccagtcaatcaattttttgtttctatttgatcaatcaatatttagatttttttttaacaaataaaataacaacaataaaaaaagaaaatttaatgaaaataacaatgataaagaaattaggacaatttatgatcatctactttctaatctttttttaggaggagttgaggtttgtgtttgtgtt

SEQ ID NO: 122213 - DNA, 1313 bp, Cannabis sativa
cctggtaaaacatattccaacagtgggaccatcttatatcgaatgagatgatagaacactttggaatcaagaacataactcctctactttattactttgttttcagacttagtcatattcttagaaaattagtatttgttgaaacaaacaatttcttatcttaatgaccataggatggtccacccctaatcacatagaataacaatcaaacttgttacatggaattaattgggttcgatattataattgggatggacttcctgttcaagtaaccaacattgactgtaaatggaagatggtaagtttttggccagaaggtgaagaactatttgtttatgtcaggtccattcagggttcttggatttcgatcattcttcttcttcttctttaaaaagaaactaagggtaaagagttaggatctcttgctaaaataatgtaaatacatcaaaattgccctaagaagctaatagacttactcgtggagtaaggttacgcaagaaacttcgtctctttatttctacaatttattattttgttagctcctaaatatttagtttcaaaaaatctcggtaaacaccaacaatgaacacttgaagtcttgagttttagtttccacaattaaacttgtcttaaaaaaaatttgaaaaccctactaattattcatggtcgaaactctcagagaagaatattcccaaactaactctaattatgaaaccctaatctataaataattaaacacacactttctaaaccttgtgtgctaattatttctttataatctaacgaattctggataatattaattcaattatcaatatctccactctaaataattaatttttgtgacaatattactctaaagcaattcattaattcttcacaaaattctataataacaaaaatattactataatatgtttggtattaacctaattttgtttccataataattaaataaataataaaataatagttattatattgtggtttgtattttttctaaattatgtgatgcgatgtagtttatgattttaaatttaataatattattgttcaaactgcaccaaactaatttttataaatttatataataagtcacatatttatatattaaaatttaatttaagtttcaaaacatatttattttgatatatgttttgtcccataaaagtagctaccatttatgtatttgaacaatattacaaagatttgcttttttttttcttcatgttctaaatatttatatatatggaggaggttttaatggttacatttttattgtaaccattatggttacatttttttaagccatt

SEQ ID NO: 122214 - DNA, 771 bp, Cannabis sativa
ttaaaattttataggatatcttaaatagctataacgtacgtgactaagaaaaaaattaactaaaaaattatttcaggtgttaaaatagataaaaatgcatcaatacatctatttaaatgagtgaattgtagaattttcccttactttttaagtgataatttagcctacatgagcttgcttaactttcatatttacttatactcgtaatttattttagttttataaggtgagtgagagatcagccaaagtgagtgagtttatataagaaaattatgtgtcacaatcattatatttaaaaaaaatagatataaaaatatgtataagtaggttgtggttgttatggaacgagatcaatatgagttttctttccacgtgtaataaacaggaaatacaatttggatggatatgatattcatacacatgacccaattactacgacacttgtgtggctattggttcaccattgtgatttgaatgttgctcatgtccccacgtacgtataaccactactacgtcttatcttttctaactaattaaataataaatacattttagttcaataattcaaatttaatattcatcaaaatagaaatataaaaatgtaagttccaaaaacactcaagatatacgagagacttatgtcttccgttattacagaattaccgaagatagggaaagcctaatcactacagcaattatatgtattaggggcgacaaaagtcgcctctaaaactatagaaaatcgctcctaatgactattagaggcgacaa

SEQ ID NO: 122215 - DNA, 2251 bp, Cannabis sativa
atagtggtatataattttattagtataatacaaatattttaatgtatgtgttatcagttttctcagatgctttatacgtggtaatcacagaagggtgccaccttggactatttataattagcgtgtacctttttcttattagggtcacggaagaagttatcttccaggagtagtcagaggatccccatgttagcaaggacgagaaggattctggaactcctaccattcatccactacgaagaagggatgaagtcctccaaagctacataattcaaggagagtaacaagttcatgtaatcccggatggatgtggccacctggtcctggaacccacttgactatatcccattcggagctcgaagcgacggttacatatcttctaacaccgaatcagatcttgtccattgtgtcagaccatggtagtgctcgtacgtgcctctgtagtcccattttgtctaatgacttatctaggcaaccacttttaaaggtgaaacctttgagcgacatgtgtacacattcccacgaaatgccttacaacggtcgtacaccacacgatgggaaagcttcctaccaaccaacgatcagatcctcatgttgtaataatagccctttgggtgtgttgagtaagaaaccgtaggtgggtaaagggtatgccctttcccacatgtgagcctataaataccctttgttaatgcaaatttttgttaaccaataataagccttttcgtaataaatataacacagaaataataagaaataaataatgtataagtaacaccagatatttttatgtggttttgcagttaaatctgcatactccacgagtctattttatttaagatattttctgaatacaagatacaatatacaattgatcgtatatattttctctccaacattctccgtccctttatctgtagaatctgcccctatttacaggaatataggtttggcagttatttacattcaattcaaaataacgtgatcaatttccacgtttcatttaaattgtatgtggatagtactagataatcgcttaacagctggtaattcttatccttatagatggttaatgttgatttagacaatggtatctcgcttatctttgagttattatccttgtctattataatgtgaaaaaaatgctaagtgttaatagctgattcgtctcgtcaagtttctttagagtagcgaggtggttttctcgctattcatagctcgaggttgctttgtataattgtattcactcctttaaataaatgaattatcttcttgggcttatgtacttcgaggcagatatgtgtctcgtgaatatgggttttaatagtcttctatccttgtctcgcttaagactacatagtcagcgatgaatattttctattaatcctatatttaacgagttattcttttttctttgcattaaatgatataatttcattatatcaggtggttcatattccactgtatgacacgtgtcaccttctgaagtgaaggtgaatttcgggtataacaattgccccttaaaaagttctttttttaataaaaatagtttttttaaatgattgcaagggtatttttatcttaatccaattttgaaaaattacatgctttgagttttggcagttcatgattttgaggcacatcattaggatttattgtccatctttttcaattcttccatgttcttatctattagatctttttccttatgatctaacggtgattactcttatagtataaaattcaagagaaaacaaccacttcaccatttctgcctttcaaatctttgagtttttctgcaaaaatcattctcgacttctccataccttgcatgccctctctatcattgacttattttctgcgagtttcttcagatttaatcttcaacctcaggagttctcaaaatacgctgatgcactcatctcaatcccagtttcagaactcttccttgtgcaaaaatccacatctaaatagtaagtggtttatacctttctttttggaatttctttttcctgagttggtactcttatttttgtaattaattgcatcattgctcattttgtttggtttaagtaacttctatttagttttttggataatttctaaggtttaaaagagacaaaacttaggtttatttcattcataggcttctagtttgagtaaatttcttccaaaaattgggatcattattgttgatcgaggttttcggcaaccagttaaataatatataagaaaagctgtaggaagttta

SEQ ID NO: 122216 - DNA, 1697 bp, Cannabis sativa
  modified_base (1239)..(1241): a, c, t, g, unknown or other
accacagtagcaatgggggtgtccgtcaagtgaatttttccatgacgggtcatccctctcgaacccgtaggagtcctctccaccaccagccaccatgtgttttttttaaggtttggattttgtgaggcttcaaaacaagtgtttccctcgtcctaatggtggagatagtgtgtagtagtattttggaagaaggaaagtaggttttctatatatatatatatatatatatatatagtcttgtgaaaatgaatttaggggggaaaccgaatttttttgaaaccgtttgaaagtatattaaacttggggagcatatttcttgctgcctttaaataatttttttcaaagtctttggtgcactatacttatatacaacaagtattgtcaatcacaagcagtccaattaatttaaaataatatttaattgtgatatctatgaaaagttaaaagtacaacaaataaacatatgtccccaaatgaataaacacacttacaactggtttggtttggtgtaataatatttggaatggaatgaactttattattttttattttatgtccaaataaatatgtgggcgaaaattaataaacacactataaactagtttttctctcgtcatagatttcttaatttgtatattaaattcctttaatcatatgaaaaaaagttattattaaaataattattattaatattaataattatgtgtcattatttttatgtattttatttaataaatatttttttaataatgaaaaataattcaaaatcatatggcacatcataattttttaggattacagtaatatatttttcgtcgaaaaaagattagaataatttttttgatatcatacaaatatagataaaaagagaactttaatattgtcaagttagggaaagtgtaccggagtcactagtttcgtaaggaaatcactaacccataccaaaatagggttccactcagtggtgtcgctgtacaatggcagtagtgacactatcactgtcggtcaattggggtcccatgacacatagtatgtaatcaagttaggcgtattgtactgaagtcactagtttcgtgacggaatcactaaccaataccgaaatagggttccacttagtgctgctgatgtacaatggcagtagtgacactatcattgtcggtgtttaggggtcccgtgacacatagtatgtaatcaagttaggggtagtgtaccgaagtcactagtttcgtgacgaaatcnnnaaccgataccgaaatagggttccactcagtggtgccgatgtacaatggcagtagtgacactatcactgtcggtgatttggggtctcgtgacacatagtatgtaatcaaattgggggtagtgtaccgaagtcactagtttcgtgacgaaatcactaactgataccgaaatagggttccacttagtggtgccgatgtacaatggcagtagtgacactatcactgtcggtgtttaggggtcacgtgacacatagtatgtaatcaagttaggggtagtgtactggagtcactagtttcgtgacgaaatcactaaccgataccgaaatagggttccacttagtggtgcggatgtacaatggcagtagtgactgttggaaattattttactagaatctagatttactaccaagtatgtttcattaacaccctaatatgcattctaaaacaatgaaataaaca

SEQ ID NO: 122217 - DNA, 1213 bp, Cannabis sativa
aaaaaaaaataaaaaaagaaaaaagaaaaagcaaagtatttttttttaaaaaaaaaaaaataagtgagtatattcacaagttatctttctctttcttttttaaataactaatataatttttctataaaaataaaataatttaattattattattttattttacttttaataaataaaatataaacatacaaaaaatctgacagtttaaaaaaaaaaaaacttttgaaagtgccaaatggcacatcctcctctcaccagcacaaagtgagccccccacccatcaagtctccgttttccaaagaaagtgatcacctcgtaaaaatgtaaataagaaaagaaaaaaaatagaaataaaaagaaatgctaatcctaataaaaaagtttaaaaaaacaattttagttaaattttgtaaatttttcaataaacattaaggaactgtttaaaagacatcggtggtacctagtactattacaagttatcattattgtgaattcaacattttaatctaatagttattaacttattatttagagaactgtttatagacacttatgtgcctaacacctttatgaggtatcagattgttactggtacaatttgatattagatttcaattatttttaaaatttattataaaaattcctaatcaattataagactcaaccttttgatgctcttgttaggtaccatagcatttgatagcaatgctctattatttatcataaaccttttaaaaatacttttctttccataaatatatgtattaattttttattgaaacatttttttaagaaaaaaaaataactctttttattttatggaaataaatatgtaatccatacattcaagagaaaaaaaaaatattcatgcttagttgatactatgtatacaaaatatttcgatataaaaaaacatcactcgtttgtagattttttgtttagttaatttaataaaagcattattaattaaagtcaaccaacaacatctaattgatatttcaaacatattaagcaagaaacattataaatgagttagtacatgtgaaaccttttaaggcaaaaatctcttaatttatttgtggggaatttatccaacgttagatcatgaaactcatcattagcagtatgatcctatcaatcatagaatttattcacataatcatatatataaatatatatatatatatatatatactatatgagagttacgtgg

SEQ ID NO: 122218 - DNA, 2263 bp, Cannabis sativa
  modified_base (51)..(53): a, c, t, g, unknown or other
cgcaacaatatctacaatacccccgtaatccaataaaatctccgtaattannnaattacgctttatttattcatttactcaaattccactaattaattcgtaactagctagtaagattataatcttactctaatatccatataattacatatttaataaaatatgtccaaataaatatcaatataattttcgggatattacaaatgataattgtatttaccttggagaaggagaatataatattagtagttttgtggatcctctcacttatagtgaagaactaaatagtcaacattcttcaaaatggacagaagttatggatgattagattgagtccatgaagaaaaatgatgcataggagctagttctattacctgatagttttaaactaataggttgtaagtggattttaaacactaaaatggataaacagaaaggtataaaacatgtttgtggcaaaaggctttaattaaagagagggtattgattacattaaaattttctcgcttgtttccactagatattcattcagaattattatgaattcagttacacactctatgagttgcatcaaatggatgtttaaaactaattttataaatggaaaatttagtgagcaagcctatatgtctcagtctgaaggcttcaagaaaaattgaaatggaaatttggtttgcaaattgaaatgatctatttatagtctcaaaaaaggcatctcaccaatggtacttgaagtttgataaggttgtgacatcatttcatttcgtcaagaacaagtttgacatgtgtatttatatgatgattattgggagtcgttatatttttcttgctctttatgtggatgatattttacttgacaacagtgatttgtcattactaaatgagaatgaattttttctgtctaccaactttgatataaaagatcttggagagacatcttttgttttggagattgagattcatcatgacaagaatcaaattttttttggcttatctcaagaagcttacattaatcgtgtgctaaaaatattcaacatgaatttatgtaaggctggttctattcctattctaaaagcggacacatttattaagcaacaatgtcctaaggacgacttgaaaagagaagctataaaacatattccatatgcaagtatagtagagagtttgatgtatgctcaagtttgcacaagatctgacattgttttttgtagtcaatgttcttgggagatatttatctgatcgtgtccatgatcattggattgcagtcaagaaagtcatgagatatttgtaaagaacaaagagttttattcttgtttattagcatgtcaacaatctccgagttgttgtttattcatattccgattttagtggttaagtatgatttaaagtcagattctgactatatttcactttagttggtgcagctatttcttggaaaagtattaaataaactttcatcacatcaataattacatatcctgagtttgtcccatgttatggggaatgtttccaagctttatggttaaataatttgattttagagatacgactagttgattctatttcctctcctacactattcgattgtgataataatattgttattttcttttcaaagaataatgagcttagtagtgcttctaaacatatggaagtaaagtatctcacagttagagatttggtcaagaaaagagacattgtaaaagaaaactacaagaccaaatcaatgttagcatctaaccaaaggattaaagtgtcgtgatgtttaataaatatattactgatatggatattttataatcttttgttcttttgggttagtaggagtttcttgctctattatttgagattacatgtatatgtaattttcttattgatgttatgaactactttgtttgttttgtgggcgggccaataatttcttatcattgaatgttaaagctttcaattttgttttgttatattctcgagaattattgaattgaaagtttgtagttcatatcttgttctaattattgtcctttaagtttatttacttaatgacaatgatattttgttggcttaatttttcaagcatgttagggacacaaacttatttattaagttgtgtacggttaattttactagcttattaattaagaatcacaatatcagtaaaattaagaattgataagaaaattatgttattttattgatcatatgttgaacataattccttaccacactactagacttattaaccatgtcgatttaatactttggt

SEQ ID NO: 122219 - DNA, 1550 bp, Cannabis sativa
gatggtggagtggggttctgtgatctttttctttttagctaagctatgttggaaaacaggttactcgcctttactctgagcctgagactattgttgctaaattcgtggaggctatttatttccccacttcttcgctgcttgatgcgactaatactaagaggtcttccttcatttggagatccattttgtggggcaagaatttgttctaagattgcgctagctagcttattaaagatggtacgcaggttttcatttatcatgatagttgaatttctcatcttgatgggaataaatcaccatcacttccttcccttccattggatacaactgttgacttttttattgatacttatgggcagtgaaaagaagatttgattcacaactcttttcgtcaggagaaggctaagtctgtcctttctattcctcgggttcatcttttccttttggataaacttatttggtaccatgatcaatctgattattatacgatgcatagtagttactggaatgggattcacttagctggtcttttgggttctaatgggggacctttgttatggtataaattgtggaagttgaacttactagttaaagtgaaacacttcttgtggaaagctagccacaactagttgcttaccttttacaacctgatgctcaggggcatctacttgagtacttattgctaattttgctccaaaggccttaagactgctcagcatgctctttgggttgtgattctttgagacagattttggactctttggctagttttgcttgcatatcctacattccagggatggatttctatgagtttttactgtctctttgggaaaaattttcttctttaactcttaagaaatttcttgtttgcctcaggcgaatttggtatagacgcaatatacttgttaatgaaaagaaaatgatttataataagcttgttgttgagtggatccttgagtacattgaacgatatcgtaaggccaatggtttgtattttcatggaactagtgatggctataggccagttattacttacaagtgggtgaagcctccggatggtattattaaaataaattgtgacgctggtttagatattctaaatgctagagctggttttggcttggtgaagcgggattcttctggtgggattttaccaatggccacttggcctttccatggtaaggtaactcatgtgatggatgaagctacaaccattttatattgtattggactttgtgttcatcttggctagtgttttggtatgtcattaatgtgcttaaaactcattccatgaatcaatgaatcattcttaattagggtgtaatattagagatactttggcttattgtactccttgtagtagagatttttcttttgtttattgtcttaagatcgctaatagtattgctcactcattggaaaaattagctcttaccttggatgattgttttgtttggtggtatggctatcttgttttattagtaccttttttcaggttgatttatatgttagaaaaaattaataataaacccaagatcaatttgtatata

SEQ ID NO: 122220 - DNA, 2924 bp, Cannabis sativa
agctgtaaattagttataaatttacatttaatgtatttttcatttactctagtattactaagtgttcacattgtattatatataccctttgtatatactacaatagatcatcagaaataaaaaagctttttctctcatgtgcttcataaagcctgtgataaacttgagtggggttatctgcgtgctatgatggaatggatgggctttgatcggcgatggacaaacttggttatgcaatgtgtttgttcggtctcgtatactatcgtgcatggtgggaaggagttgggacctattgttgctcaacggggtttgcgttaaggtgattcgttatcgccttacctctttattttatgtgttgaaggtttctctagtttgctgcgaagttatgagcaaagtggtttgctcacgggttgtaagattgctcgaggtgcgccggtcatttcttatatgttttttgcggatgataattatatttattgtaaagctactgaggaagaagcgcacaatgttaaggagcttttgcacacttatgaggtggcttcgggtcaaagaattaattttgctaagtcctctgagttcttcagcaacaatacaaattgtgatcttcgggatgctagttgtgcttcgttggaaatctatgaagctgatgaaaatgggtagtatctgggccttccatgttcggttgggaggaacaagaatgctatccttggatttcttaaggacaagcttcgtaggattcaaggttgggagggtcatatattgtctcgtgcagggaaggagctcttgttgaaatctgtagttcaggccttgctaaattatgccatgaatgtttttctttttcctttggaaacttgtaaggagttagaaagacttatgactaagttttggtggcattcagattctagtagtgggaaggctataaactggatgaggtgggataggttgtgtcgtcataagaatgcagggggattgggtttttgatgtttgagaggctttaatttggctcttcttgggaagcaattctggcgacatttggtgaatgaaagttcgttggttagtaggatttacaaggcaaagtactatgcacatggtagtttattctcaactgagttaggagataacctaagctttatttggcgaagcatcatggaagccaaaagcctgatatactcaagagctcgaataactatttctaatggggtgaatgtctcattacttgatgacccttggctccctcataacactaatggctttgttgaaacaaggcatcctacccttgttaataaaatggttagttgtcttcttccaatggattctcgagcctgggatgaagatgggtaagagatctctttgtggctcattactaagatctgatatttagcattcagcttagcgaatcgactgtcacagatggatggagttggaactttgagacttgtggccagtattcagtcaaaagtgcctataagttcttgcaggaaacaaatggagcttggagtgtggacaacaatacgggcttttagaagactttatggtcattaaatgttcctccaaaggtcagtaagttattatggagagctgcatctagtgtccttccgacgtgtttttagctttaaaaacgccatgtccttattaatactgcatgtcctttgtgcaatgttgttgcagaaactatgcatcacgccttggtggaatgtgagtttgctacagctgcctggaatcgcagcttgctggatgttgggggcgggcctgcaacatttggcagctggctcctgcagttattcggcaggggacgtgctagcgagatggaggaaccggctgtggtcagttgggctagttgcatcagcaaaaaacatgcttgatatgtataaatgtgcttaaggtagaaagggtctttctttgtctccattgaataaagggggacgacattctgagcattggaatgcacctgttatagaagatcaaagttaatgttgatgggactttgtttgatcagcagggtcggtttggtgtgggctgcgtagctctggatcatcatggtaatatgctagaagctttcactacgaggaagattggctgtgttcaacctgaaattgcgaaaataataggcatcaaagaatctataagttggattgcatatcatccatgggaccacgttattttggaaacggatagcttggtttgtgtccaagctatccaaagtaatttttctatggtttctcaatttggtttacttgttcaagatgttcgtaatttgtttttagttttcccatgtatcgagttgtgttttgttaaacgatctgcaaacaagttgactcattgcttggcaagagactcttgtttctctacatgttgtgtgcttcagttggaggattgttccgctgaaatacgttctactattttgaacaaaatgcttaattaatatatttttttattttattcaaataaaaaagaaaagattaattttttttttaaataataagtaaattttacgtaatactaaaatattgatacttgcgttttaacaaatacgccaatcccaaaagttaatagatatttatttattaaataatgaaagaatgtgtatcccatcatcttatctcatgtcattacatagatatccaataatatatacaagtgcttaatattctacaatggtgaaggcggctgaaagctttaattttgctgtatagattatataataaaagtacacataaattaaatatagcattttaatgatgatggtaggattattataaatacttaataaacttatatattatttcttgcaagattaattcatcaaattaatctagaacaaagtatcaatatattaatataaaggaaagcacaaagagtgtctatgtgtcctcttataattttttctttccatttttcctattttttaacacattttcctattt

SEQ ID NO: 122221 - DNA, 2884 bp, Cannabis sativa
aaaactgtatggcacacgtttgacgctcttcctttctccaacaaattgtattcaactttaacagtcaaacctttttttttttctctcacaaaaaagaaagaaaaaggtaattttttcttgtttgttaagttttcttaacattttcatttttcatttgcattcattttattaattttcttctattaaatttattggctaatgaaagaatttaatggaacctatatttagcatctataattttgtaagtgtcaagctaaataagaaagaatatgtcaagattatgagcataagtatttcttttccctaaaaataaaaaacagttgttcatgatgattttataatgtatattatataattatcttcaaaatagctggaatccagctgctggatagtgggataggtaaacctttgttcctctctctaataaataaaaaaatcatgggaaacatactttacttaaactaattatataatgaataagtttccattcattattttttttattattgaataaaaaattacttatacaacttgcttaatttagtatttcatggcatgcatccactcaaaaaaggaaatgaacgtacttcaaacaaaataaaataatgataataataaaataacaaattgaaaatgttgtaccaaaatttgggacaagttcaagacatatgttagtgttactaaatataaaaataaaaataaaaaataaagatagaaataaaaaatgaatggaacaaaatttaaaatacataaaaaaaaattaataaaaaaatcattaattttttgaagtattttcatttttataattcaaaacagttatttttagatttttacagaaattcacatgcaaactcacatagcaactaacgaaacaacttaaatcttaattaaaatccacatagcaacttacgtagaaactatcggaacaattattagagcaactcaaaccgtaaatttgaaaagaaaaaaaaaaggttaaaaaatagtatatagagtaattcttttaatttttttatcatattatattagaatggtctttccttctatttcaaaatagaatagtaatcctaccaaaatgatggaaaattttagtagaataatattctaatactttaaaatgtaactaaataaaagtagaataaaaattattttctttttattgtattctaattcattagctccaaccaactgacttaaattttacaacatgttccataactgaatgataaatctctgataatatatattgttaaacatagttgtacttttattaataagatcacaataagagaaattgcaattgtaataaaacttgaatggtagttgtatgttgtggtccacatgtacattaaccatggcaacaaatcaagcagctaatatttttcaaggctactcaagctcaaccaactattaaacaatggtcctaagctagggtggcaaaaaagtcattgttatactaaaatttcacatttataaattaaaatttggaagaacttatcaatgttgagcactatgtgaaatacaaatgaatcaattgtatttctaaggcttgcaaaagttataaacttagagatcactcctttatttatataatgagaatacaaattaattaggtagtttaaatcagttagagcaacagaaaaagtctaactaattttaaaattaattacaaactccaaactaatcaatattagaatgatgttttccagtcctcttcaagtgaaatagtgtgggacacacattgagcttggacttgagatatgtaaacctgtccatggacaaagctttgatcagaatatctattgtcgaatcaatagaggggacatatggaaccttaagctgcttggtaagaatttgatctctaacaaagtggagatcaatctcgatatttttagaccttgagtgggaaataagattcgcagcaagagagcagctctttgattgtcaacccatacaataggtgttgtcggtaatgtgatattaagttcaaagagaatagagcagagcaatcaaatttcagctactgtgttggccaacgatctaaattcactttctgtgctgatcatagctaccacctagtgctttttggctgaccaagaaatatagcatatccaccagctgaccttctatcattcaagcaactagcccagtcagcatctaagtatgcttggaggaaaaatcttaaggcaagtttgatatgcaatccttcattgataatgccttttaagtatctgaacagacgtttacaagcttcccagtgaattgtggttggatcacggatgaattgacttaacttgttgatgatgaagactacatttggtctagtcaaggtcagattttgtaaagctctgaatgttcttctgtacaaagtttaatcaaagaaaggctcccattaatgagggacaatgtgtgagttgaaatggtgagacttggactaggcttggcaccttccatatgaagtttggtaagcatatctaatatgtatttggactgagataaaaacatcccagtagagttcctgagaacctcgacacctagaaagtagtggagagggtcgagatccttaacataaaactctttgttatgatcaataatagcattggaaattaaacttttgtttgggctagttattaagatgtcatccacatacactagtaacactataagagtagtacctaatccatgaataaagagggaaatatcagactgtgatgccttgaatcctttggtgaacaatgtagcctttagtttgtcattccaagctcttggagcttacttataacgccctaaatcctagggacgcgacgtgtgtacttttgaaacgtaattttagagtagtagattaataatttaatcaaatctgtgataatagtaaaaacttcac

SEQ ID NO: 122222 - DNA, 1776 bp, Cannabis sativa
ccccattggacgggcatcgggcccatcggacggggcatcgggcccatcgggcctccgacttcaaaaacccaaaaaacccatcagacctcaaaaatttggcatcgggcccatcggacccgaccccttaaaagcccagaaaaattgaaaaaaaaagagtttttgagaggggtatttacggggttttggaaaagtggtcatatattttcaatgtagaaaagtattagtttagggaaaaaatattaggtatatgtaagtatagaaaatcaaatttcccgatctattgttctattgatgaacaaaaacctacttaaaaagaaaaacataaaattcctagaagaatataccataaaatagtgcatcaacatagaatttacattttcacaaaaatgttcagtgggagaagtaatatcatgaaaccagattgctcatgaaactaaagggaaccttctctaataggaggtgacggaggatgggatagctagaaaattcagagttggtcggatgtatgagagactcttgtccaactgtctaaagtgacttaataaataatttttctcccaaaaaaaaaagatacacatcacaccaaccagctcaaatcggttgggcggtggcggctcgtgtgtggtgttcaagtgaacctttgtgtgactaaggatctcacatagcacattttcaccaagtttttaataattcataaataaatattctaacaatctcccacttgaatttttaaaaatattttcatcgaacagtaatctaaataatagtattgagcatagataaatgaatctttcaatttaaacctttgtgtagtgaatacaacttaaaatatactagagtgactcgtaatcttgaactctgtatctaacgatgtaccacacacaacctttctagagtgtagtccaaaagttcgtgctttaattgtcatgctcgtctatcccagtatagtgaactctttagaaattcgcccataattttataagaagcgaccccaataccacattcacgtatgtgagtctatcaagagtactcctgtagtttggtactccactacatatagagtatatatatctcattaatagtttctatcatctaactttttatcgcttcaagaattcatgcttcacttttcttataacaatatcatgatctcattcttataacttcataacttgttattaccaattgaatctatttcttgagatctctggtcaccattatgagtgactcatcattctaagggaaataatccaattccttttgatgttttaagggctttctctctagctaaacctttcgtcaaaggattggttaagttctcattagtgcgtacatgttccactcttactgctccaatagagaggagctctctaatagtactatgtttacgaagaatctgtcgtctcttatcattataatagtagttctaatttgcaatagcagtgctaatattacagtggattaaaatagctagtatcggtctttctcgtaaagggatgttagctagcaggcttcttagccaacctgcttcttcactagcagtagctagtgctatcaattgagacaccatggtggattgtgccaaaatagtttgtttctttgattttcaaaaaaaaacaccacctgctatactaaagccactagttgctttggagtcatctgataatgtgttccaatcaacatcaatatatccatcaaggacagctggaaacttctaataatataatctaaggttcatggttctctttaggtatctgaagtgttaggatttatgcc

SEQ ID NO: 122223 - DNA, 2088 bp, Cannabis sativa
atgtaaacatacatgtaaacatacatcacttcaaaattctatattgataactaatcagattataatgggttttatttagggcacaaaacccaacaggagtgggagtagtgagaggccaccacttattggcttgggagtgttatcgaatagaacttcagaataggagagccaaccatcaactaatggtaattttgactgaagaaagtgagagggaagaagaagattttgacccaagaattcaagatgaaaataaccagctaaaactaattaaatacttcgaagaagttattttatatccaaacaatcctaaaaaaatgtgtgtacattcgaaagaattcaaactaaaatatcaattaatcatttttctaaaggcaaaccatgatcagttcgtttgaagccactcagatatagtgggaataagtccaaagataatttgccatcatctgaatatcaacctcaattatccagcaaaaagacaaaagcgacaaccatcatatttagagagacaaggtgcactcaaagaagaagttgaaaaattgttagctaatgattttatccgcgaggtgtattatccgtcatggatctcaaatccagtacttgtcccaaaaccaaatggcacttggagaacttgtatagacttttcgcatttaaacaaggcatgtcccaaagattgtttcccactacccaggatcgaccagttaatggatgcaacagcaggacatgagttgatgacttttatggatgcatattctggatataaccagtttaaaatccatgtccatgaccaagagcatacgagctttgtaactaacatgagactttattgttataaagtcatgccatttggattaaaaaatgttggagcaacgtaccaacgcatggtaaatgatatgttcgagaaccgaattggacaaaatatggaagtctacatcgacgatatgctggtgaagttagtaaaaggtgaggatcatacaaaggacctcgcaacatgttttaacattctcagaaaatacgacatgaaacttaatcctaataaatgttcttttggggtttcttcaggaaaatttctaggtttcatagttaatgtgaaaggaattgaagccaatccggagaaaataaaggccttgatcaagatgccttcaccaacaaagccaaaagaagttcaggttttgacaggaagaatggaagcactcaacaggctcatttcgaagttaacaaataaatgtcttctattttttaatgttttacgaggcaataaaaaaattgaatggaagaaagaatgtgaggaagcttttaaaggcataaagaagcatttatcaacacctccaatttcggccaaaccaataactggaaaaactttatatctttatctagttgtcgcggagcatgccattagtgcgactttagtgcgagaagagggtaagcaccagcaacatgtttactatgtcaatgaaaggttactgggggcagagtcgagatacccacctctaaaaaaacttacattatgcttaattcacgcatctcgcaaattacggtcatatttctaggcacatccaattaaagtcttagcaaatcagccactaaagcaagttttatcaaaatttcatgctttaggaatattgataaagtggtcgattgagttggggcaatttgatgtaacttattacccgagagtgtcaatcaaaggacatgctttggctgacttttcaattgaaggaataaactctgaagaagacgcagatgttgagcgcaagacaaaaacatggaaactatatgttgatagggcttcaaatgacaatggctcgggggcagaagttataatgatatcgccaaataacttcaaatttcactacacgctaagatttcaatttgatacttcgaacaacgaggcagaatacgtggccttattagcgggtctaagaatagtcgaggcagtaaaagtaaaaaatattacgtgctatagtgactcatgttaacgcagatttttgttaaccaaatttgagcctcatgatagtgatttcacacagaaaaaataaaagctatagaaataaaaatatgaacacagggttttttatgtggttttgcagt

SEQ ID NO: 122224 - DNA, 909 bp, Cannabis sativa
ttgaccatcaacttaaatacatttcccctcaaacatcgtgggtactgggtagtgaagagataccctgtttattgacagtccattattctggtcaaattcttcaacttgaattaaaaggaaccattttgtcttcactaagaacccataccctcacatgaaaaccatattcgtaccccgattaattattgtatcaaaaaaatcaaaattaaatttaacagcataccatttcacctctacaaatccaacaaaaccgaaacaatgtccatcatactaaaagtaaataaacatgcaatctaaattcgaaattctaccaagtaaattaaaaaggaaaattcccaagtaaaacaaatactcctttcaataaatgaaaagaaattataatccagagtctaaacatgtgtaaaataaaaaatagtggtgattgtgaatttgaaattagggctttgaagaagaacacttacggtagaaaagggaagaaggaaggccagaaattccaagcagaacgctacgttgcggagttttggtgatgatgtgttattttgcgctttcgaatattaacaaataattttttttattatttaaaaaaaaaataaaatagccgcggaggcgacaagagaatagaaaatgacttctatccacctgtccagtgtgcgccacacctagttaccacgcgcctacttttgatgcatctccctccaaatatttgtaatttttttgtgagaattacctatatattacttttttttattttttttttaaatttatggtttgagtttctaaagtggttgcagtgctagttgtaatagaaatttttgtgcgattttttattgcaatttagattgcagtgctagttacaatagggatttctatgtagaattccgtaaaaatgtaaaaaaaaaaaaaattgtt

SEQ ID NO: 122225 - DNA, 737 bp, Cannabis sativa
  modified_base (708)..(711): a, c, t, g, unknown or other
tgttagtaaatctaggtcctggtaaaatatattccaacaacactattgcatccactagttgatctatgtgcggtagcagaaagctatcttttgggcaagccttattaaaatgagtgaagtcaatgcagactttccacttcccattgggcttggaaaccaacacaggttttgacacccatacccgagtaaaaggcttatcggatgaaattgatcatgtcaagtcggtccacttctcctttcaaggccgcatacttctcagaatttagagcccgctacttttgccttactagccttgcatttgggtctatattgagatggtggcacattaaggtcgggtctactccttccatgtcctcatggctccaagtgagcacgtctacattattttccaaattttgtctcaactccctcttaagagcttcgaggagtccttttccaatcttaaggatcttgaacgggttctccaaaattactatttcttccaattcttccattgactccactagaacttcctcacaaacttgggcgtctagttttgatgaagtttccccgactaggttgagtcccccatggaccgtcattgtcattggttctcgaggtttagtggcgatcttgagtgacatgttgtagcattctatagcttccttctgttctcccttcaaggtcgcaattccttcggattgggaatttctgttgggttttatgccnnnnataaaactctttacaatctgattagt

SEQ ID NO: 122226 - DNA, 1058 bp, Cannabis sativa
attttttggaaaaccgtaaaaatgtaaaaaaaatattctttgaacgtaaaattgtaaatattttataaaaaatagtaccttatataattattccaaaataataaagaggaactagttacctttttgattactctacttcttttatttttccatattctttaatttttgtcttcaaattttatctataatataattaaaaaaaaatcatatttttgtattgattttatacaagaactcaataagcatattaaatgttagtgcactctctctattttacttttcaaaatatctcactaaattttttttttatttattttatcatacactataattaaaatatatatcaacttttttatatttttttaacattattaaaatattgtatttatatatatatattattcaagaaaacacttcattcatcatactggcaaatttacaacttaaagtggggcatacacctttcaactccaccaatactacaagctttttataaaaataagtgttatcttatccatttttgataacttcttctcattaacaacgaaaaccttagtcttaatactttccttaactaaggaatcaatacaatgaagagccaagcacctattttcaaacacaaataagttcatattcaaccaaattccatatgtagcacctgttattgctacatccatcaccttggttacacaaacttttaagttgcttactactcaactaatgaagccaatccacatacaaacgaggccacaacttacttcccaaccattttccaatgagcagcataggaatttgattagagcggagaatttatattcaaagtgtctttgaatgaggttatctcttgttagtagatggacattcaagacttgccaaggaataaatcggtattttagagctaaaagcgagcactgtcataatggtaattctaatggggaaatttaaatttagtgttaggtcaacactaaaaaggatactatttcaacactaaatttttccaattccaaccataacactaaaaatgacactaaaaaatatattatttattattatattat

SEQ ID NO: 122227 - DNA, 871 bp, Cannabis sativa
tcctttatgatagagacaataggtgaactgtttgctctttttcccttatccaaataaagatatgtttcccacatgctgtttaggttcacttttctctttaaatgaatttgatatgaggcttgaagtagcataaaaccaaatctttacaaaaacaaatatgcccttatcctttcgtataggaaagagccaaatataatacctagccttctctatataacaccatagccagatatattgcactttaatttacatggttcgctataagattaaaagagctttaaaatatttggtatattgatgtcggtattccaattttaagtaataattctacataaattgtgtttttttattttttttttacaatgaaatttcattgaaaatactcaaaagtttatatatagagaatagatgaaaaatcatctatccaaactagtttatcattcacctttagtgcacgaactgctaattcatgtatataataaacttgaatcagagatgcttcaagaaaattggatagcaaactagtaaaaaaatctaaaaaaaaatcctactttaaaataaagaataaggatctcctaaaaaataattaactagactcaaaaaatttaagaattttttcattaatatacgttataggtaaattaattacaattataacgttaatgtgacatagcaacacaaagtaacttcctccccattatgaatgccgaccaattgtcaattggtcaacaaatcaatttacccaagcgcgcttgcaccacctgtatccaacaaataacttcattaattccattttattttattttttttgtaaatataaagttttcactaaaatctagaaacttttttttgttttgcttttttttttttt

SEQ ID NO: 122228 - DNA, 2164 bp, Cannabis sativa
agtagtatgggaggtactggatgatgagggtgacatgggttggataggtagatgtatagctaatggattggtggagtaagacttggttgtggaggtattttcatgctgagatttgttggatgcatattcggacataggagaatttggagtagccgtggagtcgagttgagttgttcaagccaaatttcttggctctgcagcatatattgcacctcttgtaaagtgacttggtcatgtcttgaggttaggttcacaacaacagcttcatactcatgaccaagacctcctaagatgtataaaatgagatcatcatctaaaagtaattgtcctgcagcagataaaccatcagctatatttttcatttttaaaatgtaatcatgtatatcagcatcttggatatccttaacaaattgggctgcctttgggcctttcatttcagcaaatatcaaggtcagtacaattttctcattcaaaacatcatttattattttgttttctagctaatactgattcttttaaaattaattcatgttttctgtggattttgaattatgttgaaagtgtttgctagaattcttttaattcatatgatattgggaaaattttgtttcttgtagtgagttaagaatctgtaatagttatcattgactttggagcgataaattattgttatggattcgattcggttgctttccatggcaaaggtactagtaatacgataatagggtgtcgttggattggataggtttgtttgtgtaagagagatgagttcattggtgtcacatttttatggaaacaacagtaactacatattaaatttgtatgttagtgtgataaattcgtatacaattggtggtggtactgtgcacactatgttattgtggtgtcctaggtacaataacaatgatatgtcactactatctatggtagatcatacttaaaaatctgtaaggactctcaatatttgtagtgatgttcatctaacttcaaattaaggatagcagtaataagtaccaaactgcactagttactccagtgataagaagtactgtttcatgcgtcaaaagatatctaaatttgaatatgtcccttgtaatagcagtaaaaatcttgtcaaaatccattagtcactatgatacatacaattttctagtgcagagtgtagcccgtaaatcacccaaaaatattagaaggaaaaaaaaaataaaaagagggttgttgcacaaaatcatgagaagcctaactctcaaagtctaatgtaatcttctcttttcagataatattttgacccatccatctaaatgtgggaactgccgaacactagtttgcacaaactacattctctctcttctacattacacactactctcaccactacaatttattcagccactacacactcttattcttcctcctaacatgtgtatttcagtaaaggtctatcacaaacctacaaaaaattaaaattccacatggaaaataaaataacatattattatgtcaatcattacgtatctatgaaactagttcaatgataaattgtttgcacttgataatcttacaaactaagttcacttcaaatcataataaccaacatgcaacgccatcagattatagacttttttttctttatcctttccagacaaattttcaaaatattagatgtgatggtagcatgaaaagagacagctttgctgaatttgtagatttaaggtttttatagttgcctcaagatcagttgcaccatctccaatcatgactgtttgaattttttttatctctgttattgttgtagattttcaagaaagcttagaacaggtgaagaaggtacgaacactgtgatttggttggctctacagccgaaagagaagtttgttccgggcacatttgatttcgatagacctgaagctactaaacacctgaatgtttgcagctaccaagggctctcatgctttaattgactcaactgttgaggttttacatttcatgcttggtatttcttcataagaaaaaattatacatttttgttaccttttactgctgctaaactttgtaagaaattgaaagtacaacttgttgattttaatgattcagattacctagttgattatctttaagtagattgatttcaacatatgaatttcagacttgaattgagaataaa

SEQ ID NO: 122229 - DNA, 1487 bp, Cannabis sativa
atcatgaaataaattatgtgaacaatgcaacattaaatgttatttctgatatgtattaataagtaaatctgattagattgaaatgagttttatttagggcacaaaacccaacaatttccactctattgatcgattagaaaactccaatttacaaatttaagatttacgaagttttttagatagacacttagcagtttatcgttgatgtgacttagaacctccaatcgttaaacataattccacttaggtttgctgcacacataattctggataccaagtaagaaaagtattcaaatacacatatgaacatatttagttatacatatacgatattgccatatagcgagcaaatatgtgtgcacaaagagttacgaagatattgatatctaggatgttaagtaatattgaatagtgtaagataaagctaccaacatcagtactactagagtactaagattagattggtattatggctaatcatgatatatgtacgaacattcagagctcagttgacacattagatgcggttagtagacttgtggtaactgtgtgtaaggacgctcagttacaagtcagatattatcaatatattatgcatgctttttttacagagtctgtcgactcccagttgcttcccaatgtgtaggttgtggatagcaaaattaattagtggtgactcgagggttccaataaagattgtacatatttgaccgcctagacttagagggctaagagctatgggagattagctgccacaacttgtaattttttgttagatgactgattcatattattataacatatatgtattttaatttgtaattgaaaatgggaacccaattcgtaaacgtttaaacatagtttattttagtaaaattttaattattacaaattcttccttaattatactattattgtaaaatcttttgattagaaaaagttaccacaacgattaaaatacacgacgtgttttaagtagggtattaaatatattatactgtaacaaatattttcaatatgtaaactattccctaaataaatagtcaactttacttaattttttggattgagaaaaagattattctttttttttgtgtgtggattatttgttatactttcaattaaaagcgtaataacaaaattgattctcttatgttaagtaaaaatgagatatgtaagatatagattatttttgaaaaaaattaggggtactttattaaaatctaaaacactataaaaggtgacatataattattggtgtatttactatttttatctttacttaacatgagaggaaaaaaatatacaacaccgaattacaaaaaaaaaaaaaaaatctataaacaatcaaatagaagatgaatagtcacatttattatagggcaatttacactaatatatacattatataattttattacaatatatgtgcataataatttattttcatataatcatacattttatctattatgaagaaaattatt

SEQ ID NO: 122230 - DNA, 1745 bp, Cannabis sativa
aattttcaacgagtccctaatttatttttaaaaacataataaggttgatttttcaaccttgaaaacgtttcgaatgatgcctaacatcttccaaatctagaggaggtgttagcatcgtagtactcaccatgagtgttacttctgatcgaagcaataaggttaatttttcaacctcaaagatgttcccaattatgctcgacatcttctgaattcagaagtagtgttagcatcgtaatattcactgtgactgatattagtcaaagtggtcaaatcactaaagatagagtctaatcatcaaacatgttgcttatttgtgatcgtataaagcaataaggttaatttttcaacctcaaaaaaattttgaatgatgcctgacatagacatgctaatttttgacaaagaacaatttcgaatcaataggatatttcttcatatatattatgggagacatagttactaaactctaaaaattatctctactcattatcaatagaaataaataagacaatctttttttttttatatacaattaatatctcaataaattttgaacactattttttttttaaaaaaagtcaggtattacattcaaccttgaaaacgttctgaatgatcatcttcctgtaacgcccttatttattaaaacaaaatgccataaatgaactagcatcaaagtactaatgttgtctttatttaaaaataattattttcaaaatatgggtacccagttgaaatcaaagtgttactatttaaaacgaaaatatagctcttttcttaagctttaaaacgagataaggatgttttaaaatggatcgaaattgagagatatattgagtttttttattaaagatacttttctaaaacaaaacataaaacgaaatatcctacccgagtaaagataccgattttcgacaagtaagaactccaaataagggaaaggtttaaaatatggattataaaattatctttctaacgataccaagatcactggaaaagaacaaatattgagagagatatcacacttttattgaggcgatatcgaaaggaaaactagaaaaactgtaattcgacaactagcataaaaacatgaattttggacaacaaaatatttagaattagggaaaactctcttcacaaaaaaatgtagatctttaaattatctttaaaactgtacctagatcactgaaaacagacatacgaaaagagagatatgatagttttataaaatactattttttcgaaaacgaaaattaaaaaaaaaaaaaaaacaactacaaatttagattacattatcatttatacctaaagaaattacctcaaggtttcaagttgcttagttcaaaagacacgaaaaaaatattgatgaccaattacgagtatctaagtgctgactccaaatctgcaggattagaattctcgatttggtatagtaaagatgatgttacttttaaaagagaggagaatatgataaatatggatgctaggtttttgaaaaaaatatatggtttattaggtgtatacgcctatattacaaatcatataataggtttaaatttcaaattaaaagtctaactaattacctattaaaattatcagtattgtaattactattaattgatatcaatttaaatttaaattatcctaataaactagcctagccgtatgacaagtctaactaggaccggccctgaaataaagtgggccataggaattttttttttaatttttgggcccttatgttagaa

SEQ ID NO: 122231 - DNA, 633 bp, Cannabis sativa
tcacatttgagctattctaagcttttacataagatatctcaaaaattcaatcattctaagcttaactgaatcaaacatataagaaatagagagagaaagcttcaaatacttgttgacttcgcctttaattttcttagaaaattcattgaacacgctgaactgacgatttcccgaatatccattagccaaaggcaaccgtaatctcgtagtcgaagcctataccaatcaacaaatccataaattttaaacattcaacaataaacataataatcataactataaattattcggataaacatggaaacctgtggtggaatgaaaagacgttgtctggaaaggagaaaatctcgaactagcttcctggccgccatgaaagaaaaattatataaaattttgatgttacaggaaataattatggggtaaagttgaaattttgatgctaatttcgtgagaaatgggaaagaagaagaagaagaagaagaggggtacagtgtacaccctgtaaccaaacagaacctagggtttatgctttccttcttttttgatatttttcttttgggccatatcccataacttagcccaactatctcctaggcccaatgtaaagtttaattagggaaacttacaaaaata

SEQ ID NO: 122232 - DNA, 521 bp, Cannabis sativa
  modified_base (54)..(59): a, c, t, g, unknown or other
tcctattattaaactagagattaataattaagccttctctacacttaattattnnnnnntgaatttaatacatttaattaagagaaaattacctcataatacgtattttgtaaattatttacgtaaatacctttcaatactttaataccaaatttttgttgaaagattaattatgcttgtaccgagattgagagttaagactctctttttcgctagcagtaagcgagtcttttttcattttttttaatctgcattttcttttcttaaaatcatcatgacttcatttaatttttttttacttttctcttaataaaaatgacatttaaatatctctttcattctttttttaaaaaaaaattataaaaaacttctagcttcacttgtaactatttcaattaaaattatattattgttgtctaatttttcaaatgatatcaatttgatatgccgaaaacacatatctctttgctatcatcatagaaaatgaccaaagtaataaataaattattagtttttttttt

SEQ ID NO: 122233 - DNA, 3038 bp, Cannabis sativa
  modified_base (1623)..(1626): a, c, t, g, unknown or other
tataaattaaagtttaacatagtaatatataaaaatatgatatatgatccaattcaatataatacaatacgacataatacggcgttccaaacgagcctaaatatgataaattatacatatatattattatataaataatacatataactctatgcataaaagtataactcttaaataattctattgtcaattaatataatgtatgttactatataatcaaatatataacatatataatattaattatatacaaaactatatatgttacatattttacacatacttaaatataattatgtattatatacacataatattatgttgtgtgttggccaaatatcaaatcttttccctaaactactcttgcagtaccgaatataaccgaattaatcaactgcaagagagagagagagagagagatttatagtgagttgtttagaagaaaagagatgagttgcccttgagtgtttgtaatggtgtgatgcattgtttgtcatcatcaccacttgtaagtcgttcaattgcagaagcaaaacttctcaagttgtgtaataagaactgttgtaatctctcattaaagatcagttaataaagactctctaaggcccttattgtggctgttttctggtcgggaatgtaggcaaggtgattcactattaccttgttcgaacctcgttaagttcatgtgttctttgtgtgtgtttaatgattttctactatttatgattgttgtcattatagtgtattgtcttgaattggtttcattgattattattgtgttagttgtgttattgccgaggtgttctttcacaataattggcatcagagctcaggtttcttgaagcatgaacagaatcaagaaagtgatttatggcttctgcacgctttgaagtagacaaattaaatggagctaatgattttagactgtggaggattaaaatgaaagcatttctggttcatcagggagtataccaagccattgacaaggaagaattgaaagagttgggaaatgacaagaagaagattaaagaaattgaaacaaaagcacatagtgccatcttgctgagcttcggatatgaagggttgagagaagtttcaaatgaggaaatagctttgggattatgggagaagcttgcctcgatttacctgaagaaatcccttactaacaagctatacctgaagaagaagttgtacactctcaagatggaagattcaagagaactcagaaagcatcttgatgagttcaatcaaatcatcttggatctcagcaacataggtgtgaaaatagaagatgaggataaaggtatcttgttgctcagctcactacctaaatcctatgaacattttgtggacactatcctatatggcaaagaaactttgaccatgatagaggtcaaggcgacactcaattctaaggagatacagaaaaagaatgatgagaggtctgatggtgttgtagacagtttgtttgtcaaaggcagaagtgattcaaaagattccaagggtggttacaacaagacaaattataagaacaatcaaaacaaaggacataatcaagggtacaaatcaaaaacaaaatccaaaccagaaaaacagtgttactactgtaagaaggaaggacannnnagagatgaatgtagggcactcaaggcaaaattgatcagagaaaagggaaaggaaagaggtgatgcaagcattgctgttgatggttatgagtctgctgaagctttggttgtgacaagtcaagaaacatatgtgattggattcttgactatgggtgttcattccatatgacaccaagaaaagaactgtttagtgaatttaagaaaattgagggtggatcagttctgttgggggacaacaaagcttgcaaaatctcaggaatgggaagtgtgttgatcagaatgcatgatggtcaagtcaaactcatacaagaagtcaggtttatccctgaactcaagaaaaatttaatttcagttagtgaacttatatctagaggttgcactgttaaggtagacagttcaatgaaagtaatgaagggttctaagatagtaatgaagggagacatcaaaaatgacatttactatctgcaagaaaaaactgttgttggaaaaaaaattagttgttaagaacagtgatagggacaatacaagactgtggcacatgaggttaggtcatgctagtgagagaggtctctatgaattggagaaataggacattatcaaaggcaaacttggaaagaaattgggatcctgtgaagagtgtgtgtatggtaagtgcaacagagtgaagttcactctaggtttacacacaaccaagggcaaactggattatgtgcactcaaatctctggggtacttcaaggactaagatcattgagggtgctagctatttcatgagcattattgatgactacaccagaagggtttctgtgtttctactcaaaacaaaagatgaagccttcaaaacctttgtcacttggaaaagattgatagaaaacaaaactggtaggagaattaagaagctatgaacagataatggtatagagttttgctcaaattagttcacaaagttttgccaagacaatggcatagcaagacacaagacagtgatcaagactccgcagcagaattgaattgccaaaagaatgaatagaactttgcttaaaagggtgagatatatgctaaggggtgttggcctagacaagaagttttggggagaaaatttgcaaactgccagctatctcatcaatagatgtccctcaacaactctcaaatctaagactcctcaaattgggcctcatctctttggaatgtctttgaatctaccattgtcacttatttcttctggtcgtgttttaagtctgtcgttagttattattccgagttatggactcctattttgtcctttcatattttgtcgttttatgctttattttgtcttcttgcaacttctcgggctttttggtattttatctagtagtgggcggctttgttttttacgtaggggtgttcacaaagtatccgatccaatccaatc

SEQ ID NO: 122234 - DNA, 1043 bp, Cannabis sativa
agaaacaaaaaaaaaaaaaaaaaacttggcatatcctccacgattccagccgtatgaacaaccaccattgaacccctactaatgggggtctcaagtaagtcctactctctctttgggtttaaagtcactttggggacaatgtgaaattttaagtttgaaggaggggcttaattaattttgtttttggttgtttagttttatttgtctattttagttgatttattatgcatagatcaattttgttaatgttgttatttgtggaatagattgaaattttaaaccgtgtgctcgattcattaactctttggattaatttagatgcttgtgaaaatttttagattgatgttgattttcagtgtttgaagtgtattataattgttttacttagttttgtggaatgattgcttgaatgatgtagaacttgcatgatttattcttttgatgtgaaatccttgataatatttgctaagaatatgatttaggcaatttttttggacagtttaagcctttcaagcctaccttcatgtgattatccttaatgtaccaagttgagcctaaatatttttttttaaattgtatcacctatttaaacttaaaatgtagccattcactttttttattcccaatgcaccttacatttgtcataagcttaggaataagtttggacgagtgaaaagttgtgtgagtgaaatttttcaaaaattggtgattgagaagagtttgaaaaaaaagtgcaaagtgttttccgccatcactaagaagaagaaaaaaaaagcaaagtatatttcttgttttttcttgtttcttcttgtttcttgaaaaaaaaaaaagaaaaaaagaaaatattaatttaaaaaaatgatgttggaactcgtagttatgaaattctcaatcattgaaatttttgggcacctttcgggatatgcaattcattttgggtgcttgatgatttatagtgtgcttattgtataatatagcctaaatgattttttatgtacctattacctaagccatgacattactgctgggttttatgccctaaa

SEQ ID NO: 122235 - DNA, 962 bp, Cannabis sativa
tgtacaactgaaccaacagaataacaaacataacagaaacatgtaactaccagtgacagctaagcattatctaacacccccccgcaaactaagtgtagctaatgaggctaagcttagtttggctcgaagaaaaacaaaccgagtggtagataatgccttggtaagaatgtcagctaactgatcacaggctggaacatgtttgacaattagagtcttttgcaaaaccctttctcgaacaaagtataagtccaattcaatgtgcttggttcgagagtgtaaaaccgggtttgcagccatcatgacagaacttctgttatcacaccagatggtgggagtagtcggaatatgcagaccaatctcagagatgagagcttgaatccaggagatttctgcagcagtgtgagcaagactacgatattctgcttcggtactcgatcgggagacggttttctgcttcttggaggaccaggaaacaagatttggaccaagaaaaacgcacatgccagaagtgctttttctgtcatcagggtctgaagcccaatccgcatcacaaaagcctgttatggtaagagatgtagctggtttaataagcagaccaaagtcaagggaaccagcaagataacgaagtatctttttgactgttttccagtgtgcttcaaggggagtgtgcataaactgagacaccttattaacaacataagaaatctcaggccgcgtgacagtggcatattgaagagcccccactatgcttctataaaactgaggatcttgaactgggtcactaccctgcttggaaagcttttctcctcctgtcataggtgtgggaagaggatttgcatcaagcatcttagctctgtctaagagatcacctatgtatctggtctgacagagatgaagtccttgagaagtatattgcacttgaatgccaagaaaatataacaaagagccaagatcttttaagg

SEQ ID NO: 122236 - DNA, 1537 bp, Cannabis sativa
tctctctctctctctctcggtcggggttattggtttcgaaagcctgcgcgacccggggtggtcttaatttttgcatcgagaatcttctttcttggggcgctggtgccaacgaaacaccacggtgggtctcaatttcttttttcttttttgcttgaagtagtgggctcagtttcttggtttggattctcagtgaggtttttgtattttgatatctctctttttttttttttgaaagctgatcttctctctgtttaatttatgtttttttttgttcatttattttttctcgtttgcaaaatattaaaacaagaactaatgtagctacagacaccataataagagtcgggtcgagctcattttgggttttttatggggttgggtatttcatgaggtggccggagtagcttcagcattagtggcgatagtgacatcgcacaaggaagaagcaaagagagtgtgaatgtaggattagggttattctacttttttttttagatcttatacaattgattttttcttatatagaaatttgattctttacttgtataattgaaaatcaaatgtgtaatttttttttgctaataaaatgtgatatgtgtatatatctatattgtgttattgacttaataaaataaaattaattcactactacaaaataggctattcctatctgttgataagagggttaattataaaaactatcgggaaaggtaattggagattttttccattagttttacactgatgaaaaaaaactattgggataactattgacagcggtataaaactgtgagcaatactataatgatttcttttaaaaaaataatgaattccaatcgtttttaaatgttgagaatactaagtatagttaacatgttataactgtgggaaatactagtattcccaacagtcataaactgttgggaaaggttcattttatacaaaagaaaattggctcgaaaaaataacagagctttatacgaaaatttcagagggcccacgcctctttccctccgtcatctcttcttcttccatctcagcgaccacaatgcctcgcctcgagacctcagcgaccaccgcacctctcctcaagaccccagcgaccaccatgcctctttcttttcccgacccctttctatctcaatcttctcttctctttctctttctctttcaccaaccccttcccatcaaacctagaacccccgccagagaaactctgccacattttggagaaacgcccaaaagtatttcccttgcatatttttctattttttcaggattgctagttattttgattggaaaggacaatgatgatttatgaatgataagtaatgaactgtacaaatttcttttttatttagtttatgggtcatgctatcacttccactttgttaattttagagcttgatcatcataatagaaattaaagttgaggttgggttgactgacctaactcagatttgttgtattctttatgtatgtgtttgattaaattttgggtaaataccgttttgaactttgtgttttgcaaaagtta

SEQ ID NO: 122237 - DNA, 947 bp, Cannabis sativa
  modified_base (906)..(907): a, c, t, g, unknown or other
aaaatatgtccatttaaatattatttattttctgggatattacaatttttttagtggcttcaaatgggtggattgggtgcggaggaactacttccaacacggtcacacctaccacccaactgaggctcaaactctcgtggttcacaaggccatcgtgggatgagtgttctgatatttgagggaacgaccacaggtgcgccagacactggaacaaaatcgggacacgggaggagatcataagaatcgggtgcgccaaacactcgcataaaatcaggacgcaggaggagatcataagaattgggttcgatttaactgtgcctagctgcaaatttttaatattatttgcttgtttgctttcatttttaaaactttgtaatgttgattattgtcaacaaataactattttgccctatcttaacttttatttaaatttgaaatattaaaagtaataaaagtgaggatattttcgtctagataaaagttactttatttcattacaatctaagcaaacatcacctatatttgtattgtttattgaaaaaaaaattacgtttatcattttaataaatatttcattgaaataaaaaaagaaattgtatagatctttttcctccagtaacgtattttaaggtaaatcttcacctgctccttccatattttaatgagtttaaaggtttttattacgtacttcaaagcctgtacggagtacgtcatatctaaattttaggcatcaagtgtttgcaacatatttgggtattatgagattagattttaaatttacactttattttcggacatgtttctgtttatggttttgtgttaatatttaatatagtatttttttagtttataaaattccatagtacaacctattggaaattatttttccaggatcttagatctacnnacaagtatgttgattaacaccgtaaatatgaactttctaa

SEQ ID NO: 122238 - DNA, 2237 bp, Cannabis sativa
ttgactggaaggtgccaagttagtgagtgggagcctcatcttgtcatatgttatttgaaaagaatattgaaggaggctccattttccaccatgtatcttgccacagtcatattcccaattttgtgcagtaacgaccagggagtcgttgtgcgggaaactgacttgggcaagatctcctttcgagaaagagatcgtgggctctctaagattttgttgcttagagtctcgttctttgcctaccatgatgttgcttttgggctcgtgatagagtgttcgagcatagcgctccttagctttgctagtcttgcctcgatatgggctctgccaatgatgacccccaagtatcctgccatcagaggtttgggcagagttgctggcacctgcctgtgcgcctgacaagagatggaggctagcctttcgagatggaggccaaccttcaagaatggaggtcaaccttctcgaaagaagtacaatcagagccactacctccaaatttccagagtttaagtacatgccaccaggactgaggctccagtattacgaatggtcctcccgaacaccaatgtcccaggggtaggagtgttggagccaattgggaaggcccctatcagctttccaaagtaatcccaccaggaacataccaattggcacgcatagatgacacggtagtatcaaaggcatggaatgtccaacacctcgagaagtactatcattgaaggagatatggaattcaagtgtacaatgctataaataatgttatacacttcggggcaaggaagcaagaaggagagaacaaaaaaatcaactcggcaaggattagctaccttggttgataaaagaaatacacacctcctcgcaaaacccacttgtgtacttgtgagcaaaaaaagtcactcggcctcaagagtgacaatgtcactcggccatgagattgacaacgtcactcgagcatgagaatgacaaagtgacttggccgtgagagtgacaaagtcactcgaccttgagaatgagaagagtcactcggccaagagagtgacaaagtcacttggccatgagaatgacaaagtcactcggcctcaagagtgacaaaagtcatctagccaaaagagatcttgaaagatactcatggccaaatgctgaaacaagagggacacctctcagacgtaaaaaaacatttacaaatcaaaaggttgtagcacagtcaagtacaataagctcccttacatccaagtaaaaggatggatataaaaaaatcaagaggttgtaacgcagtcaagtacaataagctccctcccattcaagtaaaggatgaagaaataaataagaggatgagactgctcaaagagcaatactcactgaaataaaaacctgcttatcacaacaagaaaagtcatttggccaaagaataaccctcagagtcactcaactaacaacagttacaaatgttaaagatgtggaggatggaaaaagagtcttacagccacccaaagggaaagcatgagggtcgtactaataaatcctaaagaccccacaaaaaaaaaagaaactactggccatttctagtgttggcgccctgacggcgcttagcctcgtgtgctgctcgttgttcttcacggttctttttgaattcctcaaccatttggagtgccatggaactaaaaacactgaagtccacatgagaattagtaaaccagaaaaagtacagtaaacgttccaccttgttagcctcacttgtatctctcttcttcttcacgatcttgatacgcctctcaaactgttttatagagtcattgaggttgtctcgccttgttgggcttcatctttgaacttcttgcaaagggctagtgaaaattggagttgtcaggatagttcctcaatttagggtgttgcctagttcaattaagcctaaagttcatttaccctaggccggtattgcctgggtctgaaagttgtcgtgctctgtgtttgaggcagctaactctaccaaagttgtcttgagacgcaaatgaccatcgcaactggaagagctggaggtagggatgtattgttggatgatataagtctacaagggaaatccaagtataagtaagaaagacatcacaaggaaatgatggtaagcacgggcttcacacttgcaatttttttcaggtattcgacaagctcgagtcttaatttagggtaatccaaaaaggaatggggaagatgttgggttttgtgccctaaataaaacccattac

SEQ ID NO: 122239 - DNA, 2897 bp, Cannabis sativa
  modified_base (382)..(384): a, c, t, g, unknown or other
  modified_base (2843)..(2847): a, c, t, g, unknown or other
atatatataaataaagaacgatgatacttatgatgatgataacagtactaactattaggcaattaataattgatatgatatttggatttttttttattttagttgaaattgaaaaaaaaaaaacccttaattcggtttgggcgggttaacccgaccaaaccgtcagtcgggttcagattttttttttaattgggcaggttgcatgcagaattttacaaccccgatctttacgtggggttggaaaatatgtagtataaaccaacctatgtacagccctagttcataatatggtttggtgaaagtaaatggaagctcaccaatgggtctcttatagtggcgagaggaaagaaagtgaatactctctatgtcatggaagctaagnnncacaaaggagagattaatgcaattgcgatgtgtggaagaaaccctcaatgtgatgacctcgcgattgaagatctatatggtaccttgtatcgaaattctatctgatattgaggtagtcaggtggcgtgtcccgtttatgattacggcagtacaagatggaaatcggtgttaggacctgtgtcgaaagtcttcctcacaaaggtgatggtcaggcggcgagttcctttgttgatagcggcggcataaggcagtttcgatggacgggagaccacgagtatgtggtcctatgtttgagggtaggattgttgggaatacaaccaaagtcccacattggttaggaatgggaagaattatggctatataaggatggacactgctatattagtatgaggccttttgggaaggtgcccaaaaataaaccgtcagggcttaggcccaaagcggacaatatcatactaatatgagagtcaaggtgagatagcggccagacaaggtggaagaaaggggcccaacagtttgtattgattttatatatatatgtgtgtgtagggtgctaatatggagattagggagatcttatatgtgatacttgtaggattagattattattgtcttacgctgcaatatacagatggaaagtactacaaagttacaatctaaaaaatgggtccaaaaattgatttggaaatgtttaggcttactaaacattatccaaggccaacaacaactactgcatcaaaagaaaaataggaagaagaagcagcagcctccgaccagaacaaaggctgtgttggaagcgtttgttagttattctgattgatattttcttcttcttttgttgctcttgctttagttttggagtgtaggaagaacttatcacttgactaaaactaaaagatctaattattaggtgtgtgttgactggatttttagccaaccgacgcggagtcgtaataaatgagatataaaccaaaatcgcattaataacaccggaacttgccataaatataaataaaagacaccagagtttaaagaggttcggcctcggacgtcagaaatagcctactccccttgtattttattgatttgagttgcaaaagtcaagatcaggttcttgattgcaaaaagaatgataaagtgtttatttttttaagtgttcagaattgcccatcccaagtcatgaatgaccccttatataggagagaggatcggtgcttcttgctttaggagacgcgaccaacgcggagctaccccaaccgtctccttgatttttagaggtagttgtagtttgatttttattataatattccgctattttcatgagttgacaactgtcttagagcctttcatgagatttgaatatttgaaggagctactgacgacgatggtccttatgggtgtgacatggttgtcaaccacctttggggatgaagcccatacttgggtaaaacacccccgggaccctcgttgaggggggtgacaaccatcattcttgggtgaccccctcgggactcaacttgaggggggtgacagccgtcctcattgggtgacccccggggacccaacttgagggggtgacaacagtcctcattgggtgacccctcgagatccaacttgagtggggtgacaaccgtcatcgttgggtgaccccctgggacccaacttgaggggggtgacaaccgttatcgttgggtgaccccccggaacccaacttgaggggtgaccaccgtcatcgttgggtgactctccaagatccaacttgaggggggtgacaaccgtcatcgtttggtgaccccttgagactcaacttgaggggggtgacaaccatcatcgttgggtaaagataagggggaagataagggatggggattagttttattatttgaggggtaaatttggtactaaaaaaagaggtagcatattttgttgaaagtttaatagaataacatataagaagaccatgcaacatatttaagcatggattgtcaaatttctcttttataaatctataataaattttaagagcaatgaaattgtatatcttattttgtaaaattatctttttatattccatatatgtaatcttgaaacaaagacaggtcagatgtcttcattttacttctttccttacactctatctaatttgtagttttttctatttttatttttatttttttaactatttaaactatttttatcaattaaactttatctctaatataattcaataagaaaatctaaaagacatgcaatttgatatttattatgttattaattgttaaaattatttgtattcttctaactatttgtattctttatatatctcttactcttttatgtatatataatgtctcaaaactcaaatctaagttaaagttttgtgtccactcatgtaacttctgaactagcataggcgtattacgtgatttttaaacgtaatgtgcagctcgttgctaatnnnnnaggtttatggaaatcgtgattaattaaaatttttgcttttaattaaactt

SEQ ID NO: 122240 - DNA, 885 bp, Cannabis sativa
  modified_base (36)..(40): a, c, t, g, unknown or other
ttttttttgtttccatcaatgggtattacccattannnnntgttccatatatatatatattatacttaaatattgtcatataggttaccatataaattttactatataagaagaaattttaaattacttaattcattttagcaaaaataatatatttacttcaacatttaataataaagaataatatatatacatgtatatcataaaataaaaataaactaaataaatttgtggtcataggcatatcctagtaattccacactttttctcaaaaagaggagatctcaagttttaatcctctctcccaatgtaaaaaagaaaactaaataaatttatagaaaaaaatgtactaaataaatataattgattattgacaatataaataagacaaaacaaaagaaaaaaaactaaaaaaattaaacttattacaaagttatgtataatttaaaaaaaagaaattaaaattttaattaaagtaaaaaaaagtcatatacatatcaataagtaaaatactaaaggcgagtgtcaagcagcaaaagatatgacataccgttattagtgcatttcaatatcagattttataaattatgatttaataaatgatatgggaagactctatttatatatatatataaatactaataacaattaactatatatggacagtataaataagacaaaaataaaaaagaactaataaacttaaaaagttatatataattaaacaaaagttaaaattttaattataataaataaagatatgtacttataaggaaaatgctaatgtatttattttccatgattaaaaagaaaaaaaaaagatcattcataaaattaaaaaaaaaaattactaataaaaataaaaaaaaaattacgagcaaaaaa

SEQ ID NO: 122241 - DNA, 775 bp, Cannabis sativa
agatactaactaatatgctaactgtaataacagattacagtatcaggtaaataacaaataacagtaaacttgataaacttgataccctataaaggtttatataggaatgcctttataattttatgtgcagagaaaatagctgctccaacttccaccaaaatttgaaaatgtggatagtattgcatccacataaaattagaaatcaattggatccacaattcttcctaactgtgatacttgtgtccatgcactgctgaaatacttattcgagcttgactcatctccatacgtacttcacaataataagaggaaagtcacatctatctttacttgctatggatatattgcatgtccatcatttgctcaaaagcttccttttcaattattttttatgcataaagtaacattcctttaaaagatagatcattttgtcctatgagaaacagaagatctaattgtttccatgtcttgtgagaaattgcatcaaaaagctacatgtgcatttgtatcattcccaaacccacaaataggccaattgctatgagttgaacaatttctacttagcaaaccacttaagtggcgtttagttaggaggattaaaaataaaggaataggaataagaatagaaataggaaataaataaaataaaatttaaaattcataataaaaaattatttttataaatattattaattatgtagatgtccaaatcttttatttattaccattaatgtaatcaatattccatttgtcttagtttcttaatatttgactc

SEQ ID NO: 122242 - DNA, 673 bp, Cannabis sativa
tatattttattaatcacaactatttaatagtaataggttaaaaaaaaatgtaactatgattgatccctcttcctacttcaaagggtatatatattattgtcttttttttttggtgctattttttttttggtgctatataatttttttatcagcaccctaccaaaaaaagtaatttcaagatatatttcaatgatgaagactaaagtcaaaaagacattggggaaatgatttttatatataatataatacaatataatatatttaaactataatgacagtttggtgaatcattaagagaagaagtgcattggttagtggtgcgtaaattaatattaaaaaacaagtagcactaataagacaataattaggagtttgatatcaaagttgtgctgttggtacgattcgatcctaataatgacaaatgtgaaatgacaaagagacatgtttccctcttcggccgtctatagcggaatcttgctgatcccatattcctctaaagttttcaactcccattattggccttttcccaaatcaaaataactcataagagtttttgtttaactacgtagtgatataaatggatctcaaaaaaaaaaaaaaaacttatttttgtctttttctaaattattttttacaattttttattatatttattttacaatttttttataat

SEQ ID NO: 122243 - DNA, 1042 bp, Cannabis sativa
tcggatggttggaaggctgacattagcttagagaagttaaggtgtcgcacgggtgttctactgcttgaaaaggtcagcctgtgacacacagcactacacatcacattttggtagtagaatttgaggatttttaaggtttatgtagtgcaaaatttgaaaattacccaaactgcatgtgcaaacagatctaataaattagggcgaacactctacttttaaggtcaatttttgcaagtcttttaggcaatgtttaggtgttgaatctcacaaatttaataagggaaaagagtattgaaaagtagtttcttatacttttttaatatatatttttttaaaatatttatagtattctatattttatgaaattcaaacataggattatgctgtttggaaagatgtcgatcttgtatgtttttctttctattataaaatcgacctaataacaattttaatattttaaatggacgttgaattatgcaatgtttatttaaaatatgttcgtgtggtttagttggacaactataataacctgcaaattgatttttaaataacttttttgttttcttaactttgtaatacacatcatgatgatgtccatgtactcaaaatttgagatcttctagtgtttctaatggtggaaaatggtataatgagtaggtgtccaaaaagggaacaaactacactttaatatcattttatagcactatagtttatttttcaccatatctattttaattttttaagtaatagcaacagcttccatcatgcaaactaattaaattaaatatcaattcaaatttcaaactagattagtattaattaatcagtaattgttaaattttgtctcaccttaaaccccaaaggagctcaaaacgcgtatgaataatataaattattccatttttacaaaaataataaagtaaattattattctatttcttttctctttttgcccctagttttttggctttattatcacagaatcctttagcaaaaagattagatcacacagtaattgttagagattttataacaatggaag

SEQ ID NO: 122244 - DNA, 1819 bp, Cannabis sativa
cactctttccctacacgacgctcttccgatctcagggagtgctctctccgtcttcattcccgttaagaattttaattcccatatctttgcttattctctatcaagaacagggcggaaaatcccttattgggggcaagaccagggcggagaatcccctaataaaaaataaagtttacaattaaaatttaaatatatataatattaaactacataaaaaattaaaatattgaacattaattattattcaataaattaattatcatccaaaacacaactttaaattcacaaaaagaatataatatacttaaaaaaatacaaacatacattataaattataaaaaaaattattaaaaatataaaataatatactaaacaggttcccgttggggtgagaagtgtgattcccgtcctcaccccgttcctcatttagaaggggaatccccgccccattaagggcgggtctccgcgaggcccatccccatggagaaatatgcatccctatttgtgggacatgagctaagaagcttgtgatcacaatcataaagaaaattagattcaatactcattttattgcccttttttaattttacccttccttttaaaatctatcatttctaccttattggacaaattttgccctgtcgatctcttttgtgctcttttcacttttatttttatttttatttttattttctctaaataatttaagaaatttttgtactcttcttattaactattttcaactccaattgcatttgtatgcatgcataattaagcttgtaattttaactacaatatttattatatacggaatgaattaagaagaaacaatgtttactatatcatctacattggtcttatcaatcataaaaaattaataaaaattaattatattatttaagtatatttttctcattactattctctaagttaattaattaattaacaatttttgctataacatccatgtcaaatatcttaataaataatgaatcattacatatgtggcataaacttatcttagataaacaatgtgatttaaattaagtaaacaatatgttttattaggtaaatagtatatcttcattttggtaaatgacatgcaatattagctaaatagtgtagcatgctttaaaataattaaggtaaacaacatatctaaaataaaataaacaacatactttaaataaagtaaacaaaattaataccctataataaagtaaatgatatgctttattaagtaaacaacatagattgatttaagtaaacgacatgcaatattaaatgaatgtgccttaaattaagataaataacgtacttaaacgacatgtcttaaataagacaaataaaaattactatcctaaaataagttaaaccacacgcctattaagtaaacaacgtgtctaaaataggataaacaacatattttattagtaaacaagatattgttcaattataaaataaaatatattttaatactatttttgataaataaataaaaaatttaattatcaattgatttccaaaaaaaaaaaaaaaaaacgagttcgaattctacttaataagggtgtgcttacctaacttgaaatgaaatattgtagttatttatttattgcagcattcatttctttatttttacagcaaatattgtaattattttcttttaaaaaatatattgtaattatttattttttttaacaaaaattatttttgtagttattttattaaagaataaatatagggaaatttacatctcaacacgtttttgttaaattaatgccaatattaacgtcaatttttaaattattgatattaatgt

SEQ ID NO: 122245 - DNA, 1012 bp, Cannabis sativa
  modified_base (939)..(949): a, c, t, g, unknown or other
taatttttttactttcagtcataacaaaatttgtgactaaaagtaaaaaaatattataactaattataaatcattatttttatattgtgataaaaaggtacgtgtagatattatattagtcaaaaaaattaaattagtcaaaaaattacattttgttgtgactaaatgtatttttagtcacaatattgttgtgatgactaaaactaaagtatagctagtgacaacttgtatataaatactatatattttatgttgatgtaattttttgttatgactaaagtcacatttagttacaaaaaatttatgttatgattaaaaaattgtcattaaaagtagttgtttttttgccgtgctagtaccgtcttttgtatcaatatcgttattggtcaaactaagtatcagactcatatagtttgatgtacaataaattttaataaatatagctattcaatcgcaaggcgacacatctaaaaaatactgatcgctactagtggccgataatattattattattattaaacgtacgtgtacatatagatattcccaagatatattttcatctacacacgtgcaaagtcggctaaaacaaaattcaaaaccacaagttcttattaatttattaggtacatatatatatttacatataaaatatatattaggggaattattgcctcgatctctatatcttaggcgaatgttaaaaaacaataatcaacaagcttatccatggtgggctcatctctagatatgcaaataattcttagccactttttttttttttttcaaaataaatacaataatatatatgatgacatggatgattatgtatatgttaatttatagttgagtaatgatatatttgtttaaaatatatactcaaatatcatacccgagcactcacacaccaaattaatgatatatatataaatatatctttannnnnnnnnnntgcctatctaacggcaattcttggtttaacagaatatactcaaaaataaaagaatattctgtt

SEQ ID NO: 122246 - DNA, 986 bp, Cannabis sativa
tgttttgtactctcttaaatcacatatcacttttagagttgtttctagtactcttttagatttctagcattctttatttagcatttgttttcatgttatatcgttattggtgttattaaatatcaaattttatataattttatttaataatttttaaagaatattgttaacgaattgtaagacatcacatataaatggtactaggaactattgatacccaataacaatatttttttttcttttagttcttaaacttgactttataactcatccttattattttcactcaacttacttacacaattccaaattagactatcttcaatgaaaagtataaattttggactaaacttaattcaaaaaataagctaatgttatattttgtccaaattttacaattgtaattcaatgcattagggtaaaaaaaagtcaagtcagcaaatgtattaaattaaattttgattaaaaatgtataaaaatctaattgaatatttaaataaaatgtaaaaagtcatttaatttttaaggtactaatggagtcctaaaagcgtaaataaaaaggtaatttttattgtagtgtaaaatttaactcatgttatattttatgctaattttaatacaacttttaatatatgtcaaatttaaactatattatacactatcattatcattagagtttaatttcattaacataagttaaaatatacatataaattttaatgatcttaaagactcattaattgtcaagagaattatctttgtgtgtgtgtgttttctcattgtgtggagaaaaagggttgttgactgaaagcctttccaactatattagttggcattaattgaaaaataggaccaagagtttctccattcatacatctaattcattttctatccacttaaatattattttgcttatattagggctaattagaatttttactccttgaattttaacatgtatcaaattatgcccttaaatttttaag

SEQ ID NO: 122247 - DNA, 2022 bp, Cannabis sativa
  modified_base (71)..(79): a, c, t, g, unknown or other
tacacaaatagggtaaccatattaaacactccagccgaaatacacattaaataataaaatatttttgtcannnnnnnnngccaaaaatggaattaacaaatgatcctagtctcaccgaccacatcccaaaaacgttattgaccacaacccgaaaaaacccagatacgagccataaggtcatgccaaagacccatcgaaaccactaattcaaaaccagttctgaaatggaccaccaaagaagaaaagcccctctctgaacgacccattccagagctggcaccacagaaggatttggaaaaacacgtgacccaatgcctgaggatcaacaagacttagccgaagagatatcgttgaccagcaaagacatcgtaggaacgaaaaagcaacccatggtaatagccaccattgaatccagtctcaaaggtcgaacaaaccatcctcccgaccatggcctcacaccaaacccagaaaagacatggtgaatcatggccgaagagagagaaagaagacaccaggcgacgacaagagcaaaacatagagagaaagccctagacaaaagttaaatttttatctttacatttaagttaattagtaatataattaatttgttttgaaaatatattatatttgtaatcaaatattcaagccaataaaatataaaagcataattattggcacctttttgtttgttttttgtttttgttttcttattttttgaattttgagaagtagataattcaattattcgattactcttgatcacattttaagaatcttatcatgatcaaagtaacatatagtgtgattttgtttattcttttattacctgatattttgttttattttcctttctttttttaaaaaagaaaactttatattgtgaattattgcagtgcactaactttaactctcatctattacttaatgatatcttcaacatttccccttacaacatttccctctattacatgatgctaagctaattgaggttgtgtcaattagtaaagtaggattggtagctcctgaaattgcagaaacaattagtgtaaaggaggctttgagttggataaaataacgaagactatttgatgtggaagttgaattagattctttagtagtggtacaagctattaatagtatggtccaaatgtcatcacagtttaaacaatattttaatttcttttgtcaaacgatctgtaaataggactgttcattgtgttgcaaaacaatcttgttttatgccacattgtatttttagtgagcataatactctttcaaatctactctctattgtaagggatgaatgtctttccagttaaataaaacactttcatttaaaaaataatatcttcaacatatgcatgattccaaaactaaaaatttaacaattatttcttacttaattttcaccatacaaatatatatatatagatataataattcttcaactttatttctgccatgttgttgttaatatatgttatcttcattcctcaaattttcttaggatatatacaataaaatataaatttgtagaaattaaattaaattaaattattgtaaataattgaatacacataatgtggcttcttcgaaatgagtgaagttttattattaattctgacagatgacaaaggtataactgttgtgtgggacagttagttatcatgattagaaagcatattggacttatccttaatagtaaaaaaaatttacaataaacctcattataatctatttcagtattttaaaaaatatttagattaatttttttttataattatatatatattataattatttgtaaaattttaagaaatttttaaaaaaattaactagtcaaaaataaaatttaaaaaatttgttatacacgtgattttttttttattttatacaaatataaaataaatagtttaaatattaatttttatatgtttttcaaaaaaaaatattaatttttatattgtaaattattccgaatttatcaaaattttacatgatatttttttttttttgatttaa

SEQ ID NO: 122248 - DNA, 1113 bp, Cannabis sativa
  modified_base (1074)..(1086): a, c, t, g, unknown or other
tcaatagttcaggaggcatttttaatgacctaaaaagttcatggggcatgatttggtgcatgtcaaagttcagggggcaaaaatcctaatacttgtatttttgagcaaaaagtttttatgattttttatgtgaataatttgattagagttgctcttaaaacgaaattattacttgttgataagaggaatctctttaagatggactaaccgcggatttttaattttgtttgtagcatgcaagtctgtttttttgtgttttgtggatgttgatctttgtaacatttattctgttttgattaataaattttctctttgaattttttttttaaaaatgtaatagtttgtaataccattatgaaattattagccgttaataattttttagtatgatattttattttagtgctaggttatataggtttcctttagtattcctttaaaagtattaaacattattattaaacactatattcaaaactgtattaggtaacatttaatgaataattttttttattgttttttagtttttccttagtaaagtgtttttgtaattttaaaatattacaagtatatttttgtaattaaaaattttaagtcgtaaaaatatatatataaaaaaaagatatttttaaaaatttcctattttatatgcacatgatgaatgtatttccattaaatatatattatatacacactttgtgatccattcattccaatgattaagaaattatccaattattaggaaagcagaaacatcaagtatttgtgtttataagcataactatatatatatatacaactttcattcatataattttagcagaaaaagaaaacttcattcatatactaattcaaaatatatatcgaactctgtgtttggtatatattataatatatacaatgaattaattaattaatgtggatatatatagtgccaccaactcttgcttcaaagtaggtacggaaataagttatttgaaaagcttttaataaataatgttattcctatatgcctatcttaattaagttgtccttgcccgtatgtatacacatatatatatactagatgagagnnnnnnnnnnnnncacgtaaatattagttttatataagtt

SEQ ID NO: 122249 - DNA, 1549 bp, Cannabis sativa
  modified_base (36)..(36): a, c, t, g, unknown or other
ccaaaaaagtttagggggcatgatttagtacatgtnaaagttcgggagaaaaaattgctaattagcctttattatatgaagaggattttttacgtgaggattttttacataatccatgagtatatcttatttcttatgttctttggttacagataccatctggcaaaattttctctaagttagaaaattggccctcattttttacaatgtgatcactgctatttataggagtaggataacaattattttatctaatctaaacaacagtttatgaaacatgggcatttcccatgtttcatatattttatctaatatgcaggaaatagcatggaactgcttttattttaaataatataattgtcaaatttgacttgatctttattctttataacgtatggtgatcgaggaacttgattgttttgattgagggttcttgggagattcatcaacctttggatgcatgcctcgggtacatattcctcggataacatattaattgtatttccgaggtgatgaataggagcaaattaagcctctcatcgttaacaatgtcaacaccaggaatattcctaaatgccatgacaagcttagcatccttaggaacatgttgagtgtcttcgcatttaatgttgtagatatcagtttactccgagaagaatgtgcatgagcttcatattgcgaggatgctattatacctcctcttgaattcaccgagttaatttattccctttgttttacacgtgtcatgagctgctatttactatttgaaatatgggtataacaactactataattgagaatggtatgtattggttttgttttgtttgtatggtttgtttttaattttgtatggctagtatgactagtttttgttttgtacagccaatatcactagttttggttttgtaaggccagttgttgatggtaagaacttgtcaactaaactttaattagaaaatcaaatgtaaggataacaatgaaaaacttaagagaagttaagagcatcaatggagtaaattcatgttatgttaaatatctaagttctcttgcaaatggtaattttccaacctcctcttcaatgaaagagaagggtatttatagggagctctaatggctccaaaatacaggtggtcccaaaatttaggggaaaaaactctgtttgtaccatgaagatcggcacgtcagaagggtagtggagaagtggtggtcgagtgtcagtttgtactccgagtgggacaagtggtgttttcactactggtacctatcgtacctgttgtatatttacctacctctcagaggcgttcttgctttgatgaaattgtctcttatcgtatattcctttggtttatccttcactatagctcaggctcatagtgtgggaatatcattagaaaatttagttaagtcttaggacaatgagacatgagtcttgttgcttagacttagaaggatttttttcctcaataaatttcctcctcaacccctttgatggtcactcatgttgggttttatgccgtaaataaaactccatttcaatgtaatctatttt

SEQ ID NO: 122250 - DNA, 2686 bp, Cannabis sativa
  modified_base (2643)..(2649): a, c, t, g, unknown or other
aaccacgtaaaaattacctacattaattattccaaatctctcatcattatctcatttaattggttgccgaaaacctcggtcaaaaattttcaaccacaacattgctaaaaactattttgatcttatacccattgacatatggggaccttttaacaccatgacagctgaagggcttaagtttttcatcactattgttgatgattgttcaagatatacttggtttaatcttataaaacaaatttttatgctcaagttgtcattccccaattcataaaacttgttcaaaatcagtttaacaaaacttttaagggagttagatctgttaatgaaaaggaattaaaatttaacacccggtctggtgtacttggaattatgcattatcattcttgtgtgtaaagaacccaacaaaattcaattattgagagaaaacattaacacttggtcaatgtggctagggctctcttatttcaatcttatgcttctttagattattggggtgagtgtgtctccactatagcctaccttatcaataaaacacctactcctaacctaatgaacaaaacaccttttgatattctatattctaagtcacctgcatatgaacatttaaaagcttttgggtgtctagcttatgcttctacccaaagtaaatctagatccaagttcagtcctagatctatcccttgtgtttttcttggatattctattggtatgaaagcatactagcttcttgacttgaataataataagattttaaactctagagatgtctatttctatgaacaaatttttccctttgttaactcagaaggcttacttactgcttatgaaattattttctccaacatcccatattcagtaagccttccgacttcaaataatgtgtcaccagtgaccacttctgttgatcccaatcggatgtcacaagatgtgtcacttgaatatactcatagtaattccacctaaattcttcatttttctattaatagaatgggaagacagatccaaaagccttcctacctcaatgattatcacttttacttggcgactaatgctattgttttttcttcataaggttctcttgttactacttatttttttgtctcaggttattgattatcacaggttattaccaaattttagagcaactattttggccatctcaagccattctgaacttgaatttttaagtcaagcacatggaattcaagagttggataatgctatggatacaaaaaatgaggtctcttgaaaagtatcacacctggattactatgtctttacctgaattacaacatgttaaaggttcaaaatgggtttacaaaattaagcttaatgccgatggaagtgtagacagatttaaagctaggttggttgccaaggggtacaaccaacaagaggaaatcaattacattgatacttttgcaccagtaacaaaacttgttactatcaagttggttttgcctttggctgctatgcaaggctggtatttacatctgttatcccttttttttttgcactatgacgtggcagcacatatgagtgacacatgtccaacattccttgcatctgggatgagatcaatatcccgaacagactttaagtagcacatctgcaagtatagtgtgtacttacccgagtagggtaaaggatagactacccaaactggggcaagtttggctttctgaactatctaccatgacttgactatttcacaatgatatcgtggagtccaagcatgaagacaatccctacaatcatgggattgaattagagggatacgacaggctgtctcaatcccatatttcatgaattctatttatgtattgaatgttccatcctattataaacattgtaagcaaaagggaaaccttccctcatgcattatggccttataaataatgattttgcttcactgtaaaagggatcgaaagaattgctttagagagagatctaagagaattactcagagatttgattgtaagagcttagagagagaaaacattgtattctttgttctcaacttaatataatctaagaggagtaggctattaccacactgatggggccgaacctcttcaaaatctggtgttctttatcatttagtggtttttgctctatttttattatattcttaatcacttcacaattgactcattgtcgttgactaaaagcaagggcaacatttcggtactttcattgagagcaaaaaccctagtttatctttgtcttaagacttaaagtgatccaatggtgacatatcctgcagtacagacccctgtgaatatgagagtaagaccagagaccaatcccgaataggccaatgcacaaccacctactgtgcaccatggtgtgacttcccctctagttaggatcacaccacgtgtggaagagaccaagaaaaactagcaagctttttccaaaacttgcaatataccattcataacctcaacaatgcattcctacactaaatcaggtcacaaacagtccaacgtggcatcaaatctttagttatgcaaggtaggaaaatatctctattccactactaattaatacctaaaagataggtaaaaatcaagcataaattaaatgggttcaacgaggtcttacttttccaagtaagatctgttgggttttatgccnnnnnnnaaactccatttcaatgtaatccaatttattcaatatc

SEQ ID NO: 122251 - DNA, 2444 bp, Cannabis sativa
tgtacatacacatgtgattttttttttttttttgttaaaaagaaaatttaaaaaaaaaaagctacaaagagggttgctttatatatatggtgtacgtatgtatataatggatatattttttttttgttattttaatgagctttgttattttaagttttttattttatttaaaaaagaaataaatatgttaaaaaatacataaaaatgatatatattagaatgtaatgtgtcataaaaattatattatgttcataagaatgtgttaacagaacaatttatggcatttggcttaactaaaatttgtgtatgaatccgagttttatagatagtagagtagacaaacttgtacaaaaaagaaagttgtctaatatagataaaattgttcttaaaaatgtaaaagaattgtgagtttctattttgaaagagaatctcattttggatttaattgactcggtttgattaatagaaattattatttttcttgataaaaaaatatataaaaaaaaattaatttaaaatataattatagtagaattatgtgtttaaaccaattagtggcaaaaagacttaagtgctcaattttgttatagttagctactagtataaaaaaattaatagtaaaattcgtatgtaaaattatattttaaaaataaatacctatataaataatacaaattaactttaaaaaagtaataataatttaaattaaaaatttataattttttttaactattaatattatgttattttttaaaataaatatataattatatattattataatatgtataaagtattaattgtatataaaagtcttatcgtaagagtatacaccttaaattttaaggaccacatgatttaaaatcaatagtcgaaaaagcttctctacatgtagagaatttatgcttagtcctactataattttatcctataattaggttaatgcacgtatatatataattagttttatttttatgttattcaataaataatattattttttattaaaaaatatttaatttaagtgctatttaaaaaaaaatatataataatatttaaaattattgttaattataattttagttaatacttttctttttagaaatatcatatattttattgaaagataggttttttttgtaaacgttaaaaaaatatttatttacctaaaagataaaagaaatataaagaaatatgtattgtgagtttaaatttaaattgtaatatatatattttaaaaagcaacaatttctgttatataatctttatataaacagatttaatataacatacatataaaatatgttaaaatatataaaaacatgtattagtttttaaaagatttttttggttgagtgggggcagctgcaccctctacccccgagggtataggtccgccactgttgcactaatttgagtagaaatatgaattaattattaaattcaaagtgtaaaaaaattgaaattacattataattatatacgtacctttgtctttcttgtcataatactcaaaaactcatcaagatcaatagtaccattctcatcacagttcacctcattcatcatgtcccgaatttcatcttttgtgggttgttcatctaatgaatctataatcccaaccagctcttccattgtcactaatcctaaatatatatttatatatccaacaccaatatttaacatttacaaaataaaatatagaattaataatacacttaatgcaaacaaaacaaaaatcacgcaccatctgaatccttgtcgagcaaagaaaatgcttcccgaaaccctgcgatttggttatctgtcaatgccatgtcaagtataaattgtaattacaattttcccaggaaccaaacagaaataaagatacacaaaaccagtttcgaagagatatgtatgaagttaataattgaagtactactgattaattttgagaatatatgtgagaggctattatgtattcagaaaaacgtttttttattgaattatatatttacatatatatgagaatagtcaaacacgcttgtaaagaatttggagtcttgtgaccttttctaaagcaagaaagaaagttttcaatgactttttgtattattctctttatgaaaatgtcaacatggccctgacttttggttctctttttttgtgtgtctaaatatatgaatataatgttttcatcaaagtcacgtaaattataatctcaacatacttttcatttttttggtcacattagtgatgggaacgtaaattatacatattttgtaatatgaacacatgtacaaacacgtactacctgtagttttaagtagctgtatataatgtatatagcctataggctccatattccataaatatatactgtgatatgattttgtcccgttattatactttcacggattgtaatctgtgatgtacgttagccgtcagataagggagttatt

SEQ ID NO: 122252 - DNA, 951 bp, Cannabis sativa
acttttccacttttaaaaacagaatactgattaaaaaagtgttaccaaacgccacctaaataaataaaatcttatatcacaaatggttttttttttatgaaagtgagaacaattttattgatttattgatgaagtgcttatatcttacatactcaaatggtcaaatatacatgcgacagtttagtagtataggcaccctcaattttgtagtataatttttttttttaggatttttttatttttattcttcaaaacatttttttattgcatttttacagaattctacatataaatttttattgcaactagcgctgcaatctaaattgcaataaaaaaatcgtataaaaatctttattacaactagcgctacaaccaccttaaaaaaaacagtatatgagataaagataccactaaatcagtgacataaattaattgtgacaaagagaccaacatcatactatcaacacaacctaacccgagaaaagcctatacaagagcctactctgaatccaaatagagttacaccatagttgaccttacaagaattcacacccacacggcacacccactaccctgcatcagacaatgccaccctagaagcacagattctcatagaagtcgttaaatctttgatagaataatacaactcttcgaagataatttacaaacagttgaaaaaaaaagagaaaaagtcaatggcaatctaaaaaagaaccaagagactcttgtgtgcacaaatacaaacaaatcacacacatctaaccagagccacgcccaaggcaaaggaaagccggcggagcttggtcgaaaaaaatatcacaacaaatggttttacatatatataatagcacaattggcattcaattattttttttaatcaaaatgaagataagaggatattttcataaattttaaataattacgaaaatatttaatataggctaattagga

SEQ ID NO: 122253 - DNA, 1687 bp, Cannabis sativa
aattggacgattcaagatgttcctctaagataaaagagagatctagaacttttatgttttgattttctccaaaatctgatcatatcatagtcaaatttacgcttgaagtttcagatttttttttttttgcacaattttttctattttatagttcatcttttttgtgagatctctttttatcttttttccatcttatttatttgatattttctaatcttcttctattttaaatctgtaaaaataaaagataaaaaatataaaattgatccaaacaagagtagaactaaattaaaaaatactaaaaattaacttaaaaataatactaaaaataacctaataatacttgctactctaagtgagtacttacaagttttatccgagtgttcttaataacattaaatactcacacaaattttggtgtccaaattcctccaacaagatatagaaagctcattctactaaaataacattttgttattttaaaatgcaaccaaataaagaaatgaaattaattttttttttttttttcattttattctatttcattacattcaatcaaacagaaacttaggcacaaatatcaacaattgcactgatgaaggtttttgttatttagtgttaggtagttaaagttttgtgatcaaatcatcttacccaacggtattagattcttgcaaccttagttaataattagtaatttctggcctaatcaataagctgattactcttgggcgcgtttccaaaaattaataatcaataaaacagaaaaaaaatattcgttaacttttattggatttgcttaaagtacaagctaaccttttcttctcgcaaatgtaaattaataataataaaaaaaagagattttaatgacattgagatgtgtatttttttttaattattattattggaggaaagagatacatgggggatttattgatagattatctatccactacatgtggaattaaactgcagttacgttaagtctgactccgaaagtgcaatggttaggaaaagtgcaaatgaagtagtttttcccctttacaagcttgatctgatcatttccacttgaatacacctttgccccaactccagctgtgcaattccgataaccagcctttgtaacacgcaccacgttatgatgacctgcctcgtatttgaacactacgtacattcgcaaaaacaaaacaaaggattaattcatatatatgtctatacttccaccaaaaacatgttatgactacaaaatgaatgaaatgtttagacttttcttttttgtttctgctcttatatactcctgtaaaagaaaaaagaaggtgaacaaaagcattttttttaaataatttttttccggtgaatcactttatgaattaactctagtactttttaaaagatttaagaaaaagataattaaactagtatgttttatggaatcagacactgttatatatatatttacaaataaagttagctagacaatctttcaaaaaaaataaaagaaagctagctgacaatcctctcatttttaagggtgtgcctattagagaacattctcccatataaattaaatgtgaaagtatcgagtatggcctagtttgtcatttttgtaggatatccaataattggggatgctcttcatctccttgctctatatttgaaggccgtactcttttttttttttcttttt

SEQ ID NO: 122254 - DNA, 1457 bp, Cannabis sativa
gtaagttgggtcacactgctctctcttgttaccacagagctaatttctcttatcaaccatcccctcctactaatttgaataccttccttccttcttctgcctcctatactcttcccacaacctattcaacttgtactacccctcctcttaatcctaaccagtggcttatggactctggggctactcatcacttcacccctgactataatctcatggatttggctgctccatacacaggttctgaacaggttacggtaggtaatggtaagcaaattcctattactcatgttggtcattctaaattaactactaatgtttcctctattcagttgtctaatattcttcatgctccttctctttctcatagtctcatcagtgttacaaaattatgtcgtgataattctgcgtatgtcgaatttcatcctgatttttttgttgtgaaggatcgagtcagccagaaaattcttctccagggactgcttgatcgtggtctctatcgggttactactcatccttcccttcctgcttctcacactccagtttcatctcctcagttatttcttacacatacctctgacttggcgacttggcatcaacgcttgggacatccagcttttcctgttgttaatcgtgtccttgatttatgtaatattgccaagcgcaaatctgtttctcctttattttgctcttcttgtcaaatggccaagagccatcgtttacctttttcattgtcaaactcacgagctgctgctccttttgatttaatacatatggatttatggggttcttccccccttacttctattgatggttacaattattttttattgattgttgatgatcacactcgattttgttggtattaccccttgcattccaaagatgaggcatataatagttttctccactttcataaaatgattgatactcaattttctggcaaaattaaatcggttcaatctgattggggtggtgagtttcgccctttgtccacattacttcactctcttggtattactcatcgtttggcctgccctcatacatctgctcaaaatggtcgtgttgagcgtaaacatcgacatgttgtcgaacttggccttgctatgcttgctcactcctccttgcccctttccttttggaattatgcctttcatactgctgtgttcttaattaacaggttgcccactgttgtactttccaatgcctcaccatactttactttgtatggcaagttgcccttgtattccaatcttcgcattttcgggtgtgctgcctttccttttctacgaccctataaccaaaataagttacaatttcgttctcttgaatgtgttttcattggttatagctcaagacacaaagggtatatgtgccttcatcgtgaaactggtcgagtctatgtctctcgccatgtggtcttcaatgaacattcctttcctttttgttctgcctcttct

SEQ ID NO: 122255 - DNA, 1494 bp, Cannabis sativa
tatatatatatatatattcccagaagaccatcttaaaatcttcaaacaaatcctcctaactcatcttatatattcttactcatttctttgaccggccaatactaaaaacatatatatatatatacatgtctacctcactacggttcagtgttatggctacagacgagataagcccctctcatcaggaactaaggactatgcctagctttaatgggtctcaagaagctaagcgtgaagttggaggaggaggaggaggagccaagactagtagcggccgaggaagaaaacccagcaacaagggtccatcaaacgctaaaaagcaacctcaaagaggacttggggtagctcaactcgagcgcctcagactacaagaatggaagaaatccaatgaaatactccatccagggaccccgacggcgacggcgggggctctcaacttcccagttccggctgcagttgttgaccacaactgtttccatgagttccagatggttcaaaatcccctcatcgcgcccatgactgaaccacttcacagtgttccggtgcagtacggcgcaggagggagctgcggtgtgggttctgctaggtttcttagcgccgttgttcatcatcatcaaccgggacacggggcggctgctcatcctggtttgatgagttctagttgcgatggtgggtcttcttccccagctgggatattggggcaataccgttttgctgaccctcatcgccctcagtaccctaaccctcatcttcaatatcattcgtatcatcattgttatgggatggttaatagtactaatggaagcctaggtccgagtccggatcagatgtttcctgtgggtgccgatgtgtatgatcataaccctcatcatgagaactccaaagagctctcttcaattccaaaaatgcactcaccattcatccactcttcgccacaccatgaccgttctgctttttgccctaaggttcttattcctcaataaataaggctcgactcccaaataaaaataaatatttgcattttatagtttcaatgtatacactgttacattgattgatttctgtattttttttaaacgttttgatatgttttttttccttattcttcttatgttgtcattttgttggtgtacagaagaccagattcaattgtgagaatattggagaactaacccttggtttgggaaccagaggagtgagaagtacaagtcatgatgatgaggtatgttagtattacgagtttatacacatattaaatgtttataataactgtgattgtcgataaaccttggtatataaatttgcactgttctgattatgtgttaaaatatattatagggattggagattgtggctgttcacagaaaggtaaatccagctagtggaggagtattaatggagtacgagttctttccaggaaaatataacagctgtggcactagttccaatgagatcttgatgaagaaaatccactcttctagtgatcaccaaaat

SEQ ID NO: 122256 - DNA, 1227 bp, Cannabis sativa
tgtctgaaactctgaaactgtaactgaattctaaaatcctaagtttctatttatagaagggaaaaaggactaatgtgcaattaaacataatacaaattgcatgtgggtaaaattacaaataaaataacttaattcggagctgccacgtgtcaccctctcattggttgcatgtggacacgtgcgaatgccacgtggaaagtggctgaaacaactttgagctgagggggctcggacgggagggatgcccattctcgggctggggcgtgagtagcaacgtgtggccttgaatttctgttgcgtgccacgtgcacgtggaggaagagacggggacaagcccctaacgtggctgctgcgtgtgagtaggagaccgcaacatggcgtgcatgttggctggagaagaaaatgggccggttgggcctttgtctttttgtggccttttttgggcttcaaaaataccaattcctatgactttggaccataattttaccattttttttatttcttttctttctttccataattgctattttgtcaatcaaacacaaaaaaaaaattaaatccaaataaaatattttcaacacaaaatatatcacaataatttaaataaatatatttatttaaaatctaattaatttgaatttcattaaataaaaacaatgcattttcttaatttctttttttaatttgagtcgttaaatgttatttttcttacaaaattaactcaatactacaatattttaaaataaaaatatattacaataatttcatgaaaatattacatagaattaattttcttttatatttttacaataataaatatgtattttttactacttaacacaacccccaagtagcttattactagtccctagtaattcaagcgaataacaaaatattaccagtatgaaccaatcaaaacaaattccgcctaattgaaacaaaataaagtattggtgtaaactctagaaaatactatataaaaatttacaatagatataattccagattttgtgtgtgtgcttcaaatcatattatttactttaattcataatacagataatatcgaaaaaaatcttgaaagtaaaaagtttcaactctaaatcctcccaggtattgaaatatttgaataagaggaagggttgtcactcttggagttggaaagatatattaattgacgctcaaatggataaagatttttatgacaaacaatgtaaacaattattgacc

SEQ ID NO: 122257 - DNA, 688 bp, Cannabis sativa
  modified_base (50)..(73): a, c, t, g, unknown or other
atagtattatataaaaatatgatagataatccaattcaatataatacaannnnnnnnnnnnnnnnnnnnnnnngcgttccaaacgagcccttagtgcattattatttgatgcatttattactgaactgactaacaatctattacactacagtaaagtctaaaagtattatatgcatctcaatattatgtgtcataacatacttttgtccttttaatttaaacagtgaaccatttactaaattaaacatcataattatttggaaaattggtttcatataatttcttttcactcagtaaatcattaatgaaattaacagatgtaaactttctcttctctagcgagggtagctagctgattgttaaccaaaagatatactttgcaaaattaaaaatcttaaacaaaagattgtgaataatcgtttgacaaaagtattccccaaaaatttaggcaatataattataagaacagcaactaattaagaccccgacacaatgttaagtgttaaaattggtgtcatatttgagggtatacactttagaaaatgttaaatgtgatcttaattatgttttaacattataaataagtgtggttataatttattattaggtcctatcaattttattttagaataattatcttttttaccccctgtacttatgacactatactattatgccccttaatcta

SEQ ID NO: 122258 - DNA, 689 bp, Cannabis sativa
tactagagttttatcaaatggagagaagtgtgatcgagattggcttgtttattcaaaagagttagatagagtattttgtttttgttgcaaagtttttaaaagttgaattgatagaggcatgttaacaaatgaaggctttagtgattgtgcacatattggtgaaagacttaaagagtatgagattaacatggaacatgttaaatatatgaccatggtatggattgcgtctaaggcttaaaaagaatcaaatgattggtaaaactactcaaaggcttattaaaaaagaaaagggaactttacacatttatacatacataaagaaataattacagatatatatcagtaaaaagataatataaccaaatcatgaagtttattattaagtatatcaaatttcatttgcaaaatatacgttggaatgtgatgtttattatgtactaataataaagtactcatgtgaatatgataattgttatataattatagggaaattctctagtaggggatatactttttacctcatgctatagggagggaaattggcccaatcaaagattaaaaacaactgattgtacacaaattttatttcagcatctacgtaggattattttatattcttttttatttttttttattttttgataagttcatattctttttgtttaatgatgattttttttaaaaaaaaa

SEQ ID NO: 122259 - DNA, 1742 bp, Cannabis sativa
catcatcatcatcatcttcatccatgtaaggattaactaatcatcttttacttctttctttttgtatataatatacaatgtatatgctcaaatttaccaactatttaaaatcaagtattgtatgaaattaattgatatttatgttaattttggttctcttaatgttcacaatccaattttgatcgatttcagcttataatggatgataatggctggaagaaaagggctaaaagtacatcaatggtgggtggtgaagacagaatttcgaaacttactgattcagtgatcttacacattctatcgtttctcccaactgatcaagtggttaaaacatgcattctttcgaaacgttggaagctcatctggtatgcagtccccacactctttttctccaatgatattgccagtgaactcgaatggaaacagagtcgacaaaagttttatagttatgtggataagtatttgaaacaccgaaagaaagctatgtattatattgttgattcagtcataactagttttgatcttgacatgtatgatttctatcaaagaagtaaagctggtatattagataaatggttagcttttgcaattgagaataaggtcaaggaattacatcttaggataggcctagagagaaagaataataggttctatcctgagtactactgcttacccaaagttgtagagaatggaacatatttgactgttttggagttgaagtgtttagaattggattcttctcattcatttagttttccatttttaaaagctttgtcattggaagaaattcagcaatcagataaagcaaaagatgatgttgtgtttaagtttttgttgggttgtcgttgtcttgagaaattgcggttacataagtatgaattcttgcgcagtggtgataagattccgctgcaaagtttaagccttaagttcttggaactgacatatacaacaaatctagatggcttgcaagttgaagccataaatcttgaatctttggtaataacatgtcaattcccgagtaatatagatttctctgcttgcaagaaaattagaaatctctcatttgatggtactgttttggttttcgatgctattaagccgccatcgttaaatgctcttatttcttattatcctcttcttgagaatttgactttgacattcagacctaaacaatatgaaaaacatcttagaatctcgagtcaacagttgaaaagtttcagttttaagaattgtcactttgaaccgtgcaatattacaattgaatcagttccaaagttatcatacttttgttatgaaggttatatcgatctaaccatatcaatagagccatctaattccttgagtggaaaaattgtgatttgtaaggaagattatgatgcagcctggtatattgatatgttgaattttcttttgaatctcaattgctcttggaatactattagcctacatgttgaagaatgcgaggtacttgtattatgttttaattttatttgattttgtggccttatttcaatgctgtatattaatctatttactgtttgtgaagtaatatgtttatatgtttgcaatgcatgaaggctctcatttggcccgaaaagttcacgagggtatgtcgttctccattgctcaattggaagcatctcaaagttattactaaatgtaataatcctgaaataatatcagatttgaaggactcgctgatgtggatttcaccatccttagaaacattgtctattaacaaa

SEQ ID NO: 122260 - DNA, 918 bp, Cannabis sativa
  modified_base (40)..(57): a, c, t, g, unknown or other
ttttagaagttcatatgtagggtgttaatcaacatacttnnnnnnnnnnnnnnnnnnctggtaaaataatttccagcaccagttgggcaagcaaatcttgtatcttgctgaggtaagccataatcttttctcccctagctgtgtattcacccaaaacatgatttacaaccagttgggagttactttaaatgtctaagtgtgtggctttcacctcttttgctagtttcagactggcaattaatgcatcatactctgcttcgttatttgaggaagggaaactaaagtgaatggtagcatgaattcgttgcgcttctggggttattagggtgatccccgctccttacaactgatctgtagaagaaccatcaacttgtagcttcaaagtttcacttgcttaatctttcctttcattattctcggagttgggaacatgccgttcggatgaattgctcaggtcaggccttttggcgtcacttgttgttgctggttggtcgccctcttacgccattgtctcaatttcaacatcttgaacctcggtacattcagctacaaagtcggtgaaggcctgccctttgatagtcgaccttggctgataggttatgtcatactgccccaactctattgcccatttaaggaggcatcctgatgtatcaggttttttgtagcacctggcgtaatggttggtcagtgagtaccatgatggggtgtgcttgaaagtagggtcgaagcttctgagatgctaagagtaagcagtaggttaatttttctatgagggggtatctacactctgccccgatcaaccttttgcttacatactagaatgggtgttgtaccttatcttccgcactgaccgcatgttctgtcactacaaggtatatgcttaaaccttcaccatctaggggttttgaaaggaccgga

SEQ ID NO: 122261 - DNA, 1033 bp, Cannabis sativa
cggtatagtcgagctacttcaagcccaacagcaggtcaacgataataaaccatatccgttagtgaagtcatatcttgcagatgttggatatatgactcgtccatgtgagatgaccctccagcatagtgtattcggaagacctcagtcagagcatccggagaagtaaccagcgagcattcagatatttagctcataatcattaatattatcagatctcgtgatattaatactattctaaagatttcgtctgaggatcatatcttcccaatataaaaaaataataattgacgactaagcattaaagtatctttattatccacaaaagtaggacacgacttgacaactataaatgagatgtggcctcacgtcatcaaacaatcaacgcctcatgggcagggccttaccaaatcggcccaaagtcattatattatttgtatttaccccatcattgggcaagaaccttagcactatatatatatatatatataaatatatataagaaaatccatccatgcaaaaggttaaaatctcaatccttgagtgctcatgaaaaatttagggttcaaacacttgtataaatcataagacttttctagtcgtataacaataatagtgactcgtgaattaagactcattaatgccagtagtttcattcttcattgattattatttttttaggtttattatattttattagtttctaaaaatctcgataaataatactcatttttataatgtgtctctttctatatgagccaaaaaacaaagaagatcggaatgacaatactactagaaaaaaaaaaaaaattaggcgtcaaagttaaaaaaatattacttttattataatagaagcataaaatacaatttttttttaataaattatagaattttattaatagtaattaattaaaataatatcttgcaatttaatcgggacatctctcccattataaacacgatcaggattaaaattagaaaaacgaaccaaataatcagtcgcctaattctcatcgtttgacaaaaaaaattaaaa

SEQ ID NO: 122262 - DNA, 1271 bp, Cannabis sativa
aaacctcggtcaacaatatatatctgaaaatttcttatttatatggagaaagtataatcttgtaaggatgtacaagagaattgaaattatacgatatgtatgaaacaagtaggtagtgtttttaagtaatgggaatctttaatatgaagttgttaagtacagtttactatacactatacttctagtgtgtgtgattttgattcagatcacatatgtggatagacaagtagtaaaggtgttgtgtataattcgattatgcatgactaaactgatatgtaataaacatatttcattaacgtgcctattgacgcgattaagaagatcgtaaacataaagaggactgcgatgaattaatttgactaaataaaatcgcaataaataaaatagacaccagggatttatagtagttcacccccatgtcacgatggtaatggggctacgtctacttttgcttttattaaatagatcggacacaccagagttatgttctcaagagtgtgtggacattaacacaacgaaagatttctaggtgaaatctcgatcaagacttatgaatacaagactcatgggagattcgatattcacaaatctgatcaaagtttgtacttgtaaggttcttgggaacaaataacaaataaaaataagaaaagagaatggtcctgttcttggtaacagtgtagattaatagtgttagaatcaaggagattcggtatcgacaaattatggaggacttaggaaaaatgtgaagaaaggaatgtggtgttctaggaagccattccatgagtccaaaaacgatcccctttcttttggcatattcctctctctataaaggccttaggatttgttagtgatcacctacatgttggggtgtcccactaacaaatctcgtatatcatccttaatgatgtataaaaaatacaaataaataaatatctacattggaaaagtagttattttcggctaaagatgcaccaatttgaaatggagtgacaagggatgtcactcctcggcttagaattcatcacattggtgagaagtgttggaaacatgtgttttggggtgccgctgcttgcacacaatgccacatgggttgtgacattgttctccaatatcccacactcaattacactactcaattccctagtaaagtgtactagtctgccttgtaagccaattttggacctgataacttcagaattgagctatgtgttgacctcgcttttagccaacgacagtgagtctaatttgataagcgacaagtagtttataac

SEQ ID NO: 122263 - DNA, 1154 bp, Cannabis sativa
ttatgtaatttaatatttttaaaacaaatgttatttttacattaggagattctccgccctgtccatgatgggaaataagcgaggatgaggatgaggaaagcactccccaccaattcctcatctcgtgtgcatccctatgtattacattaatattattctaaaattactctaattattaagaattatctaaatatatatataaaaaaaaagttattataaaagtaggttaaagaaaacttacattatactaaaaatcatatccttgatttctgataatgtcacataacgccacatattatacacctttcccagttattatgatgtgtgtacgagacgtcataaaagaacattttactggaaacaaaaagtaatatagaacgaaatgatgagaaaaagttaagcttttagtaaaaaaaaaaatagaaactcaatataacaaaagttgaatattgtcctttgtgataagctccatgagaaagtgaacaatctttggtgtaaaactcagttgataaacttgtaataacatgatggagatcttgagttaaggggtttgactctttttcaccaatggaaaacttttgagacctaatctcttctatatgacgcttagatatttttgtattaatccagtgattagtggacatgatcatgatttcttcttcttgcttgatatctctcaaaacctatattttccttttggtgtaataacttttgcatcatagcaagaaattactaaattactaattttatcgaaatttagacaacataacggctacaattgaatttttccaaaaaatttaaagctattaataacaacaaaaaataatctaaaataagataaaattagtgatgacaacttaaatgatttataatcatcattacatttgctattaatattttaattcgagttttatgagtcaagtgtgttctaggataatagaatttaagattctagttctaaaaacataaatatctctacttttgtttaagttttaggagacatcttttggtatgtttaaattttatgtcatttcatggtatgttagatattttatggtatgtttgaaagggaaatttgattttctatgcttagaaaatcaaaaaatttgatttctaaaccaataattaaaaccctaaaaaaactataccttttt

SEQ ID NO: 122264 - DNA, 683 bp, Cannabis sativa
gtgacaaccaaacgtatcaggggagaagctaaaagttaaagctgttataactttttttaaaaaataaaaattataatgaattatttgtattcaaaatatatttcaaaatttatttaatattacataaataaaagatattgaaagtaaatatactataataaaatagagaactttacgatgtagcccaaaaaggcaacaaatttacataaatacattgagctagtaatttaaacatttgtataacccaaaaaattttgttacagaaatacctccgtaccagccgtagcatgactagaacttgaagttttgtttcctcctttctgtggtcctccaattaaattctcaaacatctgaaagttgttgatcaactcatgaaagtcaaaagtcaacttgttcatgatttaatttgaagtaaaggtagaaaaaatgtagtcaaactatttagattaaactcacttgagtttcttgatcaataatagctctatgattctcagcttcttggaaataactagccattaggagtaggtgatcacgcatgttctggtgaagtttcatccgtacatttatgaagttcttggtcacttcaaaatgagcttaatctgatgccttcctaaacagttctgttaactggtccatgatctcccgcagccgtgagagtgttagcaaaccttgttgtaaagacc

SEQ ID NO: 122265 - DNA, 1218 bp, Cannabis sativa
  modified_base (1174)..(1177): a, c, t, g, unknown or other
tttttattttaagcatgtatcatctaatctaaccctagtatgatagctttatagagaaagaaatgagagagctttgtcaactaagtctacatgattcaacccaatatctgacaaagaaaagttttctcttcctttcttttaaattttgaaatttctatagctattgtcattctcaaattgtgttctaattgtgagttgagtatcagtccacactattcaagatggtaccaagacctttgtggaagatcgtgaaaaaattattacatgttacttattaaaggaaaataagattcggattcattacttggtgatactctgctacaaaaaggattagagggttagagtactaaacagaaggagtcatttattccagttctttcccaatgtaaggaaatcctaaactacttatgtgtttaatataattgttttagaaatatttttaggtttttaaccaacatacatgatagtaaattagatctttgtaaagtaaattctaacatgtcatccatctcccattttgtgcacagctctcgggtgtcttttgcaatcactgggcagatgttgacgttccatcgtgggttagtccagtccttgacgatctttctagctttgtctatgggaattttttcgatttagtaagataataaaaaagaagcaaatacgaagcaagtagtaagggtacaggagagtcctccctaataaccgcttggaagggttcccactggaccctatatctaggaacaactcgttcccaaataacagaatcagtgacacagaaaataaaataggtaatcatcacgttatgatccgagacccttagggtcccaaacagattaagaaggatgcagtccagtccctagggatatctgccgtgtccatgagatcaatactcatgcaaaaaatttgaaacaaaataagaaggatgtagttgggtcctcttggggtcttggaagcttactgcttctatctaagttggcgggagctcatggaagtatgaattaggatgacccttaggatcccaaatagaataagaaggcttgggcggtaattattatttgcatttttggatggctaataaatgggctgcattaaggcctaatatgagagtagagctacttggcagacctccatactgttggaaatatatttatctaggatcttagatctactcacnnnnatgttgatttaacaacctaatattgaacttctaaaacgatg

SEQ ID NO: 122266 - DNA, 1387 bp, Cannabis sativa
caaaaggaaaattaattgtcttagactatgttgtaaggtttgggaatatactcaataaagtgtaaaatacacaaaagatgttatgaagaaactttctctggtttctcacaaaaaaaaagaaaaaaatccaatcttctgctttgtctattcaatatgggcaattgacatttctacaaacttttctaagtgatttgcgaagtccaggtttgcttggctgttatcaagtttgtaatggaatcaaaatgctaattccattgtttgtttccactgtaattaatgcgacatcatatacttgaataatgacagagtttaaacttgaaaaagaaagagaggaagaacagagttgtattattgcattgcagagaaaaaagaaatacagagtttatatacataggcctaaatcaactaaagacaacagactcaacaactctgtaacagaaataatacaacaaacgaactgaacaactgttaggacagttggcacaacaatcctatgtaacagcgtccttgacagcccccctcaaactgagtgtggatttagaatcgacacacagtttgcttcgaagattagagaagcgagagctagagatgggcttggtgagacaatctgcgatttgagcctgagcaggaacatgtttgacttgtatttgattttgtagcaccttatctcgaacaaaatacaagtttattactatgtgtttcgttcgagcgtgtaaaacaggattggcagctaaaagcatggtgctttgattgtcacaccagatagaaggagctgtaggacagtgaatatgcagaaggagagactacagccaagttacctctgaaacagcacttgcaagactctgaaactcagcttcagtggaagacctgctgattgtggcttgtttttgtgatttccaagtgactaaatttccccctagatagatgcaataacctgtcgcggacctcctgtcatctggatcagatgcccaatccgcttcacagaacacttcatgagagaaatccttgactggttttagcaagagaccatagtccaaagtgccagccacatatcttaagattcttttcactgctgtccagtaagaaagcagaggttgatgcatatattgacacactttgtttacacaaaacgctaggtctggccgtgtgacagtggcatactgtaatgctccaacacttgacctgtacaaagtcacatctttgacaagttcacttccacaattcgacagtttgaggccactgttcattgttgtgttttgtgtgtttatattttgcatatcagctttgcaaaggagctcttgatgatacttggtttgggacaaaagtataccttcagaggttcgagtaacttggatgcccaagaagtaattgttggaaatattttacc

SEQ ID NO: 122267 - DNA, 1454 bp, Cannabis sativa
ttaatttttagtagtgaatatcttattaaagagaaatttatatatggtgattattatttattataaacgagttggaataaagataaaagagaaaacactacaggatgaattaatagctattaattctacagaaaacaaaaaagactttacagctccaaattaatggaagcattaattagttgttcaatatactcaatcccaacaacagataaaaaattatacaatttttttttaaaaagaaaaaattaggtacccaatatctgtgaacaacacagtactaggggttgagtatagctgcatatgttgatcagttgtactcatggatcaaacttccaaagcttttcgactttaatatattggctagccatatacagccttgatcagtagttgacctgagctatacatacatacatatatatagctgtaatgcatacatatatatatatatatatatgccttttgacaagtatgggttgctacaaaaactctacataaaatgtataagcagccatatatacaccttttatatatagtatatatatagcaagaggatatgatatatttttttttttttttgagaaaaagaggatatgatatatgataacatttatatgaaagtaaagtaagttcatcagtaatatgttggcggcatatatagagtttgatgaaagtaatatagtaaaagattatttatatatatatatgtatattttgatgtagatcatcgtttgcgcttagatttgagagaagtgacagactgagagttgctgtgccaattacgctttctttggttgataaaccagttgttaatttgcttcaattgcaatcctgtttcttccaccagctttgccttgtcgtcttcctgcatcggttgccatttaatattaactaaattaattacattttctattatctgtttttatttcttgcaattttatagattgttaataaaaaaaattgcaataccaatttttcactataatacttgtgattacttgtaatcatgtaaatagaaaagttctaattttttttacatgactatatagtatagttagataagaattctcaccaattaattcagaatatatagaatgctaaaaatcataatataaactgattattgcaagcgtataaataccaagataaatgcatgcgaaatataactaactagctatttaaaaaataaatttggcttgtttcaaaaaatttgtggtagattcctataactatattatacaaataattataatatgtgatataccaaaaatattaaaaataactatagatatcccaacaattttatatattatatataacatacttcagagttctcactaggaacgctcatgataccccattacctaacttcatccccttactagttacactctctttattctcgttcttttttacgctatatcaaaaatatgttcatacaaaaatatttaactcaa

SEQ ID NO: 122268 - DNA, 569 bp, Cannabis sativa
cattttatataaaatagatataaacacgagaaactcgttagattcctttgtcttattttttgcaggtatatattgactcttcaagagctccaaattccaggtaaacaatgcaaaaaccaaatttacttttattatttttcccatattaaaaaggtgatgatcaagatcaacccttatatcatgtatatacaaaaagcactatatagtacgaaaaaatggcccctcctccccataaatatttccataaatgcatgtgacttttcaatgtatggatctataggtttacttaatttacaccacaagagatttgtggtttataataaaatttatggctctccaaaacaaaccaagccaccgttaccatttcaaaaggtaatgacatcaaataaagttaatttaaacattttatctattttggtatataagaaaattgttattattttttataattgcatacgttatagctatctaaaattacttaaattcactacaagaaatgtcacttttgccatcacatttttgtgctggcaaaagttggtattgcgctggtaaactagaatttacttgtg

SEQ ID NO: 122269 - DNA, 4829 bp, Cannabis sativa
acaaacctttccttaaaggtcaaacggaaaaaacagctagatctcggcaaccaacagcacaaggggccagccagggatctctagctcagtaacccctcaatttttagcgtgtggccagccagccaccagcaggagcacccttggccgactagaggacgtcacttcctccccgaggggagcgaggcacctagaggtcaattttcaaccaacaaggactgcaagtaggtggaaacaccgaaaatggcaattcacaaagtgaaaataatcacttcaagcacctagttccaccaaactctagcaattggtgtgatatagcccctatcaacgcataaccaacatcagtcaaccagggagtcacgagcagccagagcctgccctttgtaggtttggccgaccatggaagcattatgggcagccagaccctgccctttgtagatttgacgggccatgaaggagcaatgcgcaaccagaccctaccaaatgcaggtctggtcggccaaggatagcagccaagtgtaggccaggcagtctaaagccagcacctgtacttgggaatggccggtcagagtctacaattgaacacatgtctggatgacctttaccatacactctcctagtgtatggccgaccaacccttatctctctaaaatttgtattccctccaaggtgggctagtcaatcaagttcccacagcaacaaatccttatgtgcaagcacagctgtaccaacttagggacatgattcaaggaatagatggtctgaagctttcagaccttaaacttggtcgatcagggggatcaccattctcagcatatataaatgcctttgtccttgtccaagtttaagttgccagtatgtataccgggcaagaagactcgttggctctcatcaaatattttgagatgcaactcgatctctagaaggttactgattatgtgcgatgccgcatattcccagccactttgtcgaaaatagctcaacaatggtacttcaaactcaccctaagaagattcaactctttggccaagttctcacgagaattttacacacaattctcatctttgagacttgtaccatcgcatctagaagacatcgttgaagtcaaacaacgaccaggagaacctttgaaggattacatccagaggttcatggccgaggctaccaaaatcagaggcctcacagaagaaggctaatatacgactttactaggggacatactcctattgagtgacttctagaaagatatctgaaggatctctacaaacaacatgaaggagttccttaatagagctgatggctttatataactcgaaaaagccatacgataggcccagacagggcatgtcaataacaaacagtcacgagacatcatggagtctcatgacctataaggcacacatgcagacaccaacaactttgcgcaaacctctagtggtaaaaacactagaaacaagcgaaacaccaacagctttgggaggagcagtggcaaaagggggaagtttaacacttctcccatgccaccaaataacaaggaggagaagtatacctgcttcaccctcctgacagagaaacctgaggccatcttcatggccactcagggagcagtcccctaccgaaaaccctttcctaccaaaagagaggtgagcaagagggacatgttgaagttctgttcatatcacaacaactttaaccatgacaccaatgagtgtcaaattagaagagggagactgaatacctcataaggcgaaataatccccacatgtgtcgttatgtgcagaacgaccaaactcaggcacaaggtgcctagaatggagatccaatgccaccactagtggcaagacatctagggttcatcattggcggaccccacattgcaggcaagaccggcaaagctagggaacactatgcttggacactctgtcacgagcctaaaagtggtatcctagctgtcgaatagaggggctctaagtaaccaaagcttatagagcccacgatctctttcacagaagacgacgctgctcaggttagttttccgcacaatgaccccctggtcattactacacaaatcaagaacatgactgtagcaggatgcatggtggatgatggagcctcctcaaacattcttttcaagtcaacatatgaaaagatggggctccagctcactaacctggcgccctgcaacacagtgatgtgtggcttctttggccaaggcatcacacatgttgggtatatcagattatcgctcatagttgaagaaaatccaaccaccataactctaatggtgcagtttgtcatgatcgatattccctcgtccttcaacaccatgataggtcgaccggccctcaataactttaaggcggtcatatccatataccagctatgcctcaaattttgaacaaggcatggggtggcatgtgtgaggggagaccaacggtctacccatcactgttataacttggccatatccaaagctaagaaagagaagatgcttgacaagggccctgaagatgagcccaacaaagggcaatgaagtccagcccaaagtggggacatagacatagatccttgctttgggaatcctgcgggaaactttgggcctgtagaagagttggaagaggtggaggttgatcccacttttccaacaagaagattgaagattaggaaaggtttagctctagaaattaaatcaatactgataagatttataaggaaaaatctggacctttttgcatggtcactgaggttgatcccacttttccaacaagaagattgaagattaagaaaggtttagctccagaaattaaatcaatacttaagggaaaatttggacccttttgcatgttcacacggagatatggttggaattgacccctctgtgatgacccatgcactcaacatctccaagcatctggcttgttcaacaaaaaaggtagttgttggagagtattagtgcccaaacccaacaagaagtggagagtatgcatcgacttcacaaacctaaacaaagcatgtctaaaggactacttcccgcttcccagaatcgaccaattggtagataccacagctagccatgaaatcttgagcttcatggacgcatatttaggttacaatcaaataaagatgcatccaccagatcaagagcacactagcttcatgacagatctaggcctgtactgttacaaagtcatgcactttggactgaaaaatgcaggggccacatattaaaggctggtgaacatgatgttcaaagatctcatcagccacaacatggaggtgtacatggacgacatgctagtcaagtctaaaaaggctgggggcatgtggaggacttaaacgaatgcttcaaaatcctttgcagctacaacatgaagcttaacccccaggtgtaggctctaaaaaattggcttcataatcaatgtcatgggaatagaagaaaacccacacaagatccaagcccttttggacatgaagtcactcacaactgtcaaggaagtgcaaagcctaacaagacgcattgttgtattaagcagatttgtgtccaagtctacagacaaatgtgtacccttcttcagcattctcagaggcaacaaaaaactttgtggatagaggaatgtgaaaatacatttcaagagctgaagaaataattaattcaaccacatatgttgtctaaacccctagataatgaagagctaggtgtgtatctagaagttatagagcatgatgtgagtgttgtcctcacaagagaagaagacagtatatagcaccctttatactacatcagcaaaaggctaattgaagctaaaagtcgataccccctcatggagaagttgacttatagtctgctattggcttctagaaaactaagaccttacatgcaagcacaccccataaaggtgtacactgatcaaccattgcggcaggttttatagaaatctgaagcatcaggctgattactcaaataggccattaagcttggccaatttgagatcacatatcaaccaagaataaccataaggggtcacgcccttgcaaacttcatggttgagtgcacaaacttgtcgcttaaaatctctcaagatttaggagaaaaccaaaagccagagaagaagtaagagcaagaatagccacagaatcctaaagaactaacatggaaactccatgttgacaaaagcttcactgaccaattgttcagtgcaggcatttcccttataacacctaggggcagcaactgcacagagcatttaaaattcagcttcaaagctcgaataatgaggctgaatacaaagccttaatagctggcctcaagctagtgcatgaagtacgggctgaccacctggacatattcaataattctcaactagttgtgaatcaagtcataggtgaatacgcagctcaaggtgcaaaaatggtggcctacttgagcaaaataaaagacttactaagtcaactcaaaggctacacaatcaggcaaatccccaaagaccagaatgctacagtagatgcacttgcctgtcttgcgagtagcaccattgccgacaaggaaaattaggtgccaatacagttcctagaggaacccaccattaccatcatagaagaaattaacatgttagatgacactctaacatggataacaccttacgcaacttacctccaaactggagccttgccaaaagttaagaatgaagcaaacaagctaagaagaaaatctactaggtatctaatcctagactgagtaatgtacacatggagcttctccatgcctctcttgaggtgtgtcaccaaagctgaatgtaatgaccgctctagtatatggattagtaaaggcaatt

SEQ ID NO: 122270 - DNA, 1302 bp, Cannabis sativa
agatagttagggtgttacaacactcaagagttttgagggactcgggttgctggtggagctcatacacctcctacctttggttatggaaggggtggtagttgctcgaccactaatcagaaacgaaaggcattatttgcacccggtggcttaggttagaataagtggttctgagggaaccactgtcgaggcaaccgtcagggtggtttcaaaacctgatgcacttactcagagtgtcccagttgtaagaagcatcatctgggtgagtgtagagggcaagggtgttttcagtgtgggttaccaggacaatattaaagagattgcccgcagcttaagaaagaagaacagaagatagctacacaactctctctaacaagggtgtttgctttaactcaagcaaatgcagaagctagaccctgagttgtaacacgccagctttgagtcaacaactcttacttctctatattgtttgacgctggggtcacttactcttatgtgacaaccatgattttatagtaaattggataaaccacatgataattatgataaagggtttggaaccctactgcctgatggagaattagatatctctaaaagaagaattaggtctatgccgatcataattgaggatagggagttgagtgccgacttaatagaattgggtttagcggattttgacattacacttggaatggatttcttatcctagtactcagctagtattgactgtaaatgaaagatggtgatcttccaacccgagggcgagggaccacttgtttttgtgggatctgtttagggatcccggattctagtgatttcaatattgacaactagagatttattacaagacgaatgtttatggtttgtggccatggtaaaagataccacaaggcctgatatagttcgacctgaggatatcagggtggttcaggaacttttagattttttccctgatgaacttccaagtttaccactgcagaaagagaaatcgatttcattatcgatttagcacctggagcagaaccggtttttaaggaaccttaaagaatggctctagcagaactaaaagaattgaaaattcagcttcaagagttgcttgacctagggttttcacggcctactgtgtcaccctggggagctcccgtattgtttgttaagaagaaagattgatctttccgcatgtgtattgactattgggaattaaataaactgaatattaagagaaaatatccgttaccctaggatcgatgacttattcaatcaacttcaggggaaaacggtcttctcaaagattaatctccgatc

SEQ ID NO: 122271 - DNA, 2836 bp, Cannabis sativa
gttgggggggggggattggttttgggcgccgttcaagtatgagtttcttcctagcttttgttatatttgtggcattattggtcacactgaaaatttttgtcataaactatttgatacacctgaggaggccattgtcaaactgtatggggattggttgagggctcaaacacgtcgaaaaaattacttgcttcactcaaaatatctgcgtactcgaacggaggtggatgagcagacttttgggccaagtgaagcggctgctgggttcagatccgacaaacaaccagcgacagctactagtgcgacaaacagaggaaaagaaaagctgcctttttagttgatggtgggaatcaaagcaaatcaaagtccactactatttctcctaacattatgggcggtaatcatgcttcccttttttcaaattctattaatggtaattcttttgttgctaataatggtcagaatttaattattgctccaaaagataatttactgttgatccatggtgaaaattcggaccataaaagaaggaggccaaatgatgtggaagttatggatagtggtccttttgatatggaggttgatttggttatgtcacccaataatgctactctctcaaaaaatgggcttttggtgggttctggtgtccaggcccaccgcgaattatgagtgtccttagttggaatttccgtgggcttgggaaccctcggaccgttcaattccttaaggatcttgtaatccaaaagaagcctaattttatttttctttgtgaaactttgtgtcgtaaggaggttgtggaaagaattcgggttgctattgggtttgatggtttgtttgcgattgatgctgttgggcgtagtggtggtgtagcttttctttggcgtaatgatggggacatcaatcttctccattttgctcataattacattgatgttgaggttacttcttctgatcaaggtgtgtggcggttaatcggtttttatggggagcctaatcgtaatgctagggttactacttgggatcaactaaaaactttgtctacagcatcttcattaccgtggtgtgttattggggatcttaataacatcttgtctcatgaagacaagcgtggaggtgttccttatcctaactggcttattgagggttttcaccaaacaattcaagagtgtgagttgagtgatatggagcttgtcggtcatcaatttacttgggaaaaaagccgtggttcggatgcttggatcgagtctcgtttagatcgtgcacttgtctctaagcaatggctggtttatttttctttagctcaattgttgaacctggagttgagctcttctgaccatagtcctttgttgcttaatattgttggtcagtctcatatctctcgtcataagaagtttcgatttgagaatttttggctccatgagcctatgtgtttccaagttgtcaatgattgttgggtggagtcttctttgggtggcattcaagagaagattaagctttgtggtaataagctaactgagtggaatagtgattatttggggaaatttcattctcggttgaagcactggaagagtgaagctaaaaagtttaaagctgggcgtgatgatatgtctttgagtcagtttaaagatgttgagaacaatctttttgaagttcttaatcaaaaagaaattttctggcgtcaaagatctaaacagctatggcttcaagagggtgatcagaatacgaagttttttcatgctactgttactttgcgtcgtcgttctaattccattcataaactcaagagagatgatggtacttgggccgattgggacaatggtcttccgaatgtgatagttgattatttcaagacccttttttctagtgggacgtgccactccttgcatgctactaatgggattagtcctacgattactgaggatcataatgttgctctgctttcgtctatttcagatgaagaagtcaaagatgctctttttcaaatgcaccctgataagtctccagaaactgatgggatgactcctgcattttaccaaaagtgttggcatactgtgggtaaggatgtgattaagcaggtgcgatctttctttatgtttggcttcttacctgagggtttgaaccacactaatattgtgcttattcctaagaagaagaatccctctcatatgtctgatctgagaccgattgccttatgtaatgtcctgtataaagtgtgttctaaggttttagctaaccggttaaaagttgttctccctctggtcatttctgataatcagagtgcttttattttaggaaggctcatcagtgataatatcatgatttcctttgaagtaatgcattacttgaaaaggaaaaggcttggaaaggatggttacaaggctgttaaacttgacatgagtaaggcttacgattgagttgagtggtcttttctgtgtgatatgatgcttaagatgggttttgatagccgtgttgttaaccttatctatcaatgtatttcaacagtcacctattcggtcactcatggtggtcatgagttggatcctttcactccctcccgcggtattagacaaggtgatcctctctcgccatatttgttcttgatttgtggtgaaggtttttcatctcttattaaatcttctgaggctcggggagagttgcatgggtgtagggtgtgtaatggagctccggttatatcacacatgctctttgcagatgatagctatctgtattgtaaagctatcgatagggaagccttgaatgtcattagattgctgcagttatttgaacaagcctctggtcagcaggtgaattttgctaaatccaccatcttttttagttc

SEQ ID NO: 122272 - DNA, 854 bp, Cannabis sativa
tatatatatatatatcattacaatgaagtcattttgattctcatctcaacatagctagatgaagctaaagagaggtgcatcatcagtgtttgccagccgggtagcaacttgttagcagctggatattgcctgtattctagctcagttgttttcactctttctatagggaaaggagtatttgcattcaccttggatcctacttatggtgaatttgttttgacacatgaaaatattcagattcccaaaactgggaaaacttattcattcaatgaaggaaattatgacctttgggatgaaaagctaaagaactatcttgaccaccttaggcagcctggccccagtggcaagtcctattctggccgttatataggttgcctggttggtgaaattcatagaatgttgcttcgtggtggaatctatgggaaccccgataacaagtacagcaaaaatgggaacttacggctactgtatgaatgtgcaccaatgagctaccttgtagaacaagcaggtgggaaagctactgatggtcgccaaagaattcttgatatcacaccatctgaggtaatgccttaatcttacttgaagagattagataacacaacaaagactttatgagactagataaaacaagacttatgagactaggtaacataacaaagactttgcaagcctaattttatttctagctataagactgatctttaattttttgggacaggtgcaccagcgcacgccaattttcattggaagcgcagaggaagtggagaaattagaaaagtatttggcttgagacttttttagtgtttttcaaattattgtagattgattgtagttgattcttttgcaagtattta

SEQ ID NO: 122273 - DNA, 1552 bp, Cannabis sativa
gtgctcgtgctagagccaattcatgtgcccatattgatgcaggtgctggtgctggtgctcgtgctagagccaattcatgtgcccatattgatgcaggtgctggccctggtgctaaagcaggtgcttgtaccagagcaggtgcccatggtaatgcatgcgctgacgctggtgctaaagcagatgcttgcactggtgcgcgtgtccatgcgggtgcttgtgcatgtgcctgtgagggtgttgcgacagatgacaccgttgttgatgagtacctaacattctcatcatcactagtagcaatgatctgacacattaattataattggatcataaattagtaaacagaggattcaaataaatgataagaaatgaacaataattaatcaaaatcaattaccagttgagtaggagttttagcagtaattaacactcgtgcaacaccactaataaaaactcgagaaaactttgatttagattcataatcagacaatgaaacattcacagttacttcttcaccagctttggttgaacatgtcagagatgcaatttgaaaccaaccctgtaatgtaacatataattcattttatttcataataaataatcaaaattagtaattgaaaagcagaggatagaattagaattaatagttgttgtaacatgcctggcccgtgaatttaaacattccattagaataagtaatgtctgcagatgacagtacgccattagcaccaagaatggtcaacgattcacaagtagaagccaattctttgattttagtcacaatatcctacaaattaatacaacaaaattaattaaataatacatacatttagatgaaattataatttagaaatgattattgttattacctcacccacatttacagttaccacacgacgagtcaaagatttcaaagctgtgtacatatttacacacaaagaaaaatcagaaaatgaattaattcagaaagaacatatataaatttacattattcttgtgaaattattaagatataaaattaagagagagtgataattttcttttcttgaaaagattaattgatgatgatggtgatgataagaaaagaaaatgtaagattaataatagaatagaatatatataattaaaagatgaagaattaactaagtaaataccagaatgaagagtggattggctgggcaaggatgcattatttcttggtcgaataattattttcttactattactgctcttgtcttcttcattagccattttcttttcttgtttgattgttaattagtgttttaattaattctctattattatatatagagaaagggattagacaattaaccgacttttctatatgtattaagaaaaaccaattaattaaaaactatcacctccttgttggtatatataatataggaacatattacaatgcattccttaaaattgatatattgatgtactccaatctattttagcatctgaaataattttttctatggtcatgtacattatagttatttaagacattcttcaaaattttaagaaattcagaaaagttttaaca

SEQ ID NO: 122274 - DNA, 791 bp, Cannabis sativa
  modified_base (45)..(50): a, c, t, g, unknown or other
  modified_base (406)..(436): a, c, t, g, unknown or other
gtagggtcagtcatcagtccaggaagcagccaaagtgacgtactnnnnnntaagagtcattcattccgtgggtgtaagaacccaatggaggcttgaagtggggacgttacactgtgccgataaaagtgacatttcttatagggcaccgtgcatgattttccaaaaaccatcatgcatttttcaacaaccacaacgatatatccaaacccctaaatcacacacacacacacacacacacaaaaatacaatgtaagctaaaagacaaacatactaaagtgatgtttatctcaatgtaagctaaaagacaatattgaaactgttaacaatgatttcgttaaccaataaatgagtcttaatgtaataaataaactctaagataataatgaataataatagtaataataannnnnnnnnnnnnnnnnnnnnnnnnnnnnnnaataataataataataaggtttttaacgtgattttgaagttaactcttcatactttacgagtccatcttatttctagaatttcacaaagtgtttacagaatataatatataatatttgtataatattttctctatttttgaaattggcttcccccttttccttaagttctgtccctatttaaaagggttttaagatgatagacattcccttaagatcgtatccttataatcgttcatggaacatggataatccactactacaaaattgggctttagaggcggtttttaagggctttcagcatcggtattggcgaaattcgctaccgacgctattccgggtgacgctaaagggtta

SEQ ID NO: 122275 - DNA, 857 bp, Cannabis sativa
tcttagtcagcgtaaccgtttaaaagataaagacaaggagcagttgggtagttatgagatcttatttcgtgtgcaaataaatgaaacgtggagaatgtccacgtttcattaacagttgtaagtaaatcgatcccaataaaaataactgccaacctatacccctataaataggagcagaatttataaaaaaaaatggacggaaaatagagagagaattatattatttatcgttattaagaattatactctggattcaaataaatattcctaataatatagactcgtagagtatgtagattttaattacaaaaccacataaaatatctggtgtttttttttattattattattaaattatgtagtaaatttattacgtaaaaggctatgtatttagttaacaaaaatttgtattaacaacccacgttttacataaaactgaatatttagataaatataaataattatttatatttaatatacaaggaagtggtctttcaaatggtctttgacttggtcagaccatattatttgtgagcagacatattgttataggtgtaatacaagatgatgcattgctgttgtgtattacgatgagatgcattgttgttgtataatatgaggtaatgcatcactgattgtctattacgaggtgattcatcactgttgtgtaatacgatgtgatttatcactggtgtgtaatatgaggtgattcatcactgatgtgtaatacgaggtgattcatcactattgtgtaatacgaagtgattcatcattgattgtgtattacgaggtgatgcatcactattgtgtaatgcgaggtgattcatcactattgtgtaatacgaggtgatgcatca

SEQ ID NO: 122276 - DNA, 1845 bp, Cannabis sativa
  modified_base (1795)..(1798): a, c, t, g, unknown or other
taatgcagcgtatcaacaccgagtaacaagatacttcaacaaaagggtcaaaaagaggctattcaatgttggagacttggtgctaaggtgagtatttgcaaatacaagagatgtgtctgcaggagtattcaactcaaactgggagggtccttatgtgattgaagcgatagtaggaacttgggtttacaaattggctcggccgaatgcttgctaataaagaactactggaacgtgaaacatttgagatactactaccagtaaattaatgattttaactcgtattgctaatatattatttgaactttagttatgaattaagttaatctttcttttttcaagtaattacaaagtgttactctttaaaattacttaaggggcatatttgtatgataaaccaaaatttatctggaaatacatggtatagtgcaaacccgcaactttaaaaaaatttgaatttttttttaagtttttgatcaaacctttctgactagaaagggatcagaccatcgtaagcttttgattcattacctatttgacgagaaagaaaaaccaaaagttataaatgagatataactcataactcgcgtgtgaagctgaatattaatggctcgcacagtataagaaagtattaaatgagacatcaaaatgtcttgataaaagtacttaaacctagtatatgaatagacgatctaactattcatataagcaatcaagaatatacaaagtgacaaattattcaaggtgataaatcattaatagtatattcaagtttgcttaagacagattataactgtcattgcaaggcagaattgataactgtttgcaaattaaaagcttagcaaataaaaaactgctcgcgcacatattaaattactaactacttaaattagaaaaatacgagcaatggaaagaccaagagtattctgcattttatcaaaatataattgtttacattgtgaatgaaaacgcaaacaaacataaatatattaagctcgaatgtaaaggtacgaggcatttaagataaatgaaagctaagttggcctaacttctcaaacttgtctttacaaaaataccacaagggacaaaccattgggtcattttcctaaacaaagaaaaaataaatatatatacaagaccaagtctacattactataggggacttggcaggattttcttgttcttcgtcacctcttcttccttgcaaaattcttccttccgagtcttctcgcaataggcaagcatggtttcggccttatcatccaaaaaactaaagtccaactcggggttggctgaccaaatctgatagatggtcctcctaccaatattgttgaccctctgtttggatccagcctccaactctttgaccttttgatcatgatcaacttattttttaacaagatcagcttgaagaaatttaagagaattctcaagctctttaattttttgttggtcgtcttggtgttgtttttctgcttcatccttagtgcgagaaacctcagcttcagaatcgctccacttcttggctacccctatgttccttaatttggcgaagctcagtctctagcatctcgacccgttgagatggccggtgatgtgtagcgtaaacaaaaaaagaagcctgagaagaaagaacaaactgaagttagtaaggagggcagagtagggaagagtaagaataaaaaaagtacgaatattgacttaatgcagaagctcttgacttcttttggtcagaaactcggtattgctgcaaataatgagatcccaatcgcaagaccctgttgggttttatgccctnnnnaaaactccatttcaatgtaatctggattattcaatatcaataaagaa

SEQ ID NO: 122277 - DNA, 1068 bp, Cannabis sativa
atcatcccatttgaccttccccaagcgatgtgggattgcacaacttacacggtatttccccttacgaatcacgggactactgactgtcacaacaataccttcacttttatgtctcactttgcaccgaaaaacgagtatcagtgaaccgtactagcaactattgattaaagattccaaactttaatatattgcttactgttttattcacagctaagtgatcataggtctttgtataactacaagccacaacctcatatatgaataagaatttttttgatatttaatataatttattcaataataaatattaataatttaacattcaagtatttaataaatattcaactctttatttaatattcagaactgtctttatagatttttcaggatataaaccctaataattaatgatgactataaatgagatacgctaataacatcaattttaaatctagtagttattttaaagatattttttctacgtgctttctattctatataaggaattgtattatgatttttttaattatttttattcttttaaattatttttatatatatttatcattattttaataatatttttaaaagtaaacctaaaaatataaaattatatttgaaattatttgatatgatgattgtatattgttcaattaatatttatatatttatatataattattatttgacatgtgttgtttactagttatttcctttttataaaatcataagataattgatgatattttaattaaatacttaattaatatttatatttatatttttatttattgttgtagttgtacacttgcaaaaaaaataacggtgttaatatctaatatttacaaaatataataatttttgttgacatcgttcctctactaatcatgttaaatattttgttaggataatcatttaatttgttggtggcctattgattaatgatattatctttctttttgagatttctcccattaaatttactcaataggtttgggaaatttacataatatattaacttttgatatttttttacaaaaatattgccagacggtattttttactttt

SEQ ID NO: 122278 - DNA, 1508 bp, Cannabis sativa
tttcttggcaattctctcgtgtcttggaagagcaagaagcaacacattgtgtctagatcttctgcagaggccgagtatagggccatggccaatactacttgtgaattggtttggttactatctttactcaaagaattggggattgagcatgaaagttcagccatgttgcactgtgataataaagcggctcaacaaatagctaccaatcccgtttttcatgagcgtaccaaatatattgaaattaattgccacattgttagacaaaaggttcaagaggggattatcaagatatctcacacttccagcaaagagcaaattgttgatatttgcactaaagcattgctgctttctcagtttcaagctctcaaagataaaatggggttgtatgacatttacactccaccttaagggggagtattagattgtaaagtgaagtgtacatgtgtctcttgtagtgtgattagttagagagctattatttttgtttgagttagttagagagtcttaaccgactatgctctgttttgtgtctgtatatatatatcctctcttgtaccacttttccaattaatgaaaatacattctttcttcttcatcttcttactgctaaaaacaatgtattcttaaagttagttgggtttttcttttttattattattatgtttaggagttgcagcgcacttcaactttaatgatattggaaaaaaataattaaagtgagctaattgtaaatgagtcattacaaaatttcttcctaaattatatgtacacatacggtaattttttcttaaattttgagtaaataacgtcatttaaaaaaaaaaatcaataaaaaaagaattaagaatggcattaatgaaactaaattttataactaacaaaatttaactattactataccatcactaaaatattctgctcctaattagtatatatatttttgaaatggctcctaattaatattatattcacacaaaaaatatatataaagtatattgtttcttggttcacatgataatttcataattatagatttagtatataaacctaattatatcctgaacatataaatagtcacatatattgtgttgtctatttagtgaaaaataatcatgatcatatgtttcgaactaattaattaatctcataattattagtgcattggatttacactaacgtaataatcagcgatgtggtttgcttacacttggctaagtggtatgtctttttcaaggtattaaaaaagtaaattaggatcaaatgtaccagctatacatcggactagaccgatatttacagtagaaaatatattataaatttaccgtaatatattttctaagtaaatatcactatgttgatatttgatcaatgatctcaatcctgagatggttagattctggcttagctgtattgcacatattctttgacttgttcattaccagcttacctgtaggattagtccatacttacatcttgagaacacagtagtgtcattgagtgggagcgct

SEQ ID NO: 122279 - DNA, 619 bp, Cannabis sativa
ataattgtttctatgtagaatgccgtaaaaatacaaaaaaaaaaaaaaaaactgatttgaagtgtaaaaataaaaaagcccctaatactaattatatataatggatttctatattttttaattcttttatataatttaaaattctgaaattaagattaaaaaactaattgcaagcacactttatttgtataaatataaactattctgaattttgtaagaatttatagaaaagtaagtataactacattctattctataccatggaaaagaaattataatttatttatatattaaaatatttaaaatactttaattaaaagaaaaatattaaggggtaccgtaaagtattaagtaacattagagatgggtatactgttattggtacaatttaatatatgaaatctcatatattttgatttaataaataatattaaaaatcattagcttgtgccacattaacatgatattagacacttaattgttatgctctaattaaaactattcaatactataatgttaaagtgtcacagcggagaattaataatattcaatactctttattttttatttttgaaagaaatcgatgaatatccactttttatatacattaaccaaattt

SEQ ID NO: 122280 - DNA, 1142 bp, Cannabis sativa
atgccttatttttgtacttaaatattcagatcttccttaaaagaaatgactattcagatctagagagagaataggatgagaaaatcagaaaactatatataattatgaggtccaatccaaaaagagtacaacataatcacaaagagtaataattataaataagaaaacatatatccaagtaaagagagatgaataaacccacaccttttacttgcatacatacacatgtttttacaaagtgtgatcatatattgaaggagctatatagatgaatgccaaaatggattaactcaataatcatatatatttatttttggcaccaaaacagcaaaagagagagtatatatatttatatatataaatatgagttagttaagtttttcaagtggtggactcaactgatgagttgtgagagagggaagtgacagagttattattggtaggcatagagttggaacgcttcatccaagccaccggagaggacggccttgatcggtgaaaccggcaccggaatgagccctggtgcgccgtcggtgagcacaagcagtatccccctttgggtgagcttgccggagcttcaccagtcacactttttggtgatgaaattgagactttgatattctttgaaccattattggatgcagtgtggaagttgttaagagcagctcaagacatgaaatatgtaaaaaaaaaaaaaattaccaactttgttttaatagctctgagtataaaattaattgtttcaataaatagaatagacctgttgagaagtcttgatcttaactcaactaatgtggtgaacccaactgtgaagaataaatgatatatatactagcaaaaaactacgtgtgagacacgtatattaaattttatgctaggttttttctacgttatttataagttatacaattaaaagaaaaaatattattaattattaggtgagattattattatgtgtatctaaataatataatttataattttttacaattaaaattaaataccgaatgcaatatattagtgtttaaaagatagcttgataatttacatatgttcttaagttaatccaaaaataaactaaaaattgatgttccaatacttaaagaaacattacttaaatgagggtaagataaaaagaaaat

SEQ ID NO: 122281 - DNA, 777 bp, Cannabis sativa
gaagctgctctggaagggatctaaaagatgaggatttatcaactctttcagttgaaaatttggtgggtttgctgaacttgaaggaaaaagaaacttctgtgtagctaactttatcttccccttttcaattttcccttttcttggtgaaggttagtatagtattatacacaccatatttgattcagcacagcatcccaaaagataaaagaaaaaaaaaatagagattaagatcagctctccagctagtattaactctctccctctctctctcttcactcagttatcgatttgagcaagtgagtatatagtatcagaaattgaaaaacaaaattaaaagaatatggatccaattgctgctgctcatggccgtccactaccgcctcctttcttagcaagagatcttcatctccaccatccccaccaccaattccaacagcaccaccaacatcagcaacaaaattctgaggacgaacaaaacagcagtggtggaggcggtggcggtttaaaccaccgcggaggaggaatgaaaagagacagagacgaaaacaacgccattgaagggaaagacttattagtctcgcccggtagtggcggaggaggatcaggtggagattcagagatcactagaagaccccggggacgtccagcgggatcgaagaacaagccgaaacccccaatcatcataacccgagacagcgccaacgccctccgatcccacgttatggaaatcgccaacagctatgacatcatggaaagcatgtccgccttcgctcgccg

SEQ ID NO: 122282 - DNA, 2187 bp, Cannabis sativa
ctctctctctctctctcattcagcgcgatagtagatatatcgagggttggtggtgcctactcctcatcggtgaccgtaggtttacaaaataattaatctctattatttttattttgggatttatatatttttgagatttttgtatttcacagattgtcaggtatgtggttttggcagagccatggcccaaatatcagctctttgggactcttaaggccaaatgaaactatctgttgtgtataaatacagatttattgtgtgtgtatataggcttgagatttttgtatttgtattgtatattgttcttattgttcatattgtaaagatttgaagatttttttcctatataatgatatagccaactgtgcaaaacagtcggcaataatagtatagctgtaattttgcacaatatcacttatattataagcgacggtgcaggcgactgttgtgaattttctagtacgcaagtgcacgtatcgtttacaagtattagactcttaagagtgaggtcgattccacaaaaactatagttaactaccaaataattaaattcctaaattctatttggcgacataaataattgagaaaaaggagtttaaagactttgataaagaaaacaaaaataaatctaagtgcaatttagcaatgattaaagtttagggtgattaatttcaattgaatctactttatattatttagtataatataattctcaaattttagttttcatgtgatagcggatttactaaagaaatttatatttgggctagacatataaatatcaacctatatgtaaactttctactctcgtgataaatttaaacacataggaggcattaagcataaaagtcttaaattctacacaaactatataggtactctcatcttatatcaaaatctgtgtctatttcactatagcatagtcaatactcactttctagattttgtacctattgatatcataaacagttaattgatagccaaacaattaaaagaaattaagtacgaatgaaataaatacacatagaaaatttgaggaagaactaaatcatattaaaactataataaagaataaaacaatctccattaataccctaattaagagtctagctactcatattcattgtaaatagctgacaacaattaattaagaacatgagaaaagagtaaaagaaaagaactcgtcgaaaaatgttaataaaatctccagaattgctttttgcttctaattttcgtccctaatgattgttgttttgaaaagtgccaaaatggtcctttatatagcttttcaataaggttaaatccgtaaaattcgtcactgaaagcaggcaagccacgacattgaccctccatgtcgcagcccctaaaggctatttttgggcaacaagctctttggtgcgacgattgataatgtttttgtcataattcttttaatattgctcagaattggacgattcaacatgttttggaaaactgaaagagagatatataaattttgttgacaatatttttcctcaaagtgaccacatcatagtcagaaattggtttgaaactttagacttgattttcgatcacaaacggagcatgttgagcatccaaaacttagaattttttaccaattatatcctagaactcaaaatttcatgacaatttatcatattcatctcatttaacatgtttcttcttattttaaattcatattatgaattttaacatttaaacgtgaaataagtagaaaacaaacgtaattctgcacaaaatgaatataatcaattgaaacacacctctaaaatatttataaaatgaacctaaaactagcatatcaaactcccctaactttagcctttactcaccctcgagtaaagatcgacacttaactaataacaaacgaacacaaagcaagtcttacttcatttcacaccacaccaccgatattcgtaacattaaactgttataaaactagatttataatctaattactcccaatgctaactttagcattcaacttcgaaaaagagaatataacttacaaatgaaaaaaattattggaacttaatatacatgcccagaacgcacacagtgatctggtgtggagaggtaaaagttcatctgcttctgaggtggtgcttgttggaaatattttaccaggatctagattttctaccatgtatgtttcattaacatcct

SEQ ID NO: 122283 - DNA, 1714 bp, Cannabis sativa
  modified_base (45)..(61): a, c, t, g, unknown or other
  modified_base (1654)..(1683): a, c, t, g, unknown or other
agaaagttcatatttaggatgtttttaaacaacatacttgtgagnnnnnnnnnnnnnnnnntaaaataaattccaacacatagttgctgctaattctaccctggccgctccttaaaattaggagctctctgccacatacaaaaaaaattgaatgaagatttccccaatctaacttcgagatacaatgagaaaacttctggaaaatgatcaaaatatccttccaacataaaaaaaaacctttgtcgtttgaaatttcacatgccaactcggattatccataactcggccaatctttgaatagtttctatcttcactcccttgcttattattccatgtataaaatgatctagtgtatttgatatcttccatttgacacacttaaacacacttcttgaattcctcatttccactaacatttgctttcttgccaatcatttcctcatgataaataatgctagaccggtggaagaattagaaaaagttgaaattgatcccaccatgccgactagggttgtacataaatttttgtaaaccgcaaaatctgaataacccgcccaaaccaaaccgagataaccctacgaaaaatataaactgaaaaacctgacgaaaatataacacgcccaatcttatattgggcgggttgaaaataatattaacccgtccaattaactcgaactaacccaaccaacctgactaagagggtttttttttaatattatttatatgttcttattatatgtatttatatatcatataatttatatgactattttaaaaatataaatttcaaactaatatatattttttatggtggttgatttgaacattaaattcattctatatatatttgtctcattattacaattaactaaaatataataattgtatataaatataaaaaaatattagtggtcggtttggacaggttaacctgaccaaacccacaaatttaaattggccgggttactattttctttttcttaattgggcgggttgcacttagattgttgtaacccgatctttacattgggttgaataaaatatagcataaactgaccaaactgaccgatgtacacccctaatgccaactacgaaagtaaaaattagtaagggtttgctagttgaaataaaattagctttaataaaaattttaagagcaaatgtcgacatatttttgtctggtcacatgaagatatggtcaggatcgatctaactgtaatgtctcatgccctgaacattgatccaaactttcatcccatccagcaaaaaagaagattaattgataaagaatgcacgcaagcattaaaggaagaggtagaaaggcttcagattaacaaattcataattgaagctttatacctgacctgggtagctaaccccatactagttcccaagcagaacaaaaaatggtgagtatgcattgatttcacaaatggtgagtatgcattgatttcaccatcctctacaaggtgtgcccaaaagattgctttccacttccaagaatcgaccagcttgtggatgctacagccggccataaaatcctaagctttatagacgcctactcagggtataatcagataatatgcatccgcctaaccaagatcacactagtttctgaacaaatgtgggtctatactgttggaaattattttannnnnnnnnnnnnnnnnnnnnnnnnnnnnnttattaacatcctaaataagaactttctaaa

SEQ ID NO: 122284 - DNA, 1085 bp, Cannabis sativa
aaatcccattttattatcataaatcatttttcattttttattataaaaacaaaaaaaatggaaataaaatcatgtaaaaatatttgtatatatgataatataaaaattaaaaattaccttgtgacacctcgataaatagagctgcgttgaggaggagaatctctaggaacacttcttcttgttcttttcacttttggaacatgtgtcccattattattagtattaacatttgcactattatttttctgtgataacttcgccatagaaattgaaataataataatgaacttaatattaataatttggagtgaagagatgatgatgatgatgatgaattttataaaatataatgaaatgaaggttataataatcttttttggtttattgaagaatataaattattatgatgacttggtcttcaaaagaagagggttttaaagaagaatggaattgagtagagaattaaagagattaattaataattaattaattaaataaataaaaaaattgagggttggaaaaagagtaattagtagtacttgaggggtgtagtgtgggctgtcaatggaaaatgagatatatttttgggtaccactgattaagattggccggcagagtggaagataagaaagaaagatagtttgttttaatttattaattaattaatttaattaattttgtaataagatatatacatatttatatatatggccgacttcttccggccaatactagtatcttcttcctctttgtcttctttttttaattttttttatgtgctgtaattatatataaatcttattgtttattgtaaaaaaaatgttgttagtaatatacatatatcttgctcatgattttacatcttttttgttttatttgaatattgctattagatattttaaggtggtaaatgatatttaatgtagcacgttgtaagagcaactgcaaggagacaccatatatgtatgtaggggtgggtatcattcaattaatccaatccaattgaaccgagccaatccaatctaatccaattactaaaagttggatatccaattacaatgggattggattggatgctaaaagtt

SEQ ID NO: 122285 - DNA, 4447 bp, Cannabis sativa
  modified_base (4381)..(4392): a, c, t, g, unknown or other
ccagcaactaaatctagtatccccctgagcgagtcaggagggtatgtagctagacatattgcataaactcatagtgctcaaccatccaatccaaggctacaagtctaaactgtgagctaaacgatagacggccagatcttgccgaaccgccccttgagaggatgtacacattcaaacaactatactaatacaaaggtctcaggccaacctcttagccaaacaggttaaacactaagaccacctagagcctaggtgttcgattggctaggcaccgtgcatgatctcaaaaatgatctaaattgtagaaggggactagacagacaaaatattccaccaaccgtctagccagatacccacactcaagatccgattcaaagaggtcccaatgtgacacaggtttgtcaccacgctggccaagttcatatgcttatgcaagtacaaatagattaacttaaaaacatggtacaaggcatgaccgacccaaaactcacagatctcaaactcggccgggtacgaggatcacgcttctcacctgatattaaggctcttgacttactctcgaagtttaaaatgccaatatgaaaatgtatacaggaaaagaagatcctttatcccatttgaagtactttgaaatgttgatggacctggaagggtaaagaggcaatgtacggtgcataatatttttggccacactcgtagaggccacccaacaatggtatttcaaattgcatccaagaaagtttaatttgtggatttcattctcctttgaattccacgcaccatttcttcctcccgttagcttccctcacacctagaagacctggtagaagtgaagcaaatgccaggagaacctctaagggcctacattagcaggtttatgaataaagtaacaaaagttaaaggcctgattgaggacagcagattagaagcaatactgggggtattgagcctttgggagaattatggtaagatatcaaaagattaactatgggattgatggctgagtttctggattgaggagatggactcattaaacttgaggaggcagtatagcgtgtggatatcgtaggagaaaagaagaatcaacaacacaccactgcaactggtactcccgcccagaagtcataatatcccggcagctcaaattcaaatggaaaaggtccaacaacagcaatagacaaggtaattgaaagaaaggcaagttcactggcaacgctaaacaatatctcagagagaatgcttctaaatttacttctttctcagtcctaacatatgacatagaaacaatttatgcaaccacccagtctatggtgtcgtacaagaaaccctctcccatgaagaaggacataagcaaaagagatacaactaagatctatcattttcatgcaaattacgaccatgacacaaatgaatgtaacaattttaagcaagagattgaattcttaattataaaaaacaacttgcacttacaaaaatatgtcaaggccgaccaagggcaaagggctgcctgggtagataataaccaaaaccagctattgcctccaccagtaggtggacatctgcaagtaatcattgggggcccacacctcactggagacttaggcaaagctagagaaaagtatgctcgaccttacaacatgaacaaaatgatacaattctagttgtggaggaaagcaaacctaaaatacaacgtgtaggggaaccaataataacattcattgaggcaaatgctagccatgttatcttcccacataacgaccatctagtcattgaaatacagattgcaaatgagatggtggcacggactatggtggacaatggagcttcttcaaatattctattcaagacaacctatgagaagatgggactccaacttaaagacttgatcccttgcactcaacttgtatacgggttctccggccagagtgcagtaccacttggaccaattcagctactacttacatttggacaagctccaaagagcataactgtaatggcacaattcctggtgattgatgtcttgtcaacttttaacattatgttagggcgacaagcctatatgactttaaagatgtcacattggtattctatctgtgcgccaagttcccaactaaaaaatggaataggatgtctaaagggaaatcaaaggattgcacgagagtgctacaatcttgctctatttaaggtcaagaaggaaaattccttcggccagagttcagacaaggggaagagcattccctaataggaatttgcccaaggcggggacgaagacatagatccccaacttgggggaaaatacaaatgttgggccaaaagaagtggaaattgatccaaatatcccgactaggaagctcaaaattggtaaaggcttgctgctcaaaataaaattagccttaataaattttttaagagaaaacctcgacatttttgcctggtcacatgaggatatggttggtattgaccccactatcatgtctcacaccctaaacattgatcttgacttccatcccgtccaactgaagaggtagaaaggctacacgcaaacaagttcatcattgaagctttctacctggcttgtgtggctaaccccatactagtacccaagctcaacaaaaaatggtgagtatgtatcgacttcactaacctcaacaaagcgtgtcctaaggactgttttccactcccaagaattgctcaacttgtggatgcaatagtcgggaataaaatcctaagctttatggaccctaattttgggtataacaaaatcagaatgcatccacttgacaaagaacatacaagtttctgaacagatgtgggtctatactgctataaagtgatgttgtttggtcctgaagaatgctggggccacctttcaaaagttagtaagcaaaatgttcaaaagtagatcgaaagaaatatggaagtatatgtggatgacatgcttgtcaaatccaggaaggctgggggcacatagaggatctggatgaatactttaaaatccttaaaaaatataacatgaaacttaatcctttaaaatattcccttcaggttagctctggtaagtttcttagatttattgttaatactcgaggaataaaagccaacctagagaaaatacaggctcttctagatatgagtcaccaacaaaaggaaaggaagtacaaagcttaactagtcagatatctgcactcaacagattcgtttcaaagtcgatggacaagtgcattcccttcttcaacatcctctgaggcaacaagaagtttaaatagacagaagaatgcaaaaatgctttccaaaaactaaaaagacaactcgcaaaacctcccgtactctcaaaacccttagacagagaagagttagggatatacttggtaatcaccgaatatgctgtgagcgccgtgctaataagagaagaaaataatgtccaacatccagtctactatatcaacaaacgacttgttgaagcagaatgttggtaacctttaattgaaaagcttacttacggtttgatcttagccagaaggaagttaaggcactatttccaagctcaccctggtcgggtttataccgaccaactcttgcaccaagttttgtaaaagcctaatgcttctggatggttactcaagtgggccatagagttgggtcagtataaaataatctttcaatcctgtagaatagttaaagggtaggctttggcgaactttgtggtggaatgtagaagaaaagaggaagacagctcataggatagccatgagccagtacatgagtccctaccagaagagaataaagacaaacctatctgaagattacatgtggacggatcagctaccaatcagctttctagtgcgggaattgctctcaacacacttgggggaaacctctagacagagcaatcaaatttgggtttagagcctccaataacaaagcagagtatgaagcactcatagctgggctaaagctttctcgagaggtacacgctgaatacattgaagtctacagtgatttagagttggtggtaaatcacgtttcaggggagtacatggctcatagagagaagatgatggcttatcttagaaagatccaggacttgcttgcacaattcaagggttacacccttaagaaaattctaagggaagaaaacacaactactgatgcctttgcacgactttcaagcaacatattgacagataaggccaacctaatcccaatccaattattggaggaacctaacatcaactgtgtagaagaagttgaaatgatagacacggtgcagaactggatgacacccatagcagcttacctcaacactggagaacttccaaactataaaaatgaggcttcaaagatgatgagaaaagttgcctggtgttgggttttatgcccnnnnnnnnnnnnattacaatctgattagttatcaatttagaagtgaattatgattacatgtatgtta

SEQ ID NO: 122286 - DNA, 947 bp, Cannabis sativa
  modified_base (659)..(659): a, c, t, g, unknown or other
  modified_base (885)..(885): a, c, t, g, unknown or other
aaataacatagaaaaaacctagcataaaatttagtatacgtgcctcgcacgtagctttttgctagtataaatatatacacatataaaaaaaaaataaataaataataacaccctataataatattttagtcttatttttatttacagaaagccacataaattactcaatacaatccaattttgtttttttatttacataaagccacataaattacccgaaaccagaacttctaacacacacgcacttttttatggccacctagcctcaagtaatttacattccaatttcgtttgaattgctttagtaatattcttcacatttcattttaataatttattttattttgtggatttgagtagtagcaccaactttattattattttattaggaataagggacaaaactgttaagtaaattattttgcaacacatttattttcttttaaaagtgaataaaaatagaaaacttctaaaaatactagaatttgagttaatttttacaaaaatattgtcatacgatttttttaaaaaaaatactgtatttttataaaacaacagttgaacacaaaacagaacaactaaaaacaataatggaacaactaaaaaacaaccgtagaacaacagtttaaatttgacacagtacacagtataaaacttanacagtatttttgaaaaaaaaatatagaatttttgaaaaaaatttcaccccatagtaaaaaaataaaaataattaaaaaatttaaatgatcaacagcagtatattacatgaaatattgatcattgaacaatgagtataattctaaccaaaccatttataaatataagaaaaaaaattctaacaacaccttaaactaaatttttaataggggtgaaaatcggtcggtnatggtcggtttttacaattttataaccgaccggtcggttacggtttttattttacgaaaacc

SEQ ID NO: 122287 - DNA, 1319 bp, Cannabis sativa
  modified_base (207)..(216): a, c, t, g, unknown or other
tagtcacaacaaaaagttatttgtgactaaaacatagtatttagatacaagtcgttaataatttagttagttacaacaagtattgtgactaaaatatatgtagtcttaacaaattgtgatttgtgtgactaatacctttagccacatacattttagtcacaacactaaaatgataatttacaatagtcataacttttttacttttannnnnnnnnnttgttgtaactaaaagtaagattttttgtagtgttttaatttcacaaaaaattaagtttaagtttaatattgtactattttcaaaaaaaaaaaaaaaaattatcatttaccaaaatagaaaataaaattaataatttttataaaagacatgacctaaaataatatttaccatattttaacactcatttcttaccttatcttatcttttatggtacaaacacaagtagggctatttacatattacaactaactacttcgagtaaacataatgatcatgattaaaaaaagaaagaaaataaatcataatatatagttttgttactttattttctttttttaaactcttaaaaataaaagagcaaataaaagagtaatgctattgatccatttttggcaatttcaatcacatactctatttctctaagctacatgccttacttcttttactataaaataaaatataattttaagttaattttaaatttttgaatatattactttcataagtaaatctatctaaagattaattaagtaggagaatataatcaatattttataatttataaaataaaaaaaaaacatcaattgatgatcttgatatatatatatattattcaatatattattagtaattaacaagctttaattttttcttactaaaaaatgtcttaaaattattgcattgttattagtgagtaaattagtgacgtcatattgtttttaacgacgtttgtacacactcaaagacaacgctaacttaaaaatattaatttctatttgataatcatatattaaaatagtaaaaaaaaaattgataaatcttttttgtaacgtttaaattcttaaaaaaaattaaataaatttactagaaagtgaatataatttttctttaaaataaacataattttttttataataattaagccctcgtaaagcaatgtaaaaaaaattgaaatacattaatactcatgaaagtaatatattcaaaaatttaaaattaacttatatttgtcattattattacagtagaacctctatccaagaatacacttgggatcaactaaattatattctaattggaaggttataactaaatagagtta

SEQ ID NO: 122288 - DNA, 749 bp, Cannabis sativa
  modified_base (42)..(75): a, c, t, g, unknown or other
ttttttaatttacagtttggatttttaaagtggttgcagcgnnnnnnnnnnnnnnnnnnnnnnnnnnnnnnnnnnttgcaatttaagttgcagagctagttgcaattgaagtttttagtaaaaatgcaaaaaaaaactattagtgtaaaaatgaaaaagccccaatttaaatttagtgttaaatcaacactaagatagtattattttaatattaattatttttaattccgaccacaacactataaattatacgaaaaaatactatttattatttttaaggaaaattacaacaaaagtcttcaaaaagtttattttgatgcaaataagtcctaacctcgaaaaacaacaataaccacaaagactagacttcttataagtgtgttagtccttatttcaacgggtccgtcttattaaaaataatgccacgtgttgaattctcattagtccaagttatattttaattaaaataattttgaaaaacaaaataaattatttaaaaatcataaaaaaaaaacatatattttctttttattcgttttcttttttatttttttcgtcttcttcatttggccatatcctgactccccaccctacctccacccacaccccagccataccccaacccccacatgaagaaggctcaccataaaaaatggaggccacctgtaaagtccttttttggcaagttagttgacaaaataatttttttatttatggtaagattactatgcattcatattcgatttctt

SEQ ID NO: 122289 - DNA, 1939 bp, Cannabis sativa
gagagagagagagaggatgatgatgaaatgtaactttttctaatttaagaaaatagaaaataaatcatttccccttaagttatctcatccctaatattttctagaaaataactaaaagacaaaactatatttaaaatgaaacgccattctacccaggggcggagccaggattagattagggaggccaatatactctttgagatcttaaattatttagtccccatataaaataggattgatattattttactttttataaaagttaccaattaaattctctgttttgtaaaataacaatttggaccgtgtattttctaaaatggtacaaaatactagtaccatgggctcaatttttaataaatttttaataactttttttaataactttttttttttaatataactaatttgaagataatttttagaatgaactgatgcagaaaatgtacacagtacttttgtcataacaactttagctcgagttattattgacttttattttgacaaaaaatcaatttagggtactattttgtaccattttgaaaaatatatggttcaatttattatttaacaaaacagatggtttaatcggtaacttttgaaaaacataaggttcaaaatagtatttaccctataaaatattacattttttacgcaactatcaaataagtaaaaattattatcatcaatattatttaagatccaataatatatagtcgaatacgacaccatttaaatatattgaataataaattaaaataatgatatgattttttatatattgcctatcaaaattataaacttaagaaattaatggatcgcattagaaaatcattgagttcaaataaaattttaattaaaatcgcctaatattactaataagctacaaaatttaaaaaaattaacatttcttgaactcaatacgagtacaacaaataattttctggtgtaaaaaagaatatattgtacactaaactctttatattagttattcacatttgttttattagatgtacttttattttttattaagaaattcatctccacatatactgttatattatatagtaattatgcatttatattattgatctgcaaagaaaaactttgaaaagtcaacacaaacaaaacataaaaatacaataatttattttgcaagctagaatacattagttagttgtataaacataaatatatggaaagatgaggggggccatggcccctgtggagctcaatatagctccgcccctgattctaccccttaattggcttttaagtaaactcttgggtttaggggtacttgggtcataacaaattaccccaaaatattacaacaacaacatctaataaacattctggtacaattaaatatcatatttattatcgtcgtgacgtgacatctttggccaatccatcgaatttctatagttgcctaacttgaaaatattttattccataaatggtatgtacagtacccatatattataataaaatctctataattaataaattacgcttatctattcattcttataataatatctaattattacataattagcttagtaagattataattttacccattatgtcctaatactcatattattctatatctaataaaacatggttaattaaacataatcacccttttcaggatattacaaaaaagttcttagtattttattattgtttatttctgtattgtttcttattgaaattttactggttgaacacgttagatatcgttcatcaagcttggggagaagacttttttttaagacactttttgggaggaaaaatgcaagtgagtcacttttccagaggaagagtgcaagtgtaatatcttgaaatatagttatgtttaatttataagcatattttataaaatatgaaataaatggaatatttacgccctcactgttggaaattattttac

SEQ ID NO: 122290 - DNA, 3068 bp, Cannabis sativa
  modified_base (1949)..(1955): a, c, t, g, unknown or other
  modified_base (2025)..(2026): a, c, t, g, unknown or other
aaaacccatatctccaaattttgattcttacgtgaaaatggaaagaaaattatggtgaaaataaggaataggacgaacccataacaacaacaaagtatgtttttagcttggacggttgttgttgtttatttaatttaatttcttcttcttctttttttctttttcactttaaaagagcataaatatgaaagaaaagaaagcttttttgggttttttatggcttagatgaaatttacattctttttttctctccttctttcttaaactgaattatcatctatttactgtgaagaagaagaagaagaagaggaattgaaaactcggaaatgaatgaagtgacagagagagcaaatttatttaatttaataataaaaataaaaagagaaagaaaatgttttagtagagattgtattgtagtgtagagttagagagaggaatggtgagaataagagccagaacattttgatgggtggtccaatggagtcagcttctgggccatgcaccacaaaaattgacactgcactgcacttctcttttctttatcattactttttttaaaaaataaaaaattaaacttttttctttaataaattcaagttttttttttttttgaaacttttattagtgcactttttaaagaggtgcattaatatatactatttgtgttttggagttctgagtttgtattttgatgtaaatttgttataaatacatttgaatagtttaggtaaattttatagggatatgattttgttctgttattgtactttcacggattgtaatctgtgatgtacggcagccgtcagatgagggaattatttgatctgacggctgagattgatttaggagtaattagggttaaaaagtagaaacgtaccttgacactcatttaatgtaccctgagacacatttaatgtaccacggaacacattccgtgaaagtacatcacgggacaaaatcatatcttttaaaaaagatgtcccgatatatttatatttattttggtatttgaaataattttttagttaatttttttattgtgatcatgtacatcagagttatttaagacattttataaaattttaaaaaattcgaaaaaatttaacatgctgaaaataaaattcaaatagtatattgcacacgtaattatttaattttataaacgcgtgaaataaattatactaatttttttaaaattttatagactatcttaaataattataacgaatataaaattaaattaaattaaatttttttttaaatgtcaaaataaatatacaggacattactacatttttttaacatggtttattgcataaacacccttacttatttttcttaatgtgtaaaatgaatgctactttatgtattataaatgattttaatttatcaaactttacatcataaaactatctaaatgttaagggttggttttatggattagaataggacttttttttaatcattcacaagaaaggttcttttttagtattatttcaaaaagaaatcatataagcagagatcccaatgggatttagttaatgacgttttgtttcaagaaaaaaaaatatatattatatgaccaaatgatctggaagagggaacccacttcgattttgtatcatattaaaacagaaaacctctggtggcctaagccattgtgtctgtttttttttttttttctattaattgaacaaaatcttttgacactgcaattcgttttgattggtagtgaagtaaagtcagctatcataaaatgttattattttatgttatatttgcttacttcaccaattgtaagacaaaacattatatatatatagaaagaaaattggattatgattttgtcgcgtgatatactattacggaatgtattctgtggtatattaaatgggtcttacggtacattaaatgagtgtcaggtacgtttctactttttaaccctaatnnnnnnnagatcaatctcaaccgtcagatcaaataactccttcatctaacgactgccgtacatcacggattacaatnngtgaaagtacaataacaagacaaaatcatatcctttattttttaatagggggaaaggaaaggaatatctttaaatccaattttcgaaaccaaatggggaatctgaaaaatatttatattatatatatacagtacatattcttaattgtaaaatgtagaaaactgtagatgaaaagaatattcttatattgtttaaataaaattaaactatatcctttttatttttgagcttttttcctgttttttaataaagaaaaaaaatgtttaaactattgaggatatgacacatagagtacagtggggattgaagaaagctaagcccttgaaagaagtggatcttaagcattcaagtgtgtgtttgagacaactttgaatgtaaagtattgtcttcttcaaacacaataatagaaaaagaaaagacatgggcagatgggcttgcctcaaccatactatgtcttctactgcttatttcatctaaccttaatatggataattgacacaagatttatggggtaggaataggaattattgtgcaatctagattacaaacttatatgtttaatcccttgaatacataaattatccaaaagttacttttgatttcataaaactaggaagataattatccaaaagttacttttttttttagttacaacttacccagctcaaccatcattagccttacaaacactaaactaacaacaaaaataaacaaatcaaacattgctcgagtaaagcaggtgggcattgcatgaaaatggtatcgaaattcttatttgggtagcgtttggttgagagaaatgaaaataaaagagaaaaaatgagaatatgaataaaaataagaatagaatggaataaaatttaaatgtataaaaaaattaataaaaaaaattattaaatttttttttatgttacattggaataatttttcctttcatttcaaaatgaaatactcattccactgaaatggtgaaaagagcattttattagaatgacattctaatactttaaaatacaaccaaacaatggaatgaaaattgttt

SEQ ID NO: 122291 - DNA, 1022 bp, Cannabis sativa
tcagtgtgcaataaatatatatttctagggcaattttatgcactatcatgttttctgtaagtagatataataatattcatggtatttttagaatattttgcaatttttgaaaatattttaaataatttattgtattaaaaataagattacaaataatcttgtttttttattggtgtaacaagattgtttgaatctttttttttttgatataataaattattcaaaattattaaataataatttgcaaaaaattctaaataactaaaaaaattataactatatatctacttatcaaaaacaagtgataggtgcatggtacatccttattttgggtgcactgttaaatttttctataattatatatttatgatgttggtcctagagtggttattttttttgtacaaatttactaagtattatatttttttttaagcaatgaacatattcaatttacttattgttatttataaatatatgggacgtgtacatgtactcctctcctcttttcaaattctaaatgtttgtattattgaaaatgcctttttgttccaattcaattcctataaggtgaagtgatccttttagattgagaaatactaaaatgtattaattatagtacctgtagcatcttttaatatgttttatcgctattgatacaataaaatgttgaatctcatataatttaaagtaatagtttttacatagaatagcgttaactaataacaaaacgctatctctaaatggtgctaggaactactaacgtttttttttagattagttgttgggattaattgatttatgttgacagtggtaattcgatacattatggtcggaaaatgtattaagaacaactaagaaagtgaaaaattgaagaatatagatcactactacatcaatagagaaaattttatttatttgtcttgaaagtgtgttacaacaatttgatgcattatgatagggttgaatcctcatatgttgggtaaatttggggctagggcggtattttacaatgatatattggc

SEQ ID NO: 122292 - DNA, 1555 bp, Cannabis sativa
  modified_base (1435)..(1454): a, c, t, g, unknown or other
tatctcacctataaatatagggtctcggtccccgagctcttgactcattctgttcaaaatagcaaaattctatctaaagagagttgcaagaccgagaaaacccgaactctaatatcgaagctatcgcaaagattgaagcttaaatattaatggttggaggtatttttgattctttcattggcatatacaattttaatatgtttacagtttattctgtattaaataacgtatatatgctttatcgtttcatattataatatagtctaacaaaatatagtatattattttattatatttaagtattcaaataattttctattaacgaaatattattctattataattttagtatagtttatgtgcaatcatttcagtgtaaaatctaactacctgtgtaatatcttataattctttagttagatactatctatttaatttgttacttattattcaacacaattatttttgttgtgctattaaatggtctactcaatgagtttattgtttgagacattacacaatagaagaaaatgaagatattacaattctattacactattaaataaatacaccaatgaaaaaaattaaataaatattacaacactaatatttctatactatatatataaaaaatagaagaaaaatagattatatttcaacatataatatataatatatatcatgaaaaagaagataatttgctcactcacaactttaagtgttaaattagtggagaacactatgatttgaacaatgtataaatatctttgtctaaaagtttatttctctctatctctaagtgctaataactctctagataatagttttggaaattatcaagtgttaaaattttctaacaaagtgctctttttgataaaaaaaacttcattatcataaaaaaacttatgagcattgctattaggcacaagtggtgcctagcaccttatcgacatgtcgcgttgcgattggctatagcgatactccctaaaagctattatattaaattatatgggactaccaatagcgatattgacacataggaaggtgcctctggtgcactttagcatttctctaaacttattagaccactatttattattttttttagataatcacacctcacatttaacattcatgacactccatgaatgttttcagcatataaatagataaaatagaagttatggacactcaagattaaaattgggattaattccaattaaaaccaaaaattaaaaccaaaacgtttggaatgtttttttttttttttttttgaaaacaccttgtgctagctagatgatatgtcgccaaacataatttaacatacttaaaaatggagttttgtacgtaactcctttcaaccaagctaaaatttttcaccatctcccagtcattttaatcacttaattaatcgtttggaacgccgtattaggtnnnnnnnnnnnnnnnnnnnntatattgaattggattatatatagtatttttatataatactatgttaaattttaatttatactaaaatattatatatccataaaagttaataccacatata

SEQ ID NO: 122293 - DNA, 853 bp, Cannabis sativa
tggtaaaataatttctaacattgagtgccattgtttccccataaaaactacatatacacttatccacttctttcataatactttgaggcaaaagaaaaatactcatctagtaatttctcagacataatatatagaagtgataagttgagatctacctacatatgaaaggtgtaggctagcccaagtatggaacctaagatttttttttctttagaattataccacaatcttcaactttttacttatttagtctcataagaatccccaagtacttaagaggaaaagtttcctcttctaatttgaagcacaactcactactacaaaaatgggttttttatcctatttttaggggcattttaacctagtttttgctaaaaaaaaccaggatatatgccagtgaaataaaaagtcttataaaaaaggaataaaaaaccttcattgatctcaatttttatgtaaaaatctagattaaatgtcaaaaaataaaataataaattataaaaataatcagacttaaaatcttattatcaatccattattttagaatatttacacatatgtttttcacataaaaaaaatctattactttataattttttccgtaacatatacaaaccagtacaataaaatccaaaataatcactacaataaaaactacaaacactcaacaaccacgaaccaccataaaaaattaccacaaaccatcgtcgatgccacaaactaagaagcaccatgggtaacgaactgccacaaacctccaacctctgtcaacctaagaaaacggaatatactgtaaagaccgcttagtttaatttgaaaattagcagttaattatgtttaattatggaaaatt

SEQ ID NO: 122294 - DNA, 910 bp, Cannabis sativa
aataaaaacagtatgctctttaatctacttaacaaatcacaatatgtttttggcaaaaaaattcaagcaccgccgtcgttttttcatatccaaacaccctatgtcacacaacaataacatcataaaaccatatttaaagcaatacatatataaaccttaatcaaagcaaaattgcgtttaccgtggcaataaaaccccaaacgcacggatttaaagcagctttttctaaccttaaaatgtcgaaataaattgttttttacggtgtagattagtttattggtgaacaaaataggagataattagaagaaaaagattgagagaaaattgtagtaatttttagaaaaccctaattttctaacggtggttatggaggttttatgattggaagtgtgagacaaagaagaaatgaggagtttaagctccacgagtggtgtattgaatacctttcactttcgttattagaaaataactgaagataaaaaatttcactatagactctttcgaaagcattattttacgaagataaaaaccttgaaggtttcatgcctttattttagttttcttttttaaacatttcccttattttcattgagaaaaccgaagaagaaacctatatgtctctagtgagttatattgtgtttaaaaagttctcatcttgtattgctattcaataacaataatgtgttctaatacctttgataaaccaatttagtgaaaaataaaatttaaatgtaatataattttataatatttaaatcagtatatttattcaaaaagacaaaaataaattatttgaaaagtgaaaaaaaaaaaaaatacacacctagaaagagtaaagataaaatattgtaacgacagtattgagtacttgtttttgattgagttgcatgttttggttaggatgtgggtg

SEQ ID NO: 122295 - DNA, 1116 bp, Cannabis sativa
tcttaaaccaaacacaggattacttttagcataatccaatcttgtttagtccagtccaatccttttcagtccaatcctgtgtaccaaacgggcccaaagacttccataaatattaaaaattgacttccacaatccacaatccacgtacaatatttatttagtacaattaaatattgaatattgtatattttatttcaataattattataaaatattattggtgcctaataacaaatcctcattaacaaaatgatactatgttgtagtactttgtactaaacaatacaaccatgtcctctatggagttatcctaaaagtgataatagtcacatatcactgtaaaaaatctcaaaattgtcggctgtctaaaaccgtctcttatacaaacatcgcgaatattggatagaatgagcgacgattgaaaatagtcgatactataggccacagtttaaaaccatctgctatactatagccaacagttttaaaccatgacctatggtatagccgacagttttaaaaccatctgctatactatagtggatttttttttaaaaaaaaaatcatcatctccatcctctttgaaaccaaaatatgggttttgtttggcattaagagccccaaagagttgagatatgggccacagttttgccaagatcacaacctcaagatcttcgacgatctgtgaaatacaaaaatctcaaaaatacataaatctcaaaataaaaataataacaaagaagttacgagaaatagtggacgagagagaagactgtccggtgctcgtggccgcccgtctatcttcggacaagagagagagagagagacgagtgacggtggtgctcgtggtggagctcgtggccgcgaccaaccgtggtggagcttgaacagactttcatctatggtggagcttgtgtaagtgaaggcaggaaagagagaacgagagacgagagacaagtggtggagcttgaacagactttcatctatggtggagcttgtgtaagagaaggcaggaaagagagaacgagagacgagagacaagtggtggagctcgtggaccatcgtttatgagaaagagagaggatggcagggagcagaggtgagagagagagagagaga

SEQ ID NO: 122296 - DNA, 1640 bp, Cannabis sativa
ttaattacactaatagcggtatgccatcgaggagggtgctaggcaccaatggtgtcttttaacattttccttttaagaaaggtactaaaattattttttttagagttaaaaattaaaatttactagttacctaacgatgtatttttggaattttgaagaaatagtttttaaaaacctaacatacaaaatatttttttctttctttctcaaagacctaaacaaaattgcttgtttctcattttatttttctttattttctctattttgtttcttcttttcgctgcccagaaaccctcccaagaaaacccaccagccaacaaccgccacccccccaaaactaacaccatctccacccgaccctttttcttctctcttcctttcaacaaaaagaagaagaagaataaacaaaataaagaaaaaaaaataattttcaaaataacttttttgttttaaaaaatattatgatttaaactaataatttatcaacacgtgatattttttgtcgagaattgtctgcatcaaatttaaattttttaaaatttatgccacaatttttctttattattattattattattatgccacttttataaatttttagggagttatgtcgaatccaattgtagtaaacaaacaatgaaactttttccatattttgaataaatgttggtataaattctaaaataaatgctccaagataagtaatcgtgtcattattgatgaagtgattccatgctttgtgtttaggaatatttatctcaataactagcaaggattaattagtattataatgatttttaacctttatcataatttatcgagaaaaaaaaaaagaatcacacacaaaaaaaaactcataccaaacttatttgttcaattagaatttttgtgtttaaactttaatacgtactaaattatattttttaaacttttttagattattaaaaattattgagattgttacatttaaagatttttatttaattttactaacaaaagtctgacatatataaaagtttaggcgacatgatttggtacatgtcataattcgagggtatgatttggtacatgtcataattcgagggtatgatttggtaaatattaaagttcaagaggtacgctttagtatatggacaaacgtcacattagaaaaattgaataattcaacaatctcaataatttggcacctataaaagttctgacaacaaaaaacctaattagcaaaattattttggagtgacatacaatatcctatttttcttaagggtgcatttcgaaaaatcatattgtaactaaatgttgatctcgtttttaatcgacgacattgtgtctttaaaacgataagatcatgactaataataatgataatgagtaataaaaacacaagaatttatagagatttgaccccgtgatagtggtaacaacctactcctcaaactgttgtattactttagcaacgttattaagagcacaaggagctggccaattaagtttcttaataattttgagaaagagtgtacaaatattttgacaacaaagaaactctcacaaagatgaattttgggtctctaaactatgagacaacttcactatttattgagagatcacaaagtttgggacttgttcagatactacttgct

SEQ ID NO: 122297 - DNA, 1022 bp, Cannabis sativa
aattttatatgaaaacatgaagtatatataataatgtcgaattaatcgaacgtacacaccgtataactataggatctatatactttcagcgattaattttttgagatttaatctcaaactagctttgaatctgaaaaaaaaaaaatggaaacttattagtgtgggtaatgggcttccaatctctcaactctttttagataaatttactgtttcgtgagctcgggaccgaaaccctatatttatataagtgagacttttcatcaaaatttctgccataattaattgtcaaaatattttgacatgttaatttaagaaattaaatcgagaaatcataaatttgctaaattgtaatctcaccatatattgaatatcaactatttagttgtgtccacttggtcagcatttattttattcttaaaatagaaaatattctaatattctctcacttggtccgtatttaaatttatctcttaaacccaatgttcctcattacataataaatatatgaattatagcgataggtcatcattatacgtcaaatattatcttccatgtatttcgatatattcattatataacaatatacttaatgtgacaatgtacttaagcgaacacaccctaaattttatgcttattttggtcctcttacgatagttttcttagataaaattaagctacacgtgaatatgggaaaaatatcgaaattagaattttattgaataatttcgctgtacccttttcccaaattcagaccaatatttatcaatattacaagctcttgaaaattttttggtttcgtgaataagggttagggaggggtaggtggtgtttgacgagaagaaagagaaagagaaaaaaaacaaatagaaaaaaaaatatttttttattttataaattgtttttttttaatatttttaaattatttttaaatattttataatattatgtggaccactaaaaatttgctacgtgtacaagtgtgtacacgtgtacagtccactgtggcacttaactgtgatttt

SEQ ID NO: 122298 - DNA, 1688 bp, Cannabis sativa
ctgttattggtagtggttttcttgtaatattattccgcgatcaacgaatagtgttgctatacgtctaacaaccacggttactagtataaaaaagtgtgtttggacaaaggtttgtcctgaattataaattcttctataacaacaaattttttttaataaattttgttttttaaaaaaaaaaaagcaaaatatattaaaccttaaatatctcctctgaaccaagctagtactaatgccattttactaaacctcactttttttatgttacttcaaacttttacttttactataataacatttttctatatttttctctacatggttaaatattatatctctaaatattttatttataaaccaaaaaaataaacaaatatatattttaaatttttaaaatgtgtttagctcactttcatctaaatgtagctaataagaaaatgaagtaagctatatatttagatttaatgagttgggactgctggaatatatgcaataattcaaataactaataacgtacataaatttattaccttatgatctcggttaattctcttttgtggagtgactgaagctcgttaaattctaacttggctaagtcaagaagagcagggcaatggtttaattctttgccgtattcgtcgatgtagtttcgagcttctaatggtgccatccttaggtgtctagggagctccaaggctttggcaacttgattttgtagcttttgggttatgaaaggcattgaatttttcagatgcgatcttgtgaattccattgccttgaccaatgattcttcacaatttgctgcaaggtaggatgcctcatacaagcttagcatacccaatgtgtcttggcccattattacatcctctatttctcctttttggttgatgaatttgtcaaaaacatctgtacataataataatggtctaagaaaatgaatccagatcctctgtctaaattttctatctatttctctatctacacaattaaataaataaattcacagcataacttccgttacatcattgtacacatactcattaaatattaattttcattttttttaaaaaaaaatgtaatatattgggacgaacattgactccacactgcacatttatttttggtttttcatttttttttcttaaaactttttttttttattctgaacgtagtttttaatttttcttaaatgtgtgaatctttaaagacccactaaaattagactcccttatatatataagatagcatttaaagttaaattagaatatttttctataaaaattacactatatatttgagttttttgcaatcccattagaaatggcctaatgcttagtgggtcctgctgcatatgcatttaagaaaacaagaattgatttaataaggaatgtgtggagtgatataacggaagaagcttaataaattaacggtgtagttaatttattaattaacgtggcaatatttaattagatagacagaaaaattgataggaaatttggacaggatcctttcctggtcctaagaaaattgagttttctttgttttgaaaaggaaaatatttgttagaggtggacgttcccatttcagaaggtctaaacaaattaagctctaaattaagatatttttacacaaagtgcttcaaattacatttctttttattattttatatgggctcgtttggaacgccg

SEQ ID NO: 122299 - DNA, 1464 bp, Cannabis sativa
  modified_base (1309)..(1347): a, c, t, g, unknown or other
tttggtacatgtcaaaattcggggcggaaaaattgctaattagcctattattaattattaaaatattataaaaaaataatttaaaaatgataaaattaaagcaataataatttttttttattattttatgttttcttttcttcttatgtaataaccctaaaagtttcaggctttagcgcaaaagaactaaagattccatggttcaataataattaaacctcacaccaccataacaaaaattgaaaattttagcacaactaccacaactgataaaacatccattccttcctaaatcccctgaatttcaaagcctcaaagaatctattatccgtatttttggaaggaggacacatttcattcccaattcaagattaaccctctaaggattagtcaaaagccctactaagacaacgggcctactctgtatggaaggatgggcctcacacctatttgaggcccaagatatttacgtccgagattggatctctccagatctagaagggtgtcctacccgaataagaaggagcccagagaccctccaaatgatcatctgggatacatccgaacggacattccaagaggcgtcccgtaaacttaatataggatgatgtgtcgaccctctaatacaaaatcccattgaattaggggattgtctccagtgtcagaccctaagaatgtgcgcaccactaaaaggaaatctcccttttgttcgacgatcactattctgacactacaatacataaagacaccgcacgcattccatctgtcaatattgcatggtccctaagcgtacagatcaccttcgccccaagcctcagtgtgtgggctcaaagtcaatgtatcttatgtatttaccctattagtgggcaatgtttatatgcaaaccctaataggtcacatatatatctaaaactagatcatagcctttaaatactacattataccctcatgcaaagggttggaaattcattatataaacactatagcaagaagctacggttcttaatcttatcaagcactgtgtaatatacattaaggccatttagccaaatacgattgactcgtagattagggttcattaacacctaaactacttacaaatctccatctctactttctaccacttgatttattttctcaactcttattatatttagttttcaaaaatctttgtaaagaaaatcaaaccaaaaaaaaaaaaaattcaaaaaacacccaacacaaaataagcacaacccacctccaaaaactaccaaaaacctcgagaaaaaaccaacattttagagattaaatgtaacaccctaactannnnnnnnnnnnnnnnnnnnnnnnnnnnnnnnnnnnnnnctcgttgctaatcaacgagattagtaaaaatcgtgattaataaaaattttgctatttaattaaaacttataatattacatacaaaatatttcgggatcccgtttaaaaaatacttta

SEQ ID NO: 122300 - DNA, 1668 bp, Cannabis sativa
ttttttttttgcatttttacagaaattcacatagcaacatacataacaactaacggagcaatttaaatcgcaattaaaatttacatagcaactcacataaaattcactggagtaacccaaaatatgagtttaaaaaaaataatatatgaaataattctcttatttttaaaagatagggccctttatatatggacctaggacaagtctggtccacctgtgcaaactgcagaagctttgcttatactagagaaaattacattatataccactttactttatatattttaatttttatctttatttctatattttttttaaaatataccaacttttatagatgatgatgatgtccctattatacccttagattaatgcaaattatgtgttagacttaagtaaagggtgagggtgtattgggaaatctactcataaaagtgagtgtattttaatgaaatataatttgagagtatttttaattaatagatacaaaaaataggtatttctcaacttatctccttatactatataggtttcaatggttacattaaatatgttacattaatggttatatttattttagttgttaattattattaactgattgtgattaatttagaaattaaataaaaataatcaataaattacacggaatatgatactaacctaattttatttattttcttataaataaaaaatatttataaatatttataaatattaattgtgaaaaatatcttattaaatattttaattaaaaaattaatttattttaaatatataattaattataattattttaaatataaaaatagaatatttacttattaataacttgttatagtaactcatataattattaaatattcgctgatatatatatatacatttaaataaaaatagataatatgatattaaattgcacccgaatatatttcatcatatagttttaaactatttatgcccaccttggggaaaagggtgaaagaaaactattacactatggtggtgaagaaaagtggaagaaaataaaagaaagaaagagattttttttttttttgattaatgaaaccattgagcagaacaacaaacaggaggcctaacggccaaaagagcccaacctagctgggacagaaacaccacaaaacaaactacagggaatccaagaacactaacaaacaaagacaagtaaactgtagaaagcagagaaaaaaccagaagaaaaacagcactaaatctaagactgaaccagtagggaaactaaacagataaatgaccatctgcagcaatcatctgcaggaaatcatcaaaattggatacatccaaaacgccaaagatgttgtttcggtttgccaattaagccacggaatgggccacaccattacacgagcgaggggtccatataatctcatgaatgttgaattccgccgagagatctatgaactttttaaccttttcttgaatgttgaaatgcaatttttgtatatccgcagtgttgcttttcaacgcgctaactgcattcagcgagtcactctgaaaaatgacattcttgaagccaaattttgcagctgttgccgcaccttcaatgattgcagagatttcccctggcagcgggtcacagtgagtagatctaaatgtggtgacgcaaaggatagatccagtcgtatccct

SEQ ID NO: 122301 - DNA, 1041 bp, Cannabis sativa
  modified_base (478)..(482): a, c, t, g, unknown or other
tgcactttcttgggttactcatcctctcacaaaggatacttgtgtgaaaatttaaattatactcagaagacatttgcagccttaacaaactcgtctaatgataagatacactccaatgctccactggagctccctctactgttttgtctacatcccaatatactcatgtcaccactaacaaatgtgtacccgatcctatgatcaatgagcaaccaagatctcaacctattactaatacaaacacacaaaatcaccccaacactaatgtgcatccatcacacactatccaaacccacattcaaccatcaacaacagtaactaccatttttacaccttttaattcccacaatcaaactcaacctacctcgacacaaacatcaactgctcctactgctatcccaacaactgcataaaaagttgtataaagatgttcgaaaaaaatctattttgaattgacaaaatagtaattatttatttnnnnnataaataaataatttttttaaattaattaaataaggaaaagattaaaattatttagacaaaatttgtcgagacaagatttgtcaagacaaaaattatcaggacaaaagacagcaatcttgtcctaaagacagtggtaggtgcctagcattggttccgtccctattgaatttgtcttttttaagttaattaattatttaattaattcaattaggtaaatatctaatttgaaaattggttaaagatatttcaaggttattgaaatattctttcaaggagttgagaaattctctcataaatatcagtaatcgaattcggttataaatatttatttatttaaacaattaaataattatttaattaaagagatttaactactataaataagaacctaatttgagaaataagaacatcacttttacacagtaaattttgaaacatgtagagagaaaaaaattaagaactcaacaagaacaaagttacacacttcatcttaatagcccacactattccttatgtggttgatcgatttggaagacactatttgttggatattatttt

SEQ ID NO: 122302 - DNA, 827 bp, Cannabis sativa
tagtccttcagccatgctacataaagtcttatatcatgacctacaatggtgtatgcttggtgaacgccgggacatggaattattgcattctccacatcgactttattgataaaaattcaatgataatccttgtagaggtaatcggaattctagaccgagaacttgccagtcttcaaatattaccccttcaccattaaacccctagcaactttcaatgacaactcactggtctccagctgaatatacatccaacatggatatctctatagttcccaataataataataaaaaaaaaagaatcaatacaatttgtaaattgaaaatattgataatttagcattacaccaattcgtaaagtaatattgagattgccttttctgaactataatcagtatgtggttatggagctggtagagcggatactttctcaccatgtagtgtacttggttgtggtagagtagagacatgaacaactctttgttgttgtgctttagaagcagaggcaatgtcagcacagtctaattcgtttgattctcttccaacacctgaactagacgcatgtgatgtacccgtaacaccactatgttgggaatgaactatacgtaggagttcagccattttttcttaagctttctattactctcctcagtattacggagtcccttatccatatctaacaatgccttatttccctcattattctttctccttgtagggcatggattgtggaagatagaccgagtaggatgcctcgctggcacatcctgagtaagatattcagcgatccgtgcagagcactcaacacttagtgaattcagctttcacat

SEQ ID NO: 122303 - DNA, 909 bp, Cannabis sativa
attctatatttcagattacattgttatgaaaagaataaaaaagaattactaaagcattgaatttcatttaatttcaaacaaaatgtgaacttttttgaggctaccagcattttggaacgtgaaaacaaattgtataatattgcatttgtgattttaaatgataataaaataaatatatgtaccaggttgttgtactgacaatctaataccaaataaatttggttcaactactcacattatcatataaaaataagtgcaaattttattgtataactattttttatttattattttaaattttattatttttttaatttatatttagttttataaattatattcctacgatgtgtttaggaactttaataagttgtatatatttagtatttaattatggtagaaaatatttattaattaaaattattttaaagttatatttaattaatatataataataaaaaaataattttcaatctatccctaaaaataatagtaactcaaataaacaaattaccccaatatatagagagatttggaaataaaagtgtgaaataataaagctctttataggtgtccattaattacattaataacgaataatgcttgatattcaagcaacaaaatttgggtaacggctcgcgtaaaaaaatattgggtgacgataaaaataaacaactaaaattagaaataaaataatctcaaaacaaaaacaactataataaaaataaaaaatgcacaatttttataaaaatggaaaatatataagaaaaatataaaaagtaaattggcatgtcatatatcaactttccttttttcatattttgttgtaaatagccctatatataactactagtaaaaagttacgtgcacatatattaaattttatgttaggtattttttattttattt

SEQ ID NO: 122304 - DNA, 671 bp, Cannabis sativa
agagagagagagagagttaatgttaattcaaagataaaatcaaagaaaagaaaacaaagatatgtggtttgaaatctaaaagaaaatatgtaatacatgttgttctgatagtggaaactaaagtttactctaaggtgagcttgacggagacgtagcccatctttaagatgaactccgagattagcttttgtgttaatttttacttgatctgtctgcatctcctaaccctaatctcttttactttctttgattgtgattgtgtgtgttttgtgattttgttgtttgaaattctagggttctctttagttttttgagtgtgcatgcaaaaagagaatgaaatcctcttgaatatattgagtaggtttggtttgctagggtttgattactgatgctactaattggattggtccgagtctttgttggactacatttgtaataattatcaaactaaattgtggacgcatgattaatttttaatataacctattttgagcctttgtgtaaagtgtatatcttgagttaggaagctgcagatttctaaaaaattagattagaagaaaaatatcacactacaaacaattttacttttagtcacaacaaaaattgtgactaaatataaattatcattcttatgttgtgactaaaatatccgtgactaaaggtattagtca

SEQ ID NO: 122305 - DNA, 1162 bp, Cannabis sativa
aatgattgtaaggaaaaatcctatatttattcttacatttattaagttgatgaattgaaccaacgtgttgaaattcaactattttcactgtaagtctagaactaggtacttagctagatatatacaattactattacttccttctctaaagacaaaatgtccgcaaaaaaaaaaaaaaaagaaaagaaaagaaaatcaagcttctatcttctttccttttcaaccatagaacatgcctgcaacatttatatgtataactggcacgttttgctcgctaattactatacataccaacattgggtaccatatatttcacatatatatatatatatagatcagcattctgtagtgcaacttcaataatattaatccatttcaagctattccttatatataatatagtacattgccgaagaaaaaatggcaagaaagcataataatattagtgaagatgaggagatgagaaagtactactgtaaaagagctccaaagggacactttgtggtttatgttgggaaagaaatgaagagatttgtgatcccaatttcatacttgaagaactctatctttcagacacttttggacaaggctgcagaagagtacggctttgacactaacaacgccattgtcttgccctgtgatgaatccactttctatgaggtcactgccttgtcctcatcaaacaactagctacccacctatcaattttgattagagtactatagtactagtaattattattacagatattgatatttatatatatatatacctatagtacttatgtatttgataattattatgtcaaataatctagagcttagtctatttattacttacgacgtataatataataacagatcgaagaaaaattccttcgatcgctcgatcactaggggcctcattattattattattattatgtatatgatcacctactgctaataaataaaaaattttgttacatttactttgctttgccaattttcaacaaaattatgtatagtttcaccatcttgggcagtgtcttcaaaactatagattttctattctgttttcaatttattaaaagaagatttagatataaatgtactacatatatgtttaccaattttaaaaagaaaggaatgactattccaatgtaacaagaaaaaaaatttaa

SEQ ID NO: 122306 - DNA, 1296 bp, Cannabis sativa
gggcataaaacccaacagttatcatatgtgcaacttgagggggaagacattcacagtagtgaggccccgcaaacattttttttggtggtttgtggtcttcagcttcaacaatgtaggacaaatacaggtacccaatactttcacttttatttctcttctcttcaacttcgaccggtgggtgaaaatggggtctgaggattttccctcctttgcaaacccagatcttcgtgactgagaaaatatagatttgggtttggaagttttaaatttaagtctgtgtttttttttcttttaattttttgtcttttacttttcctaattaggcattattaaaaaaaattcattaacctttatttttaatttccacgtcataataattaatgacatggcaagcaattgcttacttggattgagccacgtaggcaaataacggggtcagggggacaaatgtgtgtttttgctaacagtatagtggtttgggggttatcccgcacaaagttgggttttgaggcttaagtgaaaccaaaacaaaatttttgggggttttgccgccatttacccattctttaaaggtgttaaaaatataatattttattttatatttttttcatatcaatattagcgctcttatttctaaaaacactcaaatagtataacacttaaaaatactataattataatctcacacattattatatataaatctttttctttatactatattatatattacttacttaattttttattttaaaaaaaatatagcatcaaagttattgtgtgataccaatataaatttcaagaataacattcttttatttccaatgatataacatctctatattttcttacctaaactttttacctcattaactctccaaaatactaccactagagatgctctaagttcttttgagtctgatccctactaagcataaatattcataagatatttcaaggggctgatttggtcttacatttaagactccctattcagatttgaactaatgacttttatttcatttaaaaaattacttaagagtaagcactttgccactaagccactcactcactggactttcactctaaaacaaaaagttgaaatcgacaaacatatcaaaagtagtgctccttcttgcgttaacttttttttccctaaaatgactaatgaattcacaaggttgacattaacaatgggaaatttgacattttatgctaaaaaaacacacatggtgttattttatgccaccctcacaaaagttttttaactatgctaatcttttaatcttaacccca

SEQ ID NO: 122307 - DNA, 978 bp, Cannabis sativa
  modified_base (684)..(684): a, c, t, g, unknown or other
atattcacctaatccctaagatacttacgacataggtcatgtatttcctattttgtatctgctaggaatttgtgtccctaaggggctaacacttaaatacaggtgatccctttctaaggattcccccgaaaaatactataaatactccaaacatagaacgtaaaaggggtcgatcggtcaattaaggaatcgaagggagtaaagaagagagagagagagagattcaccaagaacattctctatataaacactctcataaataacaaagactcgtggactacggctcattaatgcccgaaccacgtaaaaatcacatgcattaaagcttccataactcttctcattctttcatttaattggttgtcaaaaacctcggtcaacaatatatatatatatatttacctgaattttttgtcgtcggtattaacagagatgattagagaccttttcttcaattgctgattggaatctttttatggaggttgatcggttcttcaggtgtatgattatgatcgtattgctgtcggaagtggaggtttgttcttgccggtgctgaagttgtggtattgctcatgtcgttgccgaagttgatggattttatcttgatggagtttacagagctttgaaggtggaatcatttgatgtatcggagaaaagagagaaagaatagagagagagagaganagagagagagagagagaatcgtataatttttggagagaatgagaaaaatcaggattcttaaattctgattgtgttttttaatattttatatggctttttcttatgaactcatatttttaatttaattggttagaaaatgtcatatttagtgacattaactttctatgtcatatttatctaaactctaattatttttcctatattattgtaaatatctctaaaaaaaaagttagagaaaaaaattaaaaacaagagagagaattgaaaaaaaaaattaagagagagagagagaga

SEQ ID NO: 122308 - DNA, 2972 bp, Cannabis sativa
gcgtatacaatttttcacaacaagtttttggcgctgctgcctgggattgatttagtgaaattttgtttgtgaaacttaattactatcaatttggttttttgttgtttttatttgtttagttttattttttttttgttctattttacgctttgtttgtcttgttttggattcttttgcaaggtacttgagatgtttaatcgacaagtccttatgaattttgttcaacacaacttggagcccttgtatgaagcatggtagagatacaagacatttctaatgagattttcatatcatgggctgtccaaatagtgtgaattagaaatcttcctaaatgggttgtgttcacctcgattttagccaacgacaatgagtctaatttgtaagcgacaagtagtttaatacgagtgtaatataataaagcgaataaagacaaaagaattttatagaggttcaaccccgagcagtttggtaatagcctaatcctcgtagcttgtattgacttaagaacaaggagaatggttccttttcttagagctcttacaatagtatctctgaatatgaattcttagaaaaatgttttgaccctttgcccagtgaatatgaatcactagttatagggctttaaacttgggaagaaagtatttcccttctggttacaattgatataagtagaaagattacatagtaaatacagaatacactaatcgtgggattcagacagcttgccatatttctgtgatctgatcccaaagttatagggatttctttggtgactcacgatgcgaaaactaaatcaattaagtgttggcatgttgcgcggcttgcccactgctcagctaagaggacctcgtgtgagcgaatgtaggttgtgtcatgttcggcatatttcttgcgagcaggtacatagagttaattccacgtgtcaccatcgcgtgatgccaagtcagagtgcgaaaattgggataaaatttgtccccaaattgtgtacgggacttccgaagtggcgtgtagacttcatccgagctgtctttgcatttggatgggtgacacgtgtcaggtgtgtctgtttgcgattcgatgtgaggctgactaggcgcctctttcgtttttggctaataaatgctctgacgcaattaatgcttcaaaatctaattttctctcaccacgtttgacggttacacttgattatgtttgatttccaatatttgtttttggggggaaccgaggtgtctgaggtttttgaaattattaccccttttcgttgttcaacctataaatatgactgagcattgttcacaacttcattttcaccaacttctctgttaagcaagttcagagcaaaaaagagaaatttttcatctcaagtttgccgtgagattttaacaagaaccatccaagcagcttcgcttagagtgaatccagacgtcgatctgtttgtaagctctcgattcctcctccttttactttgcatgtttagtttttgaatacgatcttaaccttgccgtagaagataggtagaaaaccctaggtttagaaactttacgatttgtctttacaatggtcagtgcgatttaacggttcatgatgcttgctttttgattgcacaatgtctgtctttcaccttgcttattcaaagcttcgtgaagttttgcactaactccaaatatttcaaacctttgggttttggcttattttcgaatatttcaattctttaatctttgagtactcctggtcggcatatttgcttgtttattgtttgatatcccaaccgaacactcatctcgtgtgttgtcttttgtagatgaacctggtgagttttggggaagcgaacactgaatcaaccaggatttgcttcaactattattcgaggataatcctcatctctgttctagtctgccctcttcaagcgacggacattccatctcaatctttccgtccagccataggatgatggcgcgaacaaaatagacaatgcatatgggcaatgcatctgaccctcatgtggcccaacacaccactttacccagcgccgaacaggatccgctcatctaggaggaaggaaatcatgaaggggacgccgaagctcaggagatagaggaacagggcgatgtctgtcctggcagtccttccaaggtggaggaagaggaggaggctgcacctccaaactttggaggatacaacaaagctagggagccagtagacgcggacggcgatgtcctggtctaaggagttgattacattaccgagaagcttactactgcagtttcttagaggaggaaaggtgctttgggtgccaggtgggtgagccctccgtccaaggtcactgaggcacgtctaagggatctggaccagtcccacttgggtgagctggaatgttatgttcctgcctcaaacaaccgagccacaaacccgaagaatgggatgtgtgtctggtcgggtgctcattccaaacaaggggcattactacttttacacccgtactttaggaaggtggcagacttcttccgtctctctctgacccaatttactcccaagggcatcaaatatctatttccttattcgtcctctacgccacccagaagtggggtatgccatcctcgcacgaggttagctggttttttgacttgaagtctactccgaaacaaggcaagtcgggatacttctatttttcttagccagacttcaaatggttgataggcaccagggataaggccgtgagcaaaatcaggaattttcttgacgagtattacatgtgcatggcatgggcaccacctatactcggttcgagtaaatccttatatattgccacccacccttcacgctagctcttagggatagagctcaaagaatcactcagctgcgggatgatgcccagaaaatctgatgagaacactaaggctaaagatacaagtaaagttccagttggcccggtgacgagggtgcgagccaagaaattcaaagaagaactcaac

SEQ ID NO: 122309 - DNA, 611 bp, Cannabis sativa
agcaaaaatccttattagccttaaaattaatcaggcgaagggttaagtaatatatagtaggagttaatgaattaaagtgtgttcattaaaattaaaaaatcaaccgtatcagagaattcaaatacttcgacaaaaattgtctcaaatatattcattgtgtaattagtgtatggatcaaaccattcgcaacacaccaaatgatgcaataataactaccaccaacatcacttaacaaataaatatatcatatattcatattttttagaggaaatttatttcatgtaatcatcatactacattattattaataataatattagtggaatttcaaaaatttggtaaatttttaatttttttttatagtaaaattacatttttatgtgataagaatttgagattctttttttattattattaattttgacaaataaaataaaaatatataagaaaaaaatgatgcattattagttaaaaaaataaattttggaaaaaaaattataaatttagatataaaataatttgaaaaaaaattgggtcggatctgatccgatccgagtatctgatctagcggagcggggcgtgtcagatccttacatgatctgaatcaggtc

SEQ ID NO: 122310 - DNA, 1050 bp, Cannabis sativa
  modified_base (980)..(992): a, c, t, g, unknown or other
aatttctcataaaccaagaattgtgttgtatagccacattttatatagaatagacatgtaattattcttgtatagatttacactttcatataagatttaaactatataataaattataatttaaaaattattcttatttataaccgttttaaattaaaacttaaatttttatgataaactaaaaattattcttggataaagtattcttaagtaaatattttactgtaatagcaaaaacaaaaatgaataaagccactgaagctagctcagtggtaaggtagaagtgggaaaaagagaaaaaacatgggttcaaacccaatatccctaagttattataaataaataatatcattacgttatactaaaaaattataaaaataaaatgaatatttattaaattcttaaaaactaaactattgttaagagtataatatgttacaatattagtaagcaagaaagcaaaccagagtaaatacagagattgaaaattatattgattgattccaataaaataatggtacaagagctatatagagtgttaggtacatgaggttagttacaactaactaaccgacttaagttgaactaacataatagaaacctaaactaagagtaactctaataggccccttcaaggtggtgtgtaaaaatctttgacactcatcttggatataatgctgtggaattaagtggggaaaagttgcttagttaagacatctgctaagttgtaacaccctaactagcataggcatgttgacgtgattttaaacgtactgtgcagctcgttgctaatcaactaggttaatgaaaatcgtgattaattaaaattttgctatttaattaaaacttatatattacatacaaaatatttcgggatcccgattacaaaatgctttacaaaattttagtagtcatttacaaaaatatttgtcacccagcaactaactacaaaagtacagttgtcccgaggatcgtacgcnnnnnnnnnnnnngccccgacatgtacaaccttcatttgctcgtccccacggttcctcagctttggccttg

SEQ ID NO: 122311 - DNA, 625 bp, Cannabis sativa
  modified_base (583)..(584): a, c, t, g, unknown or other
tggtaataaataaaagatttggacatccacataattattaatatttataacatatatatttttaatcataataaaacttttgtgactgaaaaaatattatttcaccatttacttagaaaaaatcatgtctaaaattgtatcattaaatttatgttatcattaataatcacaaaaattataatttattgtcacaaatgactaaaactaaataaataaggatttgtatttaaaaaatagttaattagtttataaatgagtgacaagtaagttttttattataactaaaaataatatttagttacaaaaaattaatgttaagattaaattaataataataataataatttatttttgtagtatatgttattactaaattattcatgacataaattattagtcataaaagctaaatttactataactaaatgtgtatggtcacaattagagacaaactttatcactaaaattaagattatgtgactgaaattaagcaacttgttaaacatgactttttagtcgacactacaaaaaattgttactttttcagacaatttatttgtcacaatataaattttttgtgacnnaatgtgacttttagtcataataaaaagttacttgtgactaa

SEQ ID NO: 122312 - DNA, 966 bp, Cannabis sativa
atcaacatacttgcgagtagatctaagatcctggtaaaataatttccaacaatgtgctcattaaacacacattcttggcaatgtaaattctcctttgatcattctcacacaggtatcctttgtgaaatggagagtatctaaaaaacatacacagttgtgatctgaagtgcattttatgagaattatagggcctctagtgttgaaaacatacacaaccaaatggttttaatattgagtaatcatgttgtgtaccaaataaacactcaaaatgattcatgttgttcaagaaaagtgtaggcagcttatttatggtgaaggtatcacactgtaaagcatgccaccagtacttgagatccaaccctgcttgagccaaaagttttagaccattctcagttatgtgtctatgtttcttttcagaccttttatttttctcatgtgtatgaggacatggatgagaaaataaaattccttgatcaattaagaacctataaaatggtttgtactctctttcaccattatcttgtacacttttaataggaaaactaaacggtttcgcaaccatgctcttaaaatgaataaacatatcaagactttagttataaagggtaaatccatgtaaacctactataatcatccatgaacaaaatgtagtactttagccattgcacatgtaaaggaccccatagaacaatatgaatgagttcaaggggttggtgggatctataagtaaatacagaaaagggtaacatatgactcttaccatgttgacaagcaatgtaaaatgatagtgtttttaaagaacctaagtgtggtaaggtgggaagtaatagattaagcaggatggtctaatttgcaatgccaattaactgctagacatttatttgtatagacaaaaacatacatgattatgaataaagtgcggaattaataaatcatatatgcactataatttaaggatcgaaatac

SEQ ID NO: 122313 - DNA, 1087 bp, Cannabis sativa
tgtatcatttgtagtaatcaccaaatcatgtctaatttttacattcaggcctgccatatatttttctttctcgctgaagtctgtaggcacaatacccgaggctagcttggccagacggtcaaactttgttgtgtactcagttactgacataccctcagtctgcactaactcagtgaattcttttcgcttagcactgcggactgcttcattgtaatatttggcattaaacaattcttgaaattcctcccaggtcataacagtgacgtctcgggtgagggacaccaattcccaccacacgagagcgtcttcttagaactgaaaagtggtgtaggtcacccaatcatttccatccacccccataaatttcaaaattctctctattattgtgagccactacttagccttcatcacatcaggacctcccataaacactagaggtgcttgcttacgaaacctctagtataacgactccatacggtttctagtaacaggttggtttgctggcaccgcaggaactacaacggcctgagcttgtggtggaggcacaacaggaagatcctactgcctgagtctcagaatttcttcatcttactggcggatacgatcttgcatttctgcaaacctatgctcccaatctggaggagcttatggtggattcacaagatgaccaccctatactgtgacacggcctcggccacgaccacggcgattctggggaatttggtttccctaaccgcctcccatctcaaccctattacactgacttcttgtattttgctgggcatccatttaataggacttagcctacgaacccataagctaggtaggtcaaacagcgatcataaagacttactaccgctctttatagattttaaggcaatgcatttaaaatagataactataacctaatatgcttcctaacatactttaataatcacatataatactaaataagtacgggcttactaaactatgagccaagctttctccgatgaagattgtacatgtcttggcgagcttcggtagacaaacttggcggcccgaataccaaaaattgtaacgccctaatgctaaggcacgctacagt

SEQ ID NO: 122314 - DNA, 1621 bp, Cannabis sativa
taaaaaagaggatttgttttctttccttttcttcattttctaaaataggtagttctctaaacgttctgatgtttcgaagcaacttgttgtgttattattgacataaaaaacaatgtaattttgaatatcaaaaagtttgtgtcaagtacaaacatgtttgcccatgtagcttcgagttctctcttgtttcatcaataagaacaccagataaattttgagtaaagaaaccacttatttcttgtgcttgaaagtttactgtggccaaaatttaaagcacatggaattcggtgtttagttagaaaagatggagaaaaccatactgatctttcgtaagcatgaacatgtccagcaaagatgacatcaactttgtattcaacaaaccaactctcgaacacacttctcatgctttcaccttccataaagtgtgcactgttgctgttatagattggaacgtgcatcagaacaataagccacggtgtcttttccctgtcaacccttttaagttcttctctcagccacgtccattgaggtgtgtacttcactgttaatatgagaggagaaaaacatttgatctgagtgtttgaccaattaggaatcagaatgaaaagcgatcaggtaggaaaaggaacagggagttgcataccaaatggagaataactggagaggacaattatatgagcagatgcgcgtctgattgcataccagagggggctgctacttttgcacgccttataaggagtagtgtatcgttcgagatagtttttgaaaggagtaacttcttcctacaaatatttatacacacatacttgttaagcacttgaatatatataaagaaaaagtcatttaagaatcttgtagtttgtctgtttgctaatcaactgtcatagaaaggaaaggcttaaattttttatagcataggaaaggcttacattggttaatagaattcagaacaagaattgtttaaggtacacctaatttttataagattctctttccacttttttaatgcaaaagcaaaggtagatcagcagatttgaaagcgcggtataaaacataagtgcatatgaaattacagcaacaaattctttttgactgaccttaatgccattcttaggaaatgagactaagaaaacattgagcactaagcacggtataataaggagttttacttgaaatatctcttcttaagaccttaccaaatgaggaaagtagtcgatttcatgatttccagcattccaaatccacggttgatatgcagtgcttcgttcaacaaaccgaccccatgtatcccaacgtaagccaatatcattatagtcatatctatcagcatatgaaagatccccgagaaataagactgccttggctccactctgaatgtaatgctccagagtggaaagggaattatatgtttgccccaaatcacctgcaaatctaaatatcatcaagttttgaacgcattatgcagaatcctatcatatctgtacttttaagaatgtacttgtattagctaagagaatggacgacttaaaacaaaaagtactaaaggacatagcgagcagaagccaacttaattttatataaatatatacatatatataaagccagttccagcaaaaaacaa

SEQ ID NO: 122315 - DNA, 1342 bp, Cannabis sativa
atgtaataagttttcaaaatgtacgagtttttaaaatattttttttttgtacattttttgtaattatattatttttgttgtatatttatgaaaaaagccctttgtattaagggtgttgtttataaacaacattttattggacaacagtgttatgcatttttagatatgtcgctttacgattagttagcaatactttctaaaagttattatattaaattatataagactcgatacttatttaaaccaataacaaaattgacacatagaagggtgttaaacactattgccttttaacatttctctgtttataaaatatgtaattcatggttttaaatttcaattaattcacactaaaccatttgagatcaaattaaatgaatctagtgttaataatttagttaatttggattgtttataattctcaagttcggtcacatttttaaaatttatgcccgtaattcaaactaaaccaaattgtttaatgtttttaatatatatttaatataattttttgttaaatattaatatttaaaaacaatcttagacataatattaaccgttacttcaatattattatatctattttcattattatttgcatattataagctttatagtaaaagaatttagtaaaaaaaattaaaacatgtatgaattacaaatttacaaaccacgtcaaaccaaatcaactatattttaagtggattggtttgagtatttaattggtctgattcgattttaaatttaaaaaaaccaatattactaatttaatttgaaaaaaaaaatgaaaatctaaatccctagaacactaaatgctagcttcttctaaaagactttttaatttttatccaaatacatttggaacttagaaagattttttaattctaaaagctaaacaaaacttatataaactaagagcactcacaacaacttttttactctaatttttaaaatacaataccaaactctactttttttattttacaatacacacttacattagaccatacattaactttttaaaaatacatcatcaaaactcttttttttaaaaaaattattatattttaaatatataatattaatgtatacacatattcccgtacaaaaataattattaaaactcaaaataattaataaatatgtttaaaacaataataatattttataaatatagagcatgaataatattttaaaaaaactttaaaatgaagaataaatttaaaatatctgttgtaaaacttctctattataaaaaggaataattacataagacaccattttttttataaaatatttacatttttacgtttaaagaatatatttttttttttatatattt

SEQ ID NO: 122316 - DNA, 697 bp, Cannabis sativa
tcgccacgtcgaggtcggccagtgatgcgctgctgcccacctttgccaggccaatgctggtctggtcctttactgcgcccaaagctcgtctcatcttgcttggagccataatattaatgtatggcctaaattgtaattagtgttaaggactatataagaaaaggtagaaagcagaatagtttggggaagaataggaagaagagagaagaaagattatgactttgatgggattttaatcattatttttagtagtaatctctcttctcctcaatgaagtcctttctttgtttatttctttcattttctatgtttttctaattctcttctcacaaaagctctttctgttcttttttttaattttcttaaccaatgaatattaggccattctcttcggccatgcattatgcgacattgtagcatagaaatatggaagctcaatgggagatagtcagccacgtggacattcataagtaatcattggataataaatacctacgagggttttcatttttgggacttcattagaccatgagtttagacgtaatatggctaggacacactgctagaatcatgggactccatatgaaattttaaatataaaaaatcaaggcgaattaattagtaatttttccctttaaactttgacattgacatgtattaaatcgtacccttgaacttcttttaccgttaaaaattc

SEQ ID NO: 122317 - DNA, 668 bp, Cannabis sativa
ttatttttaattttatattcattgtaattcgtgcattgatttaattgatttttttattattttttaaataataaataaaaaaaaagagctctcatctcacggtcacggggctaaactctgttgactgatatagtaattagttgaacgaatctctctttttctctaatctgatcttttttctgtcgtacacgtgtacggttctgatctaaccgcacggggtttaatcataacagtttcatttcgtcatgggctgggctgggcctcgtgtgcggtgacggaggtttcggtcacccgcgtgtgagtttaaataacggcgttaagttacggcgttaaggcttattgcatgcccatgctgttttgtaattacgaggaagctctacgacaaacattgggaagaagaaagttaggcttttaaattactaaattacccctgtgctttgttacaatataaatttttatgaactcataatttttatttatttatttttttcaaaaaaaaaaaacgtttgagctaccaaggttgtctcaaactacaaaagtgtaataaaaataaaaattattaattatttttaatatatattttaagaagtttaatattatctaaaatactataccttataccttatcatcattatgtattattaaggtgaaaataggtatataaatta

SEQ ID NO: 122318 - DNA, 2863 bp, Cannabis sativa
aactaattgtaaatagttactattatataaattgtaatcaacgaactagttttttacaactagtaactaattatttgtgttatgtgtaacactaatcttttaatatttatgcatttttagtaaaatttatcctaattctatcaaaatgttgacagcataacggctgtaatcggatgtttcaaaaaattttaaacaagccaaaaataggaaaaaaacaaacaaaataatacaaaacaaataaaataacattaataatacaaaaattatctacttccgactgtagtacatgtattcacagaacctactttattacggttgaatatttaagatattcaaactcaactaacatgcatattattccacccattcgaccgtagtataatatatcgcagaacttattttactacggatgaatatttaatatattcaaactctactaagcattaataattaattaataacaaaagttagtgaatgtataaacctgtagctaactataaaaattgattaacacctaattatttgaaaccttaaaaatcagctagctcacaacctacgatataatgaaatacaaattttaattatttaactacttacttactagttatatgatttttttttttcgaaagaacaataagttcattactaagcacgaaaaaagggagtcatagggggaactccctccccttgaaatgttcctgctacgtgcaagattgttcaacctaatatctttagccaggctatccgctacaccattagaaaaacgcttaatgaaaccgaaagtacataaattaaaacaattaactaaatcaagtaccgcataagaaagactaaaagatctctaatcagggggacaatgatccctacgcagagcatgaatcctagagaatcagacaaaacaccaataatcttctgatcttcctccaaagcccaagacagagccatgtgaattgcttgaatttcagcttccaatgctgaagtagcactcgaaagttgaattctataaaaccaagaatcagaactcttgttgaaccttactacagccaaacctgctacaccgttttcccacgatgcatcagtgaaataaatcacctccaaatcaggatttatagtagtaaaatcgacaaaatcttgagagggaatgtcttctacaaaagtgagtaactagttagtaatgaataactaattagtaataaaaatatatgaatatgaatgaaaaaaaaaagtaactagttagtatagttagtaaaaatataaaaacacataaataggaatgaaattaaaaataaatttaataagtaaataaaaaaaataaaagagctattttttcttatttatttttgaaaaagtttatatgcatatacatatagtcatatataataaattatatctcacactaacaaaattttgaaaacttaatttctaaactaattaaaactttcctatttcattctccttcacaatatttaataaaataattagtttaaaatactcaatatatacatatacaatacttagaatatatacaatacaattataatattttttttgtaaatacaatacatccagaaaatctatatacacacaatacatatttttttttttgaataacacacaatacatatttaataaaacacaaaatacacaaatatatattattaaggtttaaatttttaccgtagtactgtaatccggtgactaataccgataaaaatccagccaccatgcacaaccacaacaatacaatcttaataatatagaaaaatcttcaaaagaatttgcaaaataaaaaataaagcaatgtacattactaagataaatagaaatcatatttataccttaatggacgttgagatttaatattttctccactaaaactggtggccgaagttataaccaccacaattacttcttggcttcagtttacacttaaaaaagggtaaaaatctaaacttttcaagtgtataagtctaaacttggcaagggtttcgtggtgctgttctctctgctaattttggtttcaagacgaagtcgaaagggttattatataaccctatcccgtcagttagttaaaaatagctgacggtataagctacacatgttaaaaataaatgacacctatgtcgtcgattattttcaaataaccgatgccatggggcgtgtttttactaggggtgttcgcggtgcggatggtgcggtttttgaccactttttcaaaccaaactgcacatgcagtttttctaatttcccaaactgcacccgcaccgcgaaactaaaagccgcagaaatcgcaccgtaaaaaatggtatggtgctgtgtggtttttgcagtttttacggtttggaatattaccaataattaaactatcacaaatacaacaaagcttgagtaacacttattaaaaataccatagggcttgaaaataaatatgaaaaaaaaaaaaaagtttcaataacacaataattagtcggctttgggttggacattcacatattgtatctaaataaatataaaaattagtatttttataatgtgtggtgcggtgcggtttgaaccgtatattaacaatttaaaaccgcaccgtaccgcgcagtttaggaaaaatttaaaccgcgactgtaccacaaaaaatttcaaatcgcattttttttgcagtgcggacgatttgagcggtttgatgaacacccctatttttttacagtttattaattctaattaaaaatcgaaggcaaaaggttttaataaatgttataactacgtacagtttttataaaataaccatctctaaatgtcaatttttaaaagggaaaaaaacaaaaaaatacaaaaaaggaaaaaaaaattacaaaaatactttgggccg

SEQ ID NO: 122319 - DNA, 719 bp, Cannabis sativa
tttaaataatcttaagaggagtttggtaacacttttgctttttaattttttgatcacaaaaatgaaagtaaaatttgtgtttttataaccacttttatttttttaatttgaaaaatatataacaaaagtgtgttctataatttttatttttatatatttgattttattcgggcctagtgctagggccgtggtccggatccgagactggggttgaggccgtagtctgggtcccatggtcaagattggggtcgaaatccaaaatattgatttaaaaaattgtttaaaaaattttaaaagtaaatttttgtttttaaattttttaataatttttaattaaaaaataatgaaaacagttttatagaacatatttttaagaaatattttcatttttttaattaaaaaaataaaaaattaattaataaacggttagcaaacgcacccttacttaatcatttaactaagatatttgtaagaaaaagcactattaatcctttaaaacacagtttatttatagaaataaataaactcatacagttttatatgatgtgaagattaggtctaatttcaatggagctttatacgggtcatgttttgttttggtgagcaatatacacctctaacaacatgttccttttacatgtgggactaatattttttttttttttgaaaaaacttgtgctttattacaaaacaagagaacagtacaagcaaataaagct

SEQ ID NO: 122320 - DNA, 1121 bp, Cannabis sativa
aaaaaaaaaaaaaaaaacagttcttacaaaaacacactatcttttttattatttttatatttttgctggtagatttacttaaaaagtaatgagaatgcatagtatcatattgattctcctataattggttactaaattttagaaagagcatacaaattttagagaaaacaaaaaaaagttctcctctatctttatagggaatactttctttttcataacttaatttattttaattttaattttattaattaaaaataaaaaagataaatatgctctttaataatctataatcaaaaaataattacatgttaatgtcaattctgattacttttctagttatgtaaacaaaataatataattccgattttcttttcggagaagaaaaccagaaaataattacagtataataaaaaattgtttctgattattttgtattttaaaccgattcatttctctcattgattattctgattccaattacagtttactataaacaaaaattaattacatattctaataatgataattttgtcaaactaaagcatttcgattacattttctagttatgtaaacaaaataatatgattctggttttctttccaaagagtttagtaaacaatataataaaatattgtttctaattatttctattttaaaccgatttatttttcacattaatggttctgattccaattacagtttcattaacacctcataaacttaaaaaaaaaaatactattaaaattttcataattacaaaaatattgtatttcattaaaataaaaaaaaatagtcataaaacacataaataacatgaaaacaactataaaacaacaaacgacaactacaaagcaatagaaaaataacaagacattgacatcgttacaacattcaaatcaatatcagctcctcataatgtatttgtgttacggaaatattttttttccacttaattttgataacttgatttatcttaaatttatattgctacattttttttttcataaagtttattgttacaactgttagaatttattggggtcacaattgtatatataaaatgtgtgttgggtcatcaaataaataagtcaaatttatgtggtctattttggaataaagtt

SEQ ID NO: 122321 - DNA, 1719 bp, Cannabis sativa
attgaactatatagtaatataatttctcaattattcataattatttaattagggttttgctaatccttttcttaattccagggtattacacattattatcattgggaggtcccgacaatgtggcagagaaggaacatatgcttgatctgacgataaactaagtgttaggttccctaactaagcttggttgagtataggggtcgaaaaatattattgctcctgcgatgaactcccaaatatcccaaaatcaacaaaatttgagccgagcagaggagactccgatgggattctatataagaagtcatttcttgttgcagaccagactggtgttgctgctatagagaaggctggtgttgttgctgcgaagaaggctggaattgttgatgcggagaaggctagaattgttgctgcgaagaaggttggtgttgatgttgtggaggagcgacataactctaagaagacgaactaccaggagattacggctgaccatacatttgaataaaattttcaaaccgtgagttatataaattggcactttgttcaagagtcaaactactccctattgtgtcacatatagttgtaaacatatctaccacagtattaaacatttcattaggggcggaggaggcgcaattaactaactttgactgtatgattttattcctttgcctttgaccctataatccacgcatctttgatagtcaaatcttttgccaagaacttttctaagtacgtcgaattaataactagtatcaaattcagtaccagatgtatcgctctgtgattgtctttcaagtcgtttcttattaagctccttacccagttcatccaatttaaataaatattattataatatataattaatataatgtttaaattttaataatacaatattttacatacttacaaaattttctacagcgactttgttgacaaataaaatttaatatttttctttataaaatattatatactaaattatactattttttttttactattttcattgtactaaatattttaaaattttattataaaaaaaattataatattacttaaattttaacaacataacatttgatttttaacataacaaaaaaaaaatatataaatcaaatccaataatattcacatattctattttacttaacaaataataataaaaaacatacatttcatagtaaacaccttttccaaactgctaaaaatctaacttaaattcttttacccaacttaaaaaataacagaaactaatgtaaaaataatatatatacacatatgaaaaaaaaatctatatatacatacagaaataaaattaaaaatataaaaaataataaaataataaacaataaatctatatatatagtcacaaaccacttgtctatacataaaaactaatttagatatacatatgtatatatataaatcgaaattaatatatatacacagatacaaaaaactaaatatatatatatacaaaaattaagttatatgtatacatatatacacacctatatatatataggttaaaattcttaaaaacaatatttacatttccctaaaattaaatataaaatacaatacagaaaacaaagaaataaaaataaaaaagggttttttcattagtgtacaacaaaaacaattatattacaaaaaatgtgcaaaaaaacacaattttaaaaatatacacatttgaaaatatatttacaaaaattcata

SEQ ID NO: 122322 - DNA, 4109 bp, Cannabis sativa
ttatcgacgttttgtcgaaggattctctaagatttctatgccactaactgagttaaataagaagaaccaacagttcatatggtcagacaagtgcgaggcaagttttcaggagttgaaacaacgatttataatagcaaaggttctaactttcccatcagatcgagaaaagtttgttgtttattgtaatgcatccagacaggggtctgggatgtgttctggtgcaagctaacagagttatagcctttgcctcccgttaagtaaaggattatgagcagcactatccacagcatgatttagagcttgctgcggtggtattttctctaaaaatatggcaacactacctctatggtgaaaaatgtgagatttacacatatcataagagcctcatgtactttttcacttagaaagatttaaatatgaggcagagacagtggctagaatcggttaaaaattacgattccgagattctgtattaccccgagaaagtcaatattgtggaaaatgctttaagtaaaagaggtctttgggtaggtttttagcaccgtgatgatagctcctcaactagctttagaaatggttaaggctgaaattgaatttgtggttggaaagttacacaacctaacaatgcaattagatttgttagaaagaattagaagggcacagttagaagattttgagctagttagaattcaggatgaggtgttggccggtcggcctaaggattttttgatctcgaataatgaaatgttgctatataaagcttgggtttgtgttccagataatggtgagcttaaaaaggaaatccttgatgaagaacacaatacaccttattcgttgcatctgagaactaccaaaatttatcaggatctcaaaccctaaaatggtggtatgggataaaaagagatgtggtagattacgtatctaagtgtttaacctgtcagtaaatcaaagctgaacaccagaagcaggcaaggttattgtaaccattagcccttcataaatggaagtgggaggatattacaatggagtacgtggtaaagattacttatacaatggatcagtatgcagagctgtatgtgaaggagatagttcgtctccatggttctcctaaatcaattatttgagacagagatccaaagtttacttcaattttttgggtatgtgtttagagagctatgggcacaaagctaaagttcagtacaatttttcaccctcagactgatgggcaatcagagagaagaattcagatattaaaagacttattaagagcgtgtgtcagggactttgaggatttgtggagtaaatactagtctttaattgaattctcctacaacaacatctaccaaagtacgataggaatggctgcttatgagattttgtatgttaggaagtgtcgttctccaatccattgggacaaaactggagaaaggaagtacttgggtttgaaattagtttaaaggatcaatgaagttatatacaagatcaaggctcgatgcttgcttcacaaagtaggcaaaaacgttatgctgatctaaagcacaaagacattacatttcatgcaggggagcatgttttcctgcgagtttctcgagtgaagggcattaggcgctttgcaaagaagggcaagttaagccctaggctcattgagtgtttcagatactcgagaaggttgggcaagtagcatatcggctagccttaccaccagagtcatcagttgttcataatgtatttcatatttcaatgttgaggaaatatgtttcatatctgactcatatcttgagttacgaagcccttgaactacaattagacttatgatatgaggaacagctagtttagatccttgataggaaggaaaaagttctccgaaataagacaatagccttggttaaagtgctctggaggatgagcaaggtggaggaagccatctggaaattagagtctgacatgaggacaaaatccttttaacgggggtataattgtaatgactgcattttagaatatggattagtaaaggcaattagcgttaattattgatatttttataattatgtatgagtatattatgttgtgggtctcatttttaggaatgggcattagagctataatttctcaatttctagagattttattaaactctagtggtattatttgtgttatatgtgaattatgcagtttttatgatttttactcggcaacgacggaaaatacgatggatggtcatttgagtcgcatgggtaagtctagaacctttatcttagtgggataaatatttgagataaatagaatacaaagtttgagcgaggttatggtttttgaccattttacccttaggctttaaattgcttaagttataagctaaaagggtatttcaggaatttaactttaagggattaggtggcttgtccattgaatgacagttcgccattattagttaatattgggttatccttttttccatcaattaagagaattaaagaaaaaatatagaaaataaaaaattaagagaaagttcaacccttcttctctctctcaatgttcggctaccccaaaccaaaaggaagcaactttcaatctgtgtgttttctatgaattgagctaagactcaaggagtttctagtgaaggtaaaccctagaactctagctttcgtattatttaagcttttaatggaattttatcttgtaattttgtgttataatggttgttagggtttgaatgaattgtagttcgatttttaagttcaatttgagttaggtttgagttctagttgctggtttaggggtttggtgtggtggatgcacaagtttgagtttgaaagctcaagcttggttcatccatggcatattttgattctgtgtgaatttctagtttatattgcttggattatgttgtttgaggtaattataggtgttctggaagttttggtaaggtttggacatggtttggattgcttggggaaatctggtgcaaattggttagccagtttgccaagtcctgtaaaaccggttaactggttctgggacaggtttcccgagcaatccattttgtttattcttgttgttttcagagatttagttggttgattccttgatacttagggtattgtggtattagttgtccataacaaaacctttagttggaggtttgggtttcccggattagggttttggtgtgttgtttacctgtttatgtaatgtgattagggcatccatctagcatgaggttttccattcaggtcggccaactcacttgaatttggaaacaatataagaatagcatagaacatattgtatacatgcgaatgtatgtatgtgtgatatatatgcatgctggttatgatttgtatactaccaacacgtgtacggtagcggtacagagtgcatgggtatattgtacaatgtttaaagagtgccttacggtgttaccagtataagtatggaaaggtacaaggtgtgtgtggtacagcagctagaggtactcagggtacaagacaaaccctaccaacacccgtacagtggtgttacgtagtatatgtggtatagtggttgtaccctagtaaagagcactcttactcatttattaagccttgtaaataggtgtatgggtgcctagatacaagtcgatattatattatttgttatatgattttcttactaagtttgtcgactcacagttgctacttccatgtgaatgtaaaggaaaggcgaaggctgaacaagagtgagctccgagctaggatggtgtttgtacatgtcgaggcaacgcggattggagtattcggtcttgtgacatctggggttgtattttgtagtcactatgcgactagattttattatattttgagaatttttgtaaagttttaatacgggatcccaacttttgtaaataatcatataaaagattgtaaagtttagtaatttgattaaaatttttaatttagcacaattttcaaggaaaaccctttgattagcaaaggtggcacatcaattagaaaatcactgtaacacgtctaacttttaaggcgttacaattttggtatcagagccgccaggtttgtctaccaaagatcgtcaagacatgtacaatcatcatcagagaaaagctcggctca

SEQ ID NO: 122323 - DNA, 816 bp, Cannabis sativa
aaaaaaaaaaaaaagaagttgaatattcaattacaattagattggtttggatgtgaatagttaaattttaattggattggaccgattattggatgacaatttcaaaatccaattaaaaactaattaaatccaatcacatataatatttatttaaaaaaagttacatttatttatatataataaaacaatattcaaatttcatttttaagtttattaatttttcatggatattgttatccctttttttgtactttgacgtggcaagaggactgagcgaaacgtgtctcgtatttttgatacttgggctgaggtaagtgtcccgaattatagcaggcacattatacatcaacatccataattatcggttacccgagctgggtggaagacagagcaacctaccaggtagaagtttgcgatgccgagccaattacaaggagttaattacttcaggatgatcttgtaatgcctagacatgaagacaatccctacaatcgtgggattgagtcagagaaatatggcaacatattctagtttcttatttcttgtatcgtaattatgtaagcattgtaatttcctattttacgcattgtaagcaaaagggaaaccatccctcatgcattaagtccctataaatagtggcttagccttactgtaaaagatatcgaaagaattgcttcaaagagagattctaaagagaaaataaagatctaagagaaatactcagagatccattgtaagagcttttagagaggaaaacactttgttccttctctcaagttaatacaacacaaggagagtaggctattgccacactca

SEQ ID NO: 122324 - DNA, 743 bp, Cannabis sativa
agtagcgggtgagggtgggtttgccagtcacaacagttcatctcatggtggagtaagcattaaaactaaagtggtccatgtggactcttctcttcaattgtgacttataattatttatttttggttctttcataaatatttttgtggtttagtttgagacactacatgagtataatggcccaagattcgaatgatattattatccatatgtacattgtgtataaacaaactagtttcacaaaattagaatgcaaccaacatgtccatctatccattgagctggtcccacgtagatcctaatgtgggatccaacaaaatgcatgtaaaatatttaaaaaatgctatagggtacttagcattattagaaggtgtaatattgctattagtatagtttaatattaattcctacttattttactttaataaatattataaaaaatcactcactaattataaggcaatactttattgttgtgctaaataccatgagtacttcctagcaatactcaaaatatttgtatgatataagtcgaattcagtaggataggcacgtgaatgaaaagaaaaaagaatctttttcagagcctttgatgtattacccgttcggactttgtatttttaaaaaggaaaatttgatttcttatgcatgatttaagagttaattggttaggaaaacttaaactataggtaattgttagaataggctcactttacttaaatcccaaaactacccctctcaaaat

SEQ ID NO: 122325 - DNA, 924 bp, Cannabis sativa
gcaaagagtcgccattgttagaactctgttgaagagcccgcaatcatgttgctcgatgaagcattgttaatgctttggaatcgattaatctaaatggggataaaatgtcaagtattacacaaatcccagttgctcataggctttccaccattaaaaactcagatactattgttgtcatggacaaatgtgagattgttgaaatgggttcacaatattgaagcttataattggagtctaagggattgttctcaagactctcctgacagaggtttttaatacaatggaaccctatttggttaagctgattttagcttttagaattaagaaaacaagcacttttatgttaaaagaccttttagagaagctataaatataagtaaaagctatactaaacaaggcctaaatgttctgtagttaaaatacttatatagaaatagcagaattaattattaggtggtttaattagtaatagggttttctatatattcttaggcattaccactttgacatgaaaaaagaaaatgtaagaatgtgtggatacataaggttttgctctcaaaactgtcatgatatatattttttccatatctactaatattttatagtatatgcaatgaagtcttttggaataaagattctaagtacaaattacattcatgaaagtggcaacaaattacattcatgctaagcttcaacaaactttgttttaacttcactatataaaatgacatcatatatattttagttccttaaaaatcaacatgtaaaatacatatataattttaattttgattcctattgggtaagtggaatagggtgaataagtaatgatagtacatgatcttttgtttggcgatcttgaattccatgtccatctccatattgataaatgcaatgtgccattctaccaaggtttaaacacat

SEQ ID NO: 122326 - DNA, 1078 bp, Cannabis sativa
  modified_base (427)..(430): a, c, t, g, unknown or other
tgttcatattacttgaaatttcaggcttttccataattcttggattaggaaagttttttattccatgaccatgatagaatattcatttttaatcaatgtagcaatccatggtaacaccattccttaacgggacctagggcaagaagatctcatgtatccttatgagtttcttatgtttaataaatgttgggataattatataaggcactattttttgtaaaacaattacatttttgcatttaatgaattttttttttttgcatttttacggttttccataaaaacaacacgaaaataacaagaaaactacatagaagtaacataaaataacatctaaataacatcaaaacaataacaaaaaatagcatacagataacaaaaatcaacaacaaattaacatgaatacaacataaaaagactgtatttnnnntaaataaaattaaaaaattcgtaacaaaatgtttaaaattctgtgaaaccgtattttcgtaaattttttgttgtttttatgtatttgttaaattatcccataaatgttttgtttggtttggtgaattatgattgtgcttataatattctttggggtatctttgtgggagaagagactagatcacctctcatttatttttgctaatgatagtttaccttctctaggactttagtggacaactatttaaaattcaaacaacttttggcttggtatgttaactcttcttggcagacaattaattttgataaatttgtaagttgttttagtcccaatgttgatttgatagacctcgattgatttattttcctggcatagtaagtttggattttcatgaagtatttgggtcttccttatgttattagtcataaggctaagcatttggagtaggtttggcctggacctaacttgcgaaacctaaaaatttgaagaaaaaaaactataaaaactgaaggagtttggttgtacccgttcaaatgatcatgcgagttatcggttagaagtttatgtacctacacgtacaggttagacccgaacccacccgtacacccatataacacttatatatttatatatatttactaacataac

SEQ ID NO: 122327 - DNA, 896 bp, Cannabis sativa
tatattattttataacatttattttattatttgtaattgtacccacgaggcattacgggtatgcaagatcaaattcaattcaattataaaatattagaaaataagagccgcgctcttataaaatcataagctatatacattattaaaaaaaaattatgtttttaaaaaatattaaattgataaaatattaattaattattagataaataaaaagtttattttgggtgattttaatgagattctcacacatgaagataaaattggtggtcttcctagaagtaatgctcaagttgaagccttccaaacagcaattgatttctgtcatctcacctcagctagctgtgaaggtgaacttattccttggactaataaaagtcaaggccttggaaatgttaaggagggacttgattatggattctacaacgatttctggactgatttctttaataaaccaacaattcagcatcttgatttttaccactcaaatcacagagctctcaaagttgttattactacggcaagtgtgccaattactgaaccttccttcaaatctaggttcatatttgaaaaaagttggctcaatgatcaagttgcttagacatcatcctcagcaattgggtcaactccatttctcaaattatgagtaacttgcatttttgtgcaactcatcttcaagcatggcatcatcacaagtttggacatatgaagagggatatcaaagaagctcaaaaacatgtatcagttctgcaaaattcatccaacactaacccttctcacttcacggctctcgaaaattcagagtttatcaagatttactaccaagtatgtttgattaacatcctaatatgaaatcttaaacaatgaaaataaacatataagagtttaagaaaacctta

SEQ ID NO: 122328 - DNA, 1209 bp, Cannabis sativa
  modified_base (1158)..(1160): a, c, t, g, unknown or other
tgcgagtataaatattaaaacactcacttttaggtacaacatgtgttagactagtcttacctcaattttgattttaggtgtgccggtcaacctgagtagaaatagttgctgttaatcagaggtcttaagtcacatttctcgaaaaaccaataagtgttgccctaacactttcggggcttaaattcaaaattaaaaattttcctatcgatccataatatggaaataccctaagtatcaagaaaacacttaatcgcaatccgaggataagactcaaaacggacagtctgttttaaaaatggctgtcctaaactgcctaaatcgaacggttcgaaacctctatgtctgagtttggaattcccataactcacccattgttgggccaaaccttaccaaattttgcagagcacctatacacatcatagtgaacatttttcattaagaaaccttatccatattctcaacagaaatcaaattatcacgaccaagtcaagtttgagtttttgaactcaaacttgcataacttttgctacgactggccaaaacacttaaaaccacttctaaacagtcataattaaccttaagaagatttttctaacctcccttaacttcctcaacaggtccaactacaaaaagccactgaaaactaacaaaaaccctaaaaaaattcgttaaatttgggttaagttttaccttaaaagtttagaggagctagggattgaactccttgatcaacttcagccagaaatatgcttgaaactggtagaaatttctggttttggccgtggtgcagaagcatgaaggtgatttactttttacttttgactttcttttccttttatttttccttcttattttctcctcaaggtcaccaataaatggtgagtcacaaccctctaaaagtttcaaataaggtgactaagcacttggggcgaaaagactaaaatgtcctaacctccccactaagttatctcataacccttggaataaaatggttcaatactgttaatttgctaaaccctgatattctaaaagattcaatgatactgccccgtcaattacccaacccatttccactattaccaggtacaaaaatgtgaaagggaaattttatttacaccccaaaaatttattagtacaccctattttaataatttttannntatataaaatttatatctttaattctactaagtatttttaacttttttc

SEQ ID NO: 122329 - DNA, 2424 bp, Cannabis sativa
  modified_base (44)..(78): a, c, t, g, unknown or other
taacatacatgtaatcataattcacttcaaaattctaaattgannnnnnnnnnnnnnnnnnnnnnnnnnnnnnnnnnnataaaacccaacacatactgcttggctcctacacctcccttcaacttagcctcacgcttcagttgaatgagctccttctcttgctcagctccctcagcccggccagcactggacttcctcttcttccccttcacatgctgaggtacaaaatctgttggataaagctcgaactccacaaagttgtcctctgaggtcaacaagggtatattctgagcatcatccgacagctaaacaatccttttagctctgtccctaagagctagcgtgaggggtggacggtaatatataggaatcttctgaaactgagtataaatggtgcccatgccttccaccatgtaatattcgtcaatgaaattcctaatttttctcacgaccttgttcgtggtgcctgtaaaccacttgaagtctggctgagagaagtagaagtacctcgacctgccttgcttggggtagacttcaggtcaaaaaaccaactgacctcgtgcagagaaggcacaccccacttctgggtggcgtagaggacaaacagggtagacagatacttaatgccctttggagtaaactgggtcggacagaggcagaagtaatctgccaccttcttgaagtacgggtgcaaatgcaacattgccccttgtttagtatgagcacccgaccaggcacacatctccttcttcgggtttgtggctcggtgatttgaggcagggacataacattcaagttggcccagatagacagactggtccaaatcccttaggcatgcctcaatgatcttggacggagggctcacccatctggcacctaaggcaccttgcctcctgtaaggaactgcagccgtaagctcctcagtgacttagtccactgcttcgactaggacttcgtcctctgcagacactggctccccggcctcgttgtaacccccaaaatttggagtttcagcctcctcctcttcatcagcctcggaggggctgccaagacagacatcgtcctgttcctcaatttcttggacttcagcgtccccctcatgatccccctcctcctgaacgggcagatcctgttcggcgctgggtaatgtggcgagctgggccacgtgaggattagatgcgttgaccttacgcgtcgtttactttgttcgacccatcatcctatggctggacggatactggggtgaatgccgagcaaccgtgacggcaggaatagcaatgggaataccaaagttccctgaacttggatggccagcaggcaaagtgtcagcaacacctggtcggaaaacgtatgtccagttggacggcagatagtgcctccaacctttcttcaactctcaaatgaagcggtcgaatccctctccagcgatctgctcagagtaatagtggtgttgcatttcgggttctggagtagaagaatgttcactactcacctcccagtcttcaaggcttgaattggaaagttcgtcaattgaagaggacggactagcacgaagacgagggggatcctcgtacataagttgaagcagatcttggtcgattcggtgttcgctttcccaaaactcaccagggttcaactacaaaagacaacatacgagatgagtgtttggtcgggatatcgaacaataaacaggcaaacatgccgaccaggagtactcaacagattaaaagaataaaaatattcaaaaataagtcaaaacccagaagtttaaaatttttgggtttagggcgaaatttcatgaagctttgaataagcaaggtgaaagacaaacaattgcgatcgaaaggccaacgtcatgaaccgcaaagtgttatagattattacaaagaaaatcgcaaagttttaaacctagattttctacctatcttctacagcaaagtcaaaaacgcatgtatggaactcacaaattaaacatgcaaagtaaaagagaacgagattgaaaacttactcactgtttgacatctgagttcagtccaaatgaagctgctcggatgcttttggaagaaacctcacgacagacttgaagtgaaaacctcttttttgctctgactttgcttaatggagaaattggtaaaagtgaatttgtgaagggtgcacagccctatttataggcaaaaaaatgaaaaaaaaaaacagggtaatcatttcaaatgccttagacgcatcggttcccccccaaagcaaatattgggaatcaaagacaatcaagtgcaaccatcaaacgtggtaagagaaaactgggtttcgaggcattaatttagttagaacattaataagccaaaaactgaagagacactggtcagcctcacatcaaattgcgaacagacgcgcgtaacacgtgtcacccattcaaatgcaagggca

SEQ ID NO: 122330 - DNA, 813 bp, Cannabis sativa
agcttgatgaatattttggttggagataaactgatagttgatgggcttaatccttttaaaaatgagattggagataataacactagtgagcagtgtttgaagttcattcaatggttatagcataatataaatatgaaaaggtaatttaagttttttaattttttattttgtgttttgtatatatgtgtttttgttagctttataatttttttctttatatttttatatgtagcactaagaagaaatactccgccgttgataataagattgatccccttatggacttcagtttgattcaaattgatgagaaaatgtggttttacacgctctaaacttgtgggaagttcttttcagattctgtaagttttttttaattgttgtcttatacattatattttttgtatttgttgttttaatgtttgtatgaaactagttttattctgtcttttatttctgaataacgagttttagtttatttgtttaataactagtttcgttgttgttattttccctgcgtagtatatgaatgtagctttctattatctgagatagaaagttaaacaagatcaatctttgaaccaaagggtaacaacaactgattgtgtgtttgatcagttgattttcagcgaatataacaaatttttggaaaatcattccaatccgagcacaattaattttgatagagttataactcgttatattcttggggaatatttgttttcaaatactgcttgggttttcacagatcatgttcttataattgttcatgtgaaagatcaatctcactggattttgatccattttagcatcaag

SEQ ID NO: 122331 - DNA, 1919 bp, Cannabis sativa
tctatcttcactctggttgttgttcaaaggaatgttgagaatacaagcttgatctcgagtattaaacaaatcagttatgatctccatatactaataaaatatttaattacaaataatattgttttttttttttgcatttataaactaagattgtttcaacttcttttgtagattcaagttttcctcttcttcttcatattctttctcctcgtcatttttcaaaaacaatcccaactttgtcaaaggcgtcccatataatatattagaagatgaataggtgtgcatttcagaatttcttccatcatatctgcatgactgcttgtatctgcatagcatttcaagttccaaaaaatacttatgatttttatcagaataatcaacttcttgcttaacctgtgttaattaattatcatattacaaatcagtttgaatttatcatcaaaaaaaatcttttacaatcatttaagataccaaacgaaaaaatatgcaaccaaatattaaccttttcaatcatagctaagtgagcttccctttctctatttttttttttgaaagaactaaagttcattaagcaagaagaaaaatggggatcacagggggatcaccctccccttgaaacaaaactgcaggttgtctagaaattctagcacttcttgctaaactatccgtaaaaagattgaaattacgactaatgtattgaaacttacaaagattaaatctacgactataatccaaaatagacagagacttgttgagggatctccaatccttaggacactgattaatggctagagcttggactgcggtttgacaatccgagactaaaagaattggttgtcttttttcttcagaagcccacaccagagccataagaatggcactaagctctgcgtctaaagcagaatttgccttgatgaaatctgattttgtagcccagccgcctgtaagtctgcttaccattactgctgcaatccctgcctcccctctgagccaggacgcatcagtgaacaccacccaatccacttccagggactcaatatcatgactcagagatctatcaacaagacaacaagttacctctgcatcatcaccattagaaaacctcgagtaatcctcaaaagccttccctactctcctaccgattatttctatcttcaccaattcgccaagacgactatgattgttccttatcatccaaatttgatccacaatgcagcccaaataagttagaatttccttcctttccactccagccgcctttacttcctgaaccaagttcttcacaaaatccaacatgctatccccaggaattttctccactctaagagggaatttgcctagaaaccagatggattttgccaagctacagtctctgaagagatgtaagcaattttcctgttgaccactacatagaatacactccttgtctccaagaaaaggtaatctttccttaaccggaatcgcattgtttagaactcgccaaagtaaaattgcaattctaggatgaagatcagaatgccacaaccaattccaaactggctggttttcttggaacctgagtttttggtccacaaagtatgcacttttaactgagaagccgccatcttgtttttctttccaaattaatcgatccttgttaggaagagggagcctaggaatttctagaattttttcccccacttcctttccaaaaaattgtaatacaatttcctcattccaagcattacccaaagacaaatctgctaaagttctagcagtatatccccttgatctgagacttcccatcaaacttttaaaatcattgaaatccaaccaaggaatccaaggttggttccaaatatcaatggtttcccctccagccgatatagacaaagaccccttcaaaataatgtttcgaacatcaagaatacacttccaca

SEQ ID NO: 122332 - DNA, 766 bp, Cannabis sativa
aagtgtaaaaataaaaaaaaaataaaaaaaaaaactctaaaaaacctttaaaatttctcattaaaaaataatctccatatatatataaataaatagaatgatagagatagagcttatataattaaattacataagtgaataaatataatatagaataagacttaagaggcatgtgttgccaagatgggactccatattacttaaaaagtgaatcacatgcatatgtctgagagtaagaaagatgataccaacacaacactataaaaaatttatcaactcttatacatataaattaaatatattaatcctttgtattatatgaatatataatttaaattattggatgtgacaattttgcaaatataattaaacctggcccctctaattaatacaaaagctaatacttgttggctcttggctggctcatccgtacctaagagcctctacggagtccttctgccctatccaattcccattattgatttttcatatttatattcattgatgttgattgaaataattggcacaatatttttttattattttttttttaatttgcagtcaaaattttaaaattgttaaattaggtatgattaaattttttaggccgcgaaaattatggttatattttttaattgggtaaatattattttaaattttatataaaaattaataattgaattttctgttttgttaaatgacataatggattatgtatttttcaaaattgtacaaataagaccatgaactgattttttatcaaaat

SEQ ID NO: 122333 - DNA, 1228 bp, Cannabis sativa
atttaaagacacaatttaatatatatcaaaattaaaagatacaatttagtacaagaataattatcacatcattaatatagttaaactaaaaaattcttaaatttaataatttaaaaataaattttagcaacttaaaaaacataatttaataaatatcaacctctaacaacaaaaattctaactaacctaaatataatctcataaaaattgacaaaacttaatttgaaattggatgagacaaatattggtctaaaatggtccaaagcaaagtgccaactgtccccttcaactttagtctctcaaaatccaaaccaaacaaaacacatctctaaataattcaatatttcccccctaaaagaaaaaacacaatcaagcgccaaaatccaccactcaccaatccacgtcatcgatccgcaactaaacttccaatccatctcaaccgtccattcaaaaccatccacggtccaaaacccttctaaaacccattcaacggatcaggaccatttctccaaactcaaaaccactcctataaataccaacaaatcgtaccaaaattcccaaaacacagttccgtctctttggaaaaactttaccatttcgaaaggtacagctctaaatttggattcaatttcggtctcaattttcgaaatttcattctaatcttgttttgtttcggtttcaatttcagaatcttgagtcttcaacaatgtctgggcgtggaaaaggaggaaagggtttgggcaagggaggtgcgaagaggcatcgcaaagtgcttcgtgataacatccagggtatcactaagccagcaattcggcgattggctcgacgaggtggcgtgaagcgtatcagtggtcttatctacgaagagacccgtggagttctcaagatcttcttggagaatgttattcgtgatgctgtcacttacactgagcacgctaggaggaagactgtgactgccatggacgttgtttatgcactcaagagacaaggcaggactctctacggttttggaggttaaaagctttttctttgatgttgaaatttaaagtcttgctgtcaagaaagatttgggtcgttttttggggaagaatgggtggtgtttttgtatgggggtgttaatgttgttaggttattagatttttctatttgtaattattagttattgggattttgttgggttgttcttgattgtaatttctaatatcttgttgggtattgaatcttcaat

SEQ ID NO: 122334 - DNA, 3094 bp, Cannabis sativa
tttttttttgtttttctttgatttctaattattttattttcgtttattaggatactggatcatatacacatctaaaggttagttcgaagaatatttggatcacatggttggtactactgacatgatgccctaagtgagaaagtatatttcggttcaatgagcatcttttggtatcttcagcagaactttttctgtcatttcacttgattctggcccgaaactatttaggctactagaggatcttttgtatccatgctgttagagagcatgcgtggaatctgtgtttcgggtaatgcccctgacgagatttgctgccgatgcattcggtgtgttgacaatatgtctagttgctctcttgattcttttaggtatactgtgcatcgcttactcattttacttccggtctcgcattcgtagtcagggttttattcagctcagttactttagtggtccttggataattaggattgctttcattttggttacaatttgttggggtctcggtgaaataattcgtttaacgtggttaagacgtgagggaagagtgttgaatcttgatttgaaatggcaggaaactgtctgcaaatgctacattgtgtcgaacttgggatttgcagagccttgcctcttcctcactcttgtgttcctcctgcgtgctcctttgcagaagatggaatcagggatcctgagtcgaacatggaatgggaaaacagcagcatgtgttattctatactgcctcccgctgtttgttcttcagctgtgtcttattttaattggacctcagttgatgaagaataagagtttacataaaatgccttggtactttacgagtacaatgacaactgatgacattgctctctgcacttaccctttaataagcactatcctccatgggatttttgcaactgtcctgactgtctacttgttttggctgggaaggaggattttgaaattggtcatcaataagggcctgcagaagagagtttatacattgataatctcagtttcaggtttcttcccattaagggttctattacttggcttctctgttttatctaaaccagagcacttgcaatttgaagctctctctttttcggcttttctttctcttctatgttgtaccggggtgtgtatatgcatgcttgtttactgcccagttgctgattctttagccctggggagtttacatgacttggaggctaggagaatgatcaacgatgatcaaaatgactctatttcccttattgctaaccagagtcatcttgaagaaacagctgttaatagccctgggaggaattctgatgcatcgactaagcgaggatcaatttcctttcgaacgttggagaaggttggttcttcaaggggaaactttgtggaactcagcctcttctctcccagtagggatgcatctcccccgggctcacctccgctccttggctggcctatgcgccctcctgcacaagttcatggaacttaagaaagcatgcaagaaactgagagtaatgcgtggtgaatatcaattttgtggtaaagaaaaactgattgtaaagggttttagcttcaataaggattcatattcttggtttgtttttctaattttagataatgatgatggttttgcttgaaatggtattcattatcctttgatttttttttttaatatattctccctaatggtattcgtatctaggtaaagaaatacaggtggtggacttggtcaatcttacttctagctcctttcataagttaaatctgaatagattttttcgcccattatttactttttgtttaattaataatttctttttaagtaggctaacggagttgtgtatcctttaaaaaaattaccaaattgattttgtgatatatataggcattagtaacatgctatttatactatagtttagatattttaaataaatttattataaaaagaatgattaattgattgaattaatgtttaattgaaatttaaattaaaatttatataaaaaataattatttaatttgttaattatttttaaatataaatatttaaagttattttttcaaaaaaaaaagttaatttattgatttaacaatgttagttttaaccgttaattttaactaaaaaaaattaataaaattattcaattgacaatttactattagataacacattaataaaattaaattgaatttttttatttgtaaaataaaaataaaaaggaaaaagagattttataaaaatactagattttaggtaaaaatttacaattttactatcacacaatttttttttctataaaatactaaaacaacaaaataaaacaattaaaaataattgtgaaacaacagtgaaaatttaatacaatagacagtataaaaaacataacattttttaaaaaaaaattcaatatgtaagtataaaaacctcaaagaaaaattatatatgcatatatgatataagaaataattacttatttatcatacaaatttaaatatacctaaatcttaataataattaacataaataacaaacatttataatttgtattctatataattatatccatattattttaattaaaattgtgtaacattaaattaatctttacttcattatttattattattattttttttttaataaacttcattatttattttgattattccttgtaagagaattattaaatgaaaaaaaatataaaatgggaaatttacataaatactgctttttgaccaaaagttttcaaacataatgggacacggcaaacataacttttttactctccaagcccgttttcttttcttttatactgcccaagcccaataactttacttttatactataaacagtaaaaaaacacaaaaaacgggatctccttccttgttggggacgagccagaatcggagataaccaggaaaaagcgattaaatccggggaagagtaacccctgctaaatctaaggacaatcgaagaacgaacaacaagatttacagaagattttttttttcaaaaacagaggtaaacacaacaaaacccaaatttgtttaattcttaataaactacaaaaaaaaaaaaaaacaaacccagatttagatctgaagt

SEQ ID NO: 122335 - DNA, 855 bp, Cannabis sativa
atttcattattttactaactttttaaactaaaataaattaaaaactattaggataaaaatattaaaaaaaaatcaatagtagatattcaacctcacgccttttcttcacggagtggttgtgatgaaataaagaagaaaaaattaatatttatttaaagaattgtaggaccaaatggctgccatttttcggaggagagctggttttagaaaatgaattggggaagaagaagaagaagaagaagaagaagaagaagaaaggggggaagagagaaagaaataggtaggctgggcaaattttagtgaccaatcttagcggacctatattagcctgctgttattggtaaaacacggtccaatgagaaattttaagtgaccaatcttggcgagcctatattggcctgtcgttattgataaaacacaaccccatgaggaattttaagggaccaatggcgagcctatattggcccaccgagattggtaaaattttaagcttaaaaaatatcaattaataacagcggaatatacgatgcccgccaaaatttcaacgctcaagatttttaaaaaaaaaacaaattcagaactatctcagcatgcacatgcaagcccaccgagataggcctgccatgacgataagcctttttttgcagtattgattgtactaaaaaagataacgtgttaaaaaaattgttaaatagcattagtttcttttatcatttctcaacaataacatagttatatttatttttaacacaaatttgattattggtaacaaatcaaatcaaatcaacaaaataatacaataactttgataagagtgatatgatatattgatcccaagccactccaaaccatgta

SEQ ID NO: 122336 - DNA, 2490 bp, Cannabis sativa
  modified_base (1419)..(1436): a, c, t, g, unknown or other
  modified_base (2285)..(2290): a, c, t, g, unknown or other
gagagagagagagagagaagttctctcttggtttcgaaatggtaaaaaatgagagatgaatgtaatagatagagtttgtaaaatttaaatgatttagcttaggttattattagacactaacattgttagcatcagtcatgaaacgacgctaacaatgttaacgtctattaataaccgacgcataacataaatttgttttataaaaaattaattttttggtgtcggttttcaaattaacgtcgaagtagctaccaacgcaaatattaatttttttgggtcagttgataactgaagcaaaagttctgcctttattttttgcattggtcatggtcgtagacccgtagcattgatcgacacaaaaatcgttttttttgtaatagtgtccccttcttcttttcttaattaatttcctaagttttgagttaagttttgtgggagtttttatgattttggatttgaaagtttggtttgagttcagattgtattttaagtttaatttgggactgtttgtgtgtgaattgaacgatttcttggttgtttgagtttagagttaagggaattgagtttaagaactaattttggttcaagcatggtgatttgagtattgtgttgaattgttgagtattgatgatttctgtacattatttttataatataaaactgttctagagagtttaaataggtttggtggagttttagatcagttttgaggaagaaaactagaaattttcttgtctgtcagaatcgatcgaccaattctattatagttcactaatgaaccgaccggttggtttgcaggggaaaatctcaattttctttgaatttagtttttggatcagagtgttttccaagatctagtttaagattattcggtgttgtataatttatttttgataccaaatatatcaaaattaaatactaatttaacattaaacatatttaaagtgtacacttaactttaaacattaaatatgtcaaagttacactttcatttaattaaaacaataagcatgtcttaaatatacaacatttacactatacaaatcttatacacaatgataaccataattatcattttagtaataatttgaacaacttcaaacttcaagtttaaactttattgtagggatatccaactctatccataaatcactccaattgcattaattacccctgaacagttcaattaatacagttataacttgtttttttttatgatcataataaataaacattaattggttgggtaaaattgaaccaatagaaatatagtatatataaatgagttgtcagcagtacatatataaatttacttttagttacacattcagagtcattgttgccttactataattctataaggtacaagtagtagttatatttacttttaaatgttataaactattattattattattnnnnnnnnnnnnnnnnnnattattttaaaaaaaaaaaaaatagcagctacagtgccatttcaaggtgctggcagtgtagattttggtcattttttcaaaataaactgcatatgtagtttttataatttctcaagttgtaattgcactagaagatcttaaaattataaaaattacactgtaaaattatagtacaatttagaaaatttacactacatcaaacattataataaaaattttaaaattaatttaataaagtttcaacaaaaaaaatcttattcaacaaaaaaaaacaatagtaatgtattaaaaaaaataaagaatgaaaataatttatatggatgttctattatatatttaattgcatagtttggactttataaatatatgagttgtttaaatatgaaaaatatatatatattgtaaaaataagtatatttttgtaatatataatacggtgtaatttaaaacacgattattaaatttaaaattgcaaattatgatgcactgtgcagtttggcaaaaatataaactacaactgcaccgtaaagaattttaatctgtaatttttatatggtgtgatgtgatgctgacaatttatgtggtgtggcctgtgggcaaattgatcatgaacacgtacgagaatgcaataataatatataaaagaaattacattgtatactcactttatcttatatgttttaatttttacttttatttcaatattttttaagatatacccacttttataaaagatgtctccattatactctttaagttaatgtaaattatgtgctagacttaagtacatggtgataatatattggacaactcactcacaaaagtaattatattttaataaaatataannnnnnaatatttttaattaataaataaaaaaaaattcttcaacttgttcctaatagatgtgcaccaaattttatatatatctattctatataattattagatgttgccacgtaaagggtcagcagtacttaaacctaaatataattattccacctaaagtgttgcaattaataataaatttgttcatattgtttatttttttatt

SEQ ID NO: 122337 - DNA, 1690 bp, Cannabis sativa
  modified_base (31)..(38): a, c, t, g, unknown or other
tcttaaagagagcgacttagtccgcgactcnnnnnnnnattcttcattcggtaatatcgttcctcttttattttgctagcagtttactcaacagttcctgtgctggtgtttgcgccgaagagcattgacgttgaggttccgatggtggaggggggagttggtcatgcaaacggttttctgtggtgaatggtggctgctgttgttggcgttgatcatgataattttgtttaccatcattgcttgatccattgtagcgttttctctctaattcactatgtgtatgactttgctcagcttggttgagggaaggatcctccattatgtgaatacgtctctgctttctgttcttaagatagagaaagagaatgaaggcctatattggacaaacacaatgtgtctaacatttccatatataggaataaaaagtctcgcttattttcaaaaaaaaaaaaagacagtaggaaatgcaagaccaaatattatggctggaataagtgaaactagttgagatataaaaaaggtgagaattcataatccagcttttaagattcttttcaaattaattaatttatatttctgaacacaataatttatgtccaattgaataaaaatgtatagcaaataaaacttctaatgacaatatatagatagttaattaattactttaattaggagatctgtatatttttagggaaaaaaaatgagatcggcattaaatttggctgtttcaaatattcaaaacaaaaatatgtgtcctattaaagtcacaagttagatggtttatatttttttttttcatttatattatacatattaaagttttattgtcctttttcttagcgaatatcattttacagagggaaactcctctattttatgcgtaacgttttaattttagttttagtataaacttatagataaccgtattgatatattagacttggtgggaaactagtcctcgaccaactacacaaatctatcatttaagataaggccactaggccacatttttttttagctaaagaagtagcccacaattatgatgcctaatttggaattatttaaagggtttactttttggagagagagggaaataatggttggaattttatttgaaagggtttactaagtcaacagtcaacgtgagagagccaaataatcatcttataagaaaagtgcatggaaaagaaatggtaaagaaaataaaaagttatggtttttcttatacgatggagaaaaaagaaaattactttatatttagtactttttttttttgagatggtttatttagtacttaaattaaaattggaaggaaaacaaaaatatgctaacatctttcaccttatatttatgaattttgaccacagaagatgtaaaaattatactatatttagcacaaaaaattacatttgtaataaatttgtaccatcttttagtattgtactccgatacacaattacacaacatgataaaaaattaaagagtgtgtttagaagtaactgtgtaattactagataatgtaattattaaggtagtaattacacaatttagtaattacactatattttaaaatgcaagatgtgtttagatatgagacggtaattacatatgaatttctaatatcttgtttggcaaaatagttaataattacatggaaaaataatattttttagtagttaatatttaatat

SEQ ID NO: 122338 - DNA, 1783 bp, Cannabis sativa
aagtggccataggtgggtgtgtgagtgttggaagtcctgggttcgagtcccaggtaaaacatgatgtaatatataaacgcttgaatcaaaaaaaatccaaccgctataatccattgtgtgaccaatcatggaaaaaaaagactgacattattgggatcttatataagtagtttttttaaatttataaaagttttaaaatacacgtaataaatgcaatgcacttaataataacctaatatatttaggtattctttttgtctactttataaaatacaattttagattctgttttttataaaaaattattaattggattttctatgacaaaatagactttataattttaaaattgtacaaatataatcctgaattgattttttgtcaaaataatacttaataataatctgatctagaaatattatgacaaaactggttacatttttttatatgtgttcgtgttagagttgtcttaaaattgttatatcaaaaaataaaattgttgaaaattgagcttaaggtcctatttttaccattttagaaaatataaggtcaattttatcatttaacaaaaacagagagtacaattaataatttttgcaaaagacaggatctaaaatcgtattgacccatatcagattagtaattaaattgctcaaacaatttttaaaagtatatcaattaagtctaaatatcatgaaacgaaatatgcaaatatctaactctaaactcgcttaagattaagtttgttcattgcttgaaaactagtttccaaccaaaacaaagggaatccatttaaagcttttaaaggcttcaacaaatttcttttgtttccatgttatctgttttctgtttggcaatgagtttttaaagcttacaacaatatggttttaatgtgttaattatatatataaattaataccataaatactcattactttactttattgtagtttatttttacgactaaaacattcaatttatcaaaaggatacattctactatcattttatttttcgtttttctctcaattaatataaaattaatgtgtttgttgagaaaacataatacagaagaaatggtaatgaaatcacaaataggtatataacaaaataaaaaatattatgtatttctagactagctcaatcggttataaatatgtggtaggtttgtatttttgttaataaggttttttttttttttttcaaagaaattgttaaacatttaattacttctacacgctcatatggaaataataagaacaattaatcataaagttaagccaagccttgtccagcattccttacacataattaatcatatgcatatataataaacttaaattcaatttctaatattactgttttgtgttggtgtgtctcttgactaatcataagatgttgaatcaagcactctttgcccttgcaaagggaaactcaatgggtccactctaaactcttttgaaatcaatgtcatctattatctatagtaaatattatgtataagcatttctttcaaaaaaaaaaaaaaaaaaaccctattatagcggaatatttacacctgaaagctgtcaagcccagtcgactcagccaactcaaacccaaaaagtcgaaattggtgggcgggttgggtgaaaccttatttttcgagcaaaattcgagtatgtgaaaatacttcactactacaaaaatcactattctcgtcggtccgaaaattaattttttttttttttttatgatcaacggtttttaaactgatactcaatttttctctctctctctctctc

SEQ ID NO: 122339 - DNA, 1879 bp, Cannabis sativa
  modified_base (1825)..(1826): a, c, t, g, unknown or other
gactactgactgtcacataaataatagaaaaatgggacatacattagctaggtactagtggttttaagcactagtaataccacgagatagcaggtacgaagttagaaataaaatttaagtgagacttatttatttttacagtgaaataatgtaaaaggatattcatagtgcttagtacttttttatgaagtgttataagttattgatataatttaatatcgaattccaattatttttcctttaataatgattatagaaaattaataaatatatttatacgacgctacttcacagtggtactaaacaccacggtgcttaatagtaaagttttttcttatatattatatggatttcaacatttaataaaaaaaatatagaattaaaaataaaaaaataaaataatacacaaatacattaaaataaattttaatttaatcacattttacattaattgtaaggttcaaattctaacaattatacaaaaatagactatatggagttttgaacatgtaatctccttaaattttagactcaactacaacaaataatataatttaataataatttaccagataattagtataaaccttaaataatttataattgagttaaattttaagtgggatttttattttatgtagcttcgcccatgtaaagtatatgatatttaaaattattgttaatttttctagaaaaaaattaaagttacacggatagtattatgacaactcatagtaatattggatattgatctattagtaaaattttacttcaatatatagtaatctattatagtgaatagtgaaaagaataaggtgactaattttaccatttcccaataagaattgggaccaaaccaaagaactataattgagatacatggaccaaaggttattattatgtctcttaatttgttacaagaatgtaaagtttttgttattcttatctttaatttcttttttactggttagtagtagaaatagtgggtgggacaataattgttttgctttttacacatgacaaagttgagcaaattcattaattttgtaattatgcctatagctataattaatttatagatcttattgcttttgtatctatttatatatacatatgcctgcttttgtatctgtgtatatacatatgcttattattataacttcatataatatatgtgaaaaaaatttagaacatgtattttttgaaggtagaaaaattataattcaaatatttatataacaatgtattatgtaattattttaagatttttttataaatttttctagaattctaaataatttatagtgttaataaaaataaattttttttcgcgtatgtataatttttattttttggcccatataaatatataatatttgaaaagaatttagaacactagctatatagtaagtaaatattgagagtctcctataattttttgtaaaattctaaatataattaatttatcaaacgaaaaatacaaaataaattattttttagtatatttgatatgtttacgtgtgaaataaattgttttgaagttattctaagcaattataatttattataccgctatatattaaaaaattaaaatacaactgaattaagtgttaaaacaaaaatactcctgatagcaatggggcaagcatatataaatgccctaaatatatataaagagaaagtaatggtgtctaatatgttttataggtggtgtttcattattggtgagtgatattctctaacaagttattttttaaaaaattatataagactcgataattaattataggaataattacataaggtaccattttttgtaaaatanntacatttttacgtttaaagaatgttttttttatatatatatttttacggtttt

SEQ ID NO: 122340 - DNA, 1165 bp, Cannabis sativa
cccccgccggtaatcactaataccggcggatttcactctaattactggcggatccttccgcccctaattcttctaattgttgtagtgaaaatttagtaaatgtgttctatgatgatttctcaatagtttttcgataatatttcacatggaggttctagatgttgttattacaatttttaaaatttaactttgatagcaaggaaaaattacactaattgtttctaaatgtataaaaatatacaaaatactttctaatacaaggatgttattattttaatttgttctgctatctttttaacatggctttcgaaaacagcagggtcctgagcgtcatatgaaggatgtgtctgatcaacatccatctcaatcactatctcaacatcattgtaagtgactgttcttgcatacacttcttcctctgggagagaaaataaccctcataacaatcaatcgctactaaagaaagaaaattgaacaaatttagaatcctatcgaaaatacatcaacaaccaatcgaaaacctattaggaaatcgatagaatacaatagaggaaagaaacacaatttgtcaatgatatcaacaaaatttaaacaataatataataacagaaataaaatgcaaacttaacaacaaaaaatacaatactaaactctatcgagaatccatcaataataagtagataatcaccaaacatgacaatttaaaaactaatttttaatcctacaagaacatgtcaacaactaagcaataataaccaatataacaacagcaaaataaaattctcacttttatcaagaaccaatcgacaacctcttgataatcaattgataataaattataaatatatgttacttaaactattgataacctaacaagaacctatcaaaaaatattcgataaaagttttctctgactttgggacatttgcgtcgagaacccattgagaacatatcaaaaaaagcgtcgagaataatacgaacacataaaatacccagaaaactagatctcactatttcagcaaaaactatatcaaaactaagaaaatacaaacaacaaccacatagatctactaacaccatttttcatttttctgaattgttagaatattggttgtaaaaattagggtaaattatatttagtatagtttcctatttgtatttagta

SEQ ID NO: 122341 - DNA, 1218 bp, Cannabis sativa
agagagagagggggctgggtgggttgaggcttcggggttgagcatcgacaaagaatcatcagccaagtcattgacctctttgatatcctcagagtgagcaacaacattgaactccggataataggctattgtcgtttgagttgaactttgctccgacgcttcatggccttctttcacctctttgataggggccaaaatgggaggaaaaactgcaaatggacacaatgctaaaggtggcgcaggttcgacacgagaagaagcacaagttcccaagccaaaagaaacatgctcaaaatagggacaactgcaaacctctgagaaaggcgatgggggaatggggactagttcaaaatcacgaaaacctaagaaagagtttaaagatgaaaatgcagggtccagaggctgcaagtttgaaaatatattaaaaaaggaaggatgatcttttgagtgaggcacttggtcctttaataaaaaagccatgttttagaataaagtgtaccttgaaaaattagtacttgagtaaaaatccaaagaaagcttttgaagaaattttagaaaaaattggcaaggttcaaaacatatttatagccaaaaacaagagccaacacgcattaagaaaggatgccacgaggttgaacacgaagagcccttaagtaatcaagaccaagacacgtgtcaaccaattaaacataccccgaatctcgaaatgctctaagagtatatatgtctttccagttttcgaggtgtcttttccgtttttaataagggtaagtgaaaaaaacaaaaatgtgcaaaaaataataacagtaataatgatagtaaaaacgaaagggcatttataagggaagatcaaaggttccattaatgaagagagcactaagcagtaaaatttaaagcaaaatacgtaacaccacacgagatttaaaactaaagtagaatacatacacaatgcaagaaagaccaaataaaaagagaatcgtgcttaagaaaactaaggatagagctattacaaaaaaaaacttagaattagaaatactctcgattaggatgatgccaacacaaaatagataaagagcctgggatcacaatagaccccctcactaccctcttcatacaccgatggcagcccataggaaaaccaggaggataaaaggaaccaccatacctcaggcactcttccatccacctttcatttgctaggcgttcacgttccaaatc

SEQ ID NO: 122342 - DNA, 3027 bp, Cannabis sativa
tgtgggtagatctaagatcctggtaaaataatttccaacaaatacaaggagttagggtaacagggtcgagaccggaggtggtcagggaaatataattcccaaatccccgtggacgcggcagaggtcgtggaagattttagggtggtaggcatgaaaacccacctcaagttcctctgaactaggagtaaagatttgtggaaatgcaagatcgtattcgtcagcaagacgaagaaatttggaggttgagacagcaggttcctcctgtattgcctccaccacaagttcaggccgctttagttcatacggtgctagtagaataacctgttgctgacaaccgtatggagccactatacaagagatttcgcctgcaggcacctccagtttttctaggaggtctggatgttatgaaggcgaagcagtggctcactgtgatagaaagtgttattggaggaatttagacaacaccaaataaattaatatatttagaaatataaataggattatgcgagtactcaacctagaatggcgagtattcaaattatggatacacagacgtactggaaatataaatgacacaaagagagtatagtggttcagtcagatgacggtctgcttagtccattgttgcaagggttttatagtcctgtccatttcatgttggatcactcctttatatacaaaacaagtgtcctttgattacacagagattgattttattatcaatccgtttgtacattgaatattacatttaaatcaataaaaatgtaaatacaataaatgaggaatagtttaggcccaattcactaaatacaacaacgtatgcgactttcatagtacgagttgtctgttcatattctcgcataagcttgtaggctcaagatgcgtacaagactaatcaagtcgataacttaagacatgcaagtctttatcgagttatcgaggacgttgggtcatccataccagctcgctgagcagagaatcgatatctcttacttcgcaggaagacctttatagttcttgcatatctctcggtatatacgagtcttaaacccgatcttcggtcttgcttcgtgcgaactataagaatgtgactagactctgtcaaggtcacattatcccgctgagtctagttcatgcaaggtttacgctcaggaggtctcctactaacatctccgccctccttgaggagagtgagtccacgtgtcatttttattgaagcctggtctcgagtttctaggtgaaaaattctcactataaaacatgcccctaatttcgcgattgacatctatgtcatgtgggaaactataagcgagaggtaggcgaaaggttgtcacgagatggagactcttggttgtctaatctagggtttcaaaaagagggttgtaatcattatatttaacccatttggggtgccacgtcatcaaaactcttcgttgtctgtgcaagcgtggttatggataattgttggattgtgagaccttaggcattcccttgccacgtgtctccatcccaattaatgagggataatggtatttaaactccttgatatgaaatgatccttcatctcttttccctctcattataatttttcccctccttcttctctgatttttgaaccctccaaaaacttcctttgcattcttcctcagttttcttttttcagaaaggaaatcagaatgtttgatacctacagagtcgtttaaaggcgacctgcattttcaaggttagtggaaatttttttgcaactgcttccatttatttgtattctatgttttgagaggtagaaaatgcatgagatgataggatatgaaattttatttgattttgacaaaatatgcatttctttgggaaatatatacctgaaacttgaataattgcaattttcaggaagaacacctcgagtgttcgcatatttctcattgaatatttcgaatactcccgagttttgtgatgaatatcttgcatgcatacaattctgaatatcaaaattgacttagtaaatctgcaccttagctttcttaacccctgttagaacttaaggtttattttttagcctttaggttatatgtgcttttgttataaaaactgtttgggtcttttaaatggtgagcgtgtcgtagtaacttaatgctcatgcaaagcttcgcatgaaccttgggtcactacgatacacctatccatttgagacatacggccagctttcacttttcttgctttatagtcgcatgttgggactaactaagtttctcgaaatggtggtggtgtcccattaactcaatggtcctgcaaggaatgcatgccccttcggatactaggaaccccccagccatttcttgtggtaaacaactagtggtacatgtgcgacttacactttgggaggattggctgagttctcaaaatggtgggtgtgtcgcattaccttaattctcatgtaacgacatgattattatgctactgacatacacccatccatttcttgagatgtctagttaatcctttatattttcggagtttctttcatgcgggtgagggcactttgtcattctcccactttcaccacaatgaaaagatattctatctttcagatgagcaacttgtcagataggtaaatgctcgattctggagatggggctttcgttgatgagctgaagaagagtcatagcttcatacccacctcaatttctgaggaggaggcccctgctgcgaaagctcgctatctaataacgagatatatagaatggttcaggaactcgctgaaccagtgacggttgaaattcgctcactatctactaacaagcccaataatttttagagtatattttattttattttaataatcatttttctatataaatttcaagatacattttattttaaatgtatacatttcgaaattctaaaaattaaattaaagttaaaaatgaatttgataattaattttagatcaaattaaatcaagtaatttacattaatgatttaattaaataaatagactaaaatatattatattttaattagaaaataagt

SEQ ID NO: 122343 - DNA, 1340 bp, Cannabis sativa
tttttttttttgagaaaaagactattatattaattcagaagaattacataagagtcattagtggagatggaaaagtctccaaccaaatacaatcaacatccaccgtaagagcaaacttagccaaagtatgggcataagtattagcagatcgagaaccatgatcaatctgtgctcgtgagaaaaaggatactagatagttaatattattaagaatagcatgaaaagcagaaggaaataaatgggatgatttcaatccttggaaaactaacagtgaatcggtttctatgtaatcaactgagagattgtgcaaaagtaaccaattcaggcttagcgcaagtcctggagcctccatctcttctgccttgaaatttcctttgataggcttcgatagtgcagcaataacaaagccatcagaatccctgagaatcgctccaataccaacaatattatgttctttgtcgattacagcatctatgtttagtttgagtcttccctggggtggagctgtccatttaggtacatgagtgaactctgaggaaggccgaggatccttgacagtagacgctggttgagtagaagcttgtgtacgtttagcacgggcagcttgaaactcttgtaggtacgatggtgcatattgagcaacatcctttggtgttcggacaatattaccatgataaatagcattcctttcatgccaaatactcgaacaaagaacaagaaacagttcaaattctggtgtggaaagtgttgatgacagctgaagtaatatatcagcgccagagctgtgtccaaaagatgggaagttaatgcgcaaattagacaaatcccagacagatttcgctcttggacagaaaaacaaagcatggtttattgtttcttcacaagaattacaaatggagcagtatggtgaattggcaatatgtcttcgatagagctctgcttcaataggaagagatgtgtggaagattttccaaacaaagattctcacttttggagggagcttcagcttccaaaaatttgaccaccaatgttcaattgaactgctacatgttgagtcatcttgttcagcaagtgaaacagcaagctggtaaccagatttgacattataaatccctgtgaaggactgattccaaaccagtacatcttcatgaggaaataagcttaaaggaatggtaagtatacgatcaatgtcaggttggtcaagcaaatcccattgtctttgcccattaattaagtctgcaaccatcaaattggggtctgatcctttgaagaaatatggtttaaaggtagtgtgccctggcaaccaagagtctgttgggttttttatgccctaaataaaa

SEQ ID NO: 122344 - DNA, 1739 bp, Cannabis sativa
tcgtgtataagagtcattcattctgtgggtgtaaggacccaatggaagcttgaagcggggacgttacatagatcgccatacgtatatagattaaactgaaagtaatagataaaaagaatacgtaatgattgcctaattttgtcatgggaattagcagataattagggatttatttgaatcttctatcgttatttgcctcttagtaaataattaaggcttattattagaaataggttttagattattatttttgtaattatagagatatatttaaattctaggtgtattatatatgttatatatgaaattttatgtttttcatattttatgtctagtaacagtggaatgcaacgatttggtcattagagtcacttagatacgttatagtatcttgattttagcggggcaagagttttaaacgtttgaaatgtcgggagattttagggttatggttatggatcattttaccctaagtatttaaattacttcttagtgaagtaagggcttttaagtcttttacctttttgtctatagtgggaattatagggttttctagtaacttatttcctaagtgtttattgattaattaagcttaattataattaaagtaagtcatagttatcccttaaaccaaaaattcaaaggaaatagaaaattctcaagtctttctctatttcttcctagtcgaccataagaggacccaatccaaaccagaattctccatcatttttagaccaaatttaaagagggttagctaggaaattcataaggttcgaaggatttcaactcaaagtaagcttctccttcactttcagtttgaattttctaattaaagattaggttttcatgcaacttttggagttaagttttgtatgactttggattattttctaatgttattttaaagttaattatgttgttataagattgttgtgttggtgtttatagggtttgatcaaggtttgagctttcaagctcaagctttggtctttaatgccaaattttaattttgaactttgatgattacaattcttgttggttaatgtctattatgttgttttaggcattttggatctttatgtgtgatttggggtagatttgagttagaaatgagattttatgaaagtctgcagctataaacggcatgccatttttacaaaattggtctaccatttttagtaggcaagacccaatagagtgccattttacagaaacaatttgccttattatgggggtattttcccgaagtctcattttcgtgttttctcgatatttagggtgtcactactacaaaaagggccttctgcttcggttttaaagtgacacataaaaaaatttcttcagtttgtgtaactaatgttatagccgtagaagcaaatattgattttcttgcttcaattttgaaccgacgctaaatgttccgtcccgtctgagccaaaaaaaagttttccttcggttcataaccgaagcaaaaaatcattgcattgatgctaattggttttttttgcttcggttataaactaaagtaaaaaagtttaataaataaataaataaaatcagaaccatcacaccactacactattatacatctcacaccaccatatatacacagatttaaacaactatttaaacccaaaatgcacaagtttaaaccaccgcactaccagcaccgtaccatcaacattgcacgcgaccaccacaccaccacccatggccatcgcaccaccacaaccctaaaa

SEQ ID NO: 122345 - DNA, 635 bp, Cannabis sativa
caataacaaattttattgcgagtaaaaataagattttgtagtgaatattcatattataacatttttaattatcaactcaaactacatcaaaataaatttataatttatatacatcaatacattaagtattgatcaaatatacacgcaagtgcatataagatgcatatgcattccagtttttacccatattatatatttatatgtaattgagaagaaggcctaccatgcaagcaagtggttcacacaaagtcagaaataagttgggttgaattctcttctagcaaaatatgataaatatgtaggttgatcgtctactcccactattctctttttagtaaaatatatattattttagtaattatatattgaaatgtaccacatccacataatatattgacagtgaacgaaaaattcagcaaaatgtcatatttttttgttaaatatttctaatatgtgtccttaattattacattgtacaaattaaatgcaagcttttctctaagaaaaattaaatgcatggtatagatatatatatttatatattattgtgattggtcactaatagaggaatagacactattgactcctacattctatctgccacctaacggttttacctaactgtcagttattga

SEQ ID NO: 122346 - DNA, 867 bp, Cannabis sativa
aagtacttaactacaatccctgtgtgatcgatctcactcctgatgagtttactacttgtaatgatacgtacacttgcgtgtgcaaaatatcacaacacaacggtaaaaaggttgtctcaataagtaacgagagatgagggttactttataaaatatcagtaatggtttgtcttaataaacaaatatttgatgctgacgaatgtttacattttgttttatggttttctacttatggattaagtatgtgattatttggttatgattaagtgtggatatctttatttatatgtgtattgatatgaagtgtttaagttatttcttttcttgttgagttattgtgactcacatgtgctttgtggtacaaataagagaaagaacaaattaggacaggcatgagttaaaggtcttccccagcaaatgtatgtatcagcatattcggctagcagtgctgagttgtcagagttttgtttaagatgctttcgacttgtgtatatttgatgtaatattgtctggttatcttttgtcaaaattttaaaggtgattcccaaccctaaatagtttataatgtcaaaaaaattatattttaaataaattagtaaaatttttaattaaatcacatatttagggatgcacacggggcggggaattagtggggagtgctctccccgtccccattcccgttaaggattttattccccatcaccgcttattccctattggggacggggcagggaatcccttattgtaaaagtaaagtttattttcaaatttaaatatataaaattattaaattacataaaagataaaatattacatattatttactattcaatatagtaattattatacaaaaatacaacttaaaaa

SEQ ID NO: 122347 - DNA, 1278 bp, Cannabis sativa
ttttttatctttttattagaatgttcttatccaggtcaaggacatgggttattacattgggatcaatcccaaccatgtttgaatggacccacacaaagacatcttggttttcacgtaggatttggataagggacttttgatttcttaattgaggtgcttgccaaccttcacagttttgattagttcttctggatttagtacgatttcttcaagctcttcaataggaccaaggtcaaccttatcatcaccaatgcgaggatcaatttcctcaagctttggcacttctggttcttcaatttcctccacgacagcaatgattgttgcccccagtgaagattggagctgttcgctaaacaatcttgcaaggtgcaatttgccacaatgatattgaattacatctgtgctaatttttctgaatagtctgccattgttgttgaaataatgagttttcttaagggaaaatagtcaaatttcaccacagcggtctcagcgaaagcaccaaactattaatgtagtttttcatcaattgatctaagaagattgtaaaaataaagaggaatgtgatgtattaatttgactaaataaaattgcaataaataaaatagacaccagggatttatagtagttcaccccatgtcgcgatttgtaatggagctatgtctactttggcttttattaattagatccaacacactagagttatgttctctagggtgtgtggacaataatacaacaaaggatttctaggttaaatctcaatcgagacttatgaacacaagactcgagggagattcaatattcaaaaatctgatcaaagttggtggttgtaaggttcttggtaacaataaaccaataaaagtaagaaaagagaatggtccctattcttggaaactgtgtatgtcaatggtgtttcagttgtagaggctaggtgttgacaaaacatggaagacttaagaaaaaggtgaaggaagggatatggtgttcttggcagccgtcgtgtaagcaagtaagcaattggtcccttattatgacctattactctctttatataggcattaaggtttgttaatgatcccccacatgtcggggattcccattaacaaatctcgtattttattcccaataatgaataaacaatcacaaataaataaatttctacttatttctagactaaaatcccaataaataattattttcagctagagatgcatcaattggaaaatgagtgacaagggatgtcacctctcgacttggaattgatgacattggtgagaagtg

SEQ ID NO: 122348 - DNA, 1505 bp, Cannabis sativa
atatggtattattgaaagaagaataagtagttgaaataaagtgacaaaattgtaactagagtaggccattaagtggtcggccactagtatgtaattttatccactattttattcttttttaatccatataattaaatcctaaaccctagttgaaatactataaaagaaagatgatgctctcatctcatccaactgactattcaaccaacctaaacctggtttttattctctgacaactagtaaatgagagacaccttctatagcgatttcggccctcattgatttttcttcaccaatttttccatagtgatagagtgtcatgcccacacatagcaagtcaaatactcaatcatagtgcggaagatggtaaaataaatctcaacagttgacacattcccaagattctccacaattgactctccttcctctacaatgtactccaatatctttgttgtttaattgtggaacttcccttgcccaaatacaatacaacgcatccaattctgatctagatttaattattattattggttatatttaaaattgtcaacatgaaaagatatatatatatatatatatatggctgcatcgttggatttcgaaccttaacaagacggcgggtaaccaaagccagtaacacctcaacaatggtgtacgacaacccaactgcaaaaccttctgattgtcttcctcttcttcttctctttttcctcatcttctttagttgtaagactccagtaattccaactgatccctccaccgcccttggattctccacgtcaacaggcaatggagatgtcgatggctctaatttcggaaatctgacactggtttggtctttggaatcgttttgggttcaacatcccctttttgttttatttttttaatattttttaaatatatatataaaggagaagtatgatacggtgatgtggcgctctaaaattgtttcaaatacctatatctattttctccttaattctctcatttaattaatttttttattaagtttatattatatttattctaattaaattagataacacgttgcttttcattttttcaaaagattcttatatatttttttaaaaaattaaatctttttttattataaaatatttactttttctgttttgaaatgattatataataattacttagtctaatctctcaatttttatgtattctctttttatctatgttaagatctaatatttaatatagtatatctattttctccttaattttctcatttaattaatttttttattaagtttatattatatttattctaattaaattagataacatgttgcttttcattttttcaaaagattcttacatatttttttaaaaaaattacatctttttttatcatatagataattttttttttgaaaagattatataataattacttagtctaataattaattggcgctttttcatttttacacttcaaaatagattttttttttttttttttttgcattttttacgaaatt

SEQ ID NO: 122349 - DNA, 3941 bp, Cannabis sativa
aaatttgtctgaagtttaacatcgtcacaactcagaatatgggtcgagtctgatacatattttctcaacatggagatatgaaacacattatgcactccgaacaatgcaagagtcaaggctagctgataggctacttggcctacttactccagtattaaaaaacctaatgaatttagggtttaactacctctctatgtatctctttcataggacatacttggagaaaaacaaaaaatctcttatttggaactcgatattcctacactttaaattagtgtagctttttgtgtactcaatgaagcgatcatacaactcgaattcactctatgatttttataagttttgtggatctttttggtccattattattcttttctcacctgtattactccagtgaacatgtgtctagtaattctcttgtaccacacttatttaagtacataactaatggtatatttaattatcacccttagacaaacactccatcagtggaagagattattccaagataatctaacctttatcaaatatgcccactacatgtttctaatattccattgatcctcccaaattacccatctttcaagaataaaatatcatactattttcgctttaatctccataattctcaataactttctttaactcttaacatcatagccaaagatatcaactttgagatttcacaagattagactattccttcgtatgaattccatatcctcatttattgtataaattgtctacattaatagacagtatattaactcaatatgtccaactattactactcggtcgaaatcataagatcccatagtacataattcataattatgtctttctatttctcctacgggacctcctaagctgacctactgacttaacttaataacaagttaagaattcatttctgatagatattcaattagagcacttcttatttttactcactaacatatactcatctcgataccttataaatctttacttgttaacgcatcccttcctcttgataatctctggaacaactatcgattctgcatccttatatgaatctttctagcatactttgtcctcattcgtatgcttttcgagatgacttcccgaaagatttcccatcttgagattaccccaagttaagtatgcttaactccaaggtaagctcatggtgggttatcagatagtagatgcttctttgttcctaattgtattttctactttcattccttcgttaattaaatctaattttcatcaatcccttcattaacctcttacaattcctcatcagttttgttcacttaaacttgaggaatccctaccttattatcaacttgaatcttcttcatctccacttattttaacttgcattaatttctcttgaactgacacaacttttaaatttcccaatcacttacagttaaccactattataaagtacaataatgtaacctatacgatagaggcaacattgttcttaccaggtacccataactaaactagaaatacccatttcctgaattctcaactaataacaattaattagagatcattccttgaccttgaagttttgtttctgtatttggtagaagtcttaaaaatcttttcaaacacatccaaagatatacgtacctcaagtatattctctattttattgacaatcccttggcatgaactaccatgccaacttatagtgagtctcccattgatgatgctaattcatcaacatctaagactctcatatacttttcccgtcattaccactaaggttttaatccctggttcatacgccaccattgctcctttacaatcatcacatcttcatatttggttaacccctctaaaacttattttacagtcaattatatagttcgttgtttaataaacaacctactttgtaaccacttgaatacatgcccattaaattgcatcccaatttttaaaattttcacattctgggtgagcataccctttcatcattacttaataagataatcttttcttgtaattttaatagtcacctcatataccagattgaccatctggtcaaatataaaagcattctccatcattaccatatcaccctgaataatttaggtaatcttctttaccttaatgataccactactctccttaacattctgttatatgttacctttgtaacgttcatacttcgcctccattgggctttctccacacggactattggcttttatatacaagtacgccattttggccactttccggatcgatgactgacatttcaggccaacctgagtattcccaacgtgctttgttctgactcgcaagttttttgggaaaacttcctgaaatgaaatcaccccaagtcaagaacacctaattgtaaagttctttcgtaataggctaccaaaaacaagatacaccttgctattataggtattctcaatccacccattcaagtcccctacaactatgtagtcccatacctacatagtctctgaatcatcatatacgaccttctcctaggcgatgtgggattgtatagctcccagtctattccttgtagatcatagggctctgagtgtcgcagtttgactcatgtcccctttgatctcatttttcccttagtagtaaatagattaaccgacataattgtctcctttaattcacttaggatttcggacaatactcataaatcgtcccacctttactaatactagatcacttctaaacaaaagattcttttctctgaatcaattaaatggatgccttcattggctactcatgtcctatattccacttaggaatactagtaaatttaactcatattgtcatttccctaatctgtctaccccgtcaaatgagttaccactaactgacatacatgcacaatccatttagatcttttgatgtcctctcattgagtgtacaatgtttaatattgatatcaattgaaacaacaattgtaatatttcccataaaattctaacttgagtcgaccgaaggaccgatacctgagtccccttgagtcataacccgcacttggacaggacccgtacacttttcttctttaacatcagtctttcttaactgcgagcaagttctttttagatgacccactaccccacaataaaacaagatctggctctacattggctcaaatggtggtttttttgcatcttgaacactcaggataaggtcgccatttcttattctcaccttgaccgctatcctggtcaccctagaaccttttgttttgtcccataattggttgttcattcagttttcaccttctgatttcctcgtaagttggttccatgagtttcgccacatctagtgatacaacagaaagtgttggtggtacaggaatagacacaagtcgaacctgttctctcatatgtcaaatctttttccccttgttgtctaatcatatattgcatggcaaaatttacatgttcccagtgttgcaccaataaaggattctcttccttatcatttgccccgagcccaaacaactcgctaattagactattcgattgcccttccacttactacataacttatcacacagttaatctgcatcttccaagtatttagaactcagacagatatcaatatcaatatgtattttccatacacatattcttatcataatcatcactatactactttttccaacatacttgataagagtctaggcagtaatccaataacaaataatataaacacttactagaccacgagtcgatctttcttcataacaaatgtatggtctttaggacctttaaaactatggctgctctgatactaagttgtaacaccatatcccatagggacgctacatgtgtaattttataaactagtttaatactaatagattaattaattattaaaaatagtgataatattaaaaacttgactaaaatacaacactaaaaacggacattataacggcataaaaa

SEQ ID NO: 122350 - DNA, 1234 bp, Cannabis sativa
agcttggtgaaaacagagaaggaacatatggttgtgcagctaaggaatcatttccatggaaggaaaatctctttcaaaattgacttacattaatccaacttctttaaccaacaaataaaatatgtgtttgtgtccgtacaaccgttttgtgttcttgacttagtttctcttgtctaaattaatcgatagttagtatcttagtgacacccctatatataggctaattataatatttagcctcctaatttttccatgtatcaaataatgactttttaggctcttaaaaattcgtaaaattgaacggaaatttgacagaaatttttaaattcaataattttgaaaaatatgatttaatacatgttaaagttgcgggatcaaaatcttaattagtttatgtataattattagacattatataaaagaagaggtattcgcgatgtaggtggtgccaatttagactattttttcaaactaaatcgcatatgcagtttttataatttcttaaaccgcaattgcaccgtaagactttaaaattacaaaaaccacactccaacaatatccatacgaacttcccgacgatttaaaactatcacctatgcttaggtataggtgacggttataaaccgtgccatatagtacatgtgacgattttcaattttaaaatgtatttttttagcaataattttttactgtcattacattggaaaaatagaagacatatatagattttctgccatttttcccttggcattaatttttaaatttttttataattctatataataacaataattacactaatgctgattatctaaatttctttacaaatttatatagtaacaataaataaattaacactaataagcatctaaaattatttacaaatctatatactaacaataaattgagatatatacactaatcaacatggtagtcgttgtcgctctactcccgctttcacgttattaatccaccaatcacgcataacatttatctggtcatttgtgtacgatatggagagcttaccctgtacaataaaagtatatattaattagtaaagatttattattatacgataaaaaatatttattataataattattaattattttaccagttgtgtcaattagagtattgaatcttctacggtcatgaaactttcaataaattttacgacgtagtatccacattatttttcatctggttgttctggatatatcggagttatccactc

SEQ ID NO: 122351 - DNA, 1507 bp, Cannabis sativa
tttggaaaatacagagtccattttgtcatttaacaaaacagaaggtccaatctttaatttttgcaaaacacaaaatctaaaatgatatttaccctttctataacgatatatacactcattttatatgtataattaaagattttaattatatgtgtattttgctgttgtttaaataattgttgtcaatatatataagttcattgtatgaatataccgtagtggcaaattagtagagtcaaaatgattttgcactacaataatataatagagagttgaataattactttaattattgtgaagtacagagatgatacattatagaaaaagagtagttttatcgtcgaaagattttatcgtctaaaatttcttcaaatttatttatttattttttttaaacctatatttttttttttattttcttatatttgatctttttttaatcctaaatttattatttcttcaagtcatgtttggttagtattttttaaaaacaatatctatatataatctcttataaatttgttgcataaaattaatttcatttatccaacatgcacgattctatcactactacactactattattctacaagaagttcaggtactatattttcaattttttttagtttataattaaattgtgattatttttattcaattttattaattatttttataaatcgttatattagtttaatattttattatcatataccgtttgacaatatttctttcacaaattaaatgataagtttttttttacaaatttgtcaattttttttcgagatctctattctcggtgaagattttttaatttctaatcttttttatttctattttagttttagtttagtcttttattatcctatatcgtttcacaatagatttgtcattattttgttgagatctctattctccgcaaaaatttctcaatttctaatatttttttatctttaagttggttttagtttaatcttttatttgtcaaattatatcgtttgactaattattatattattctttcttcattttatgtatactaaaatatacttttaatagtatattaaaaaaaattgaagagtgtaaaattaaacatagtctaaaattaattctttaaaatgatatttttattagttatcattaccaactctatacctttttatttaaaatatttatttaaataaattttaatattttaatacttttgtatgttagttaattatttttgtggatttttcagtcttctctaaataaaaaatataatctttaaatgctaataaaatattaaattttattagttactttttaaatttcttactaattattttataatgatattaataaagtctctccaaacatatttatttattttctctttttttttttctttcaaatatttctacacacatatctatatctatatactagcaaaaaactacgtgcgaggcacgtatattaaattttatgctaggttttttttatgttatttgaaagtgagattattatt

SEQ ID NO: 122352 - DNA, 1611 bp, Cannabis sativa
tatagacattacaacaagagattggtctgaagtcagcaacactctttgggcaagtcagtttggggataagagtgatggtggtagcattgatctcctttaagattttccctgagttcaggaatgaaagcactgcctcctccacttcagatcccacaagttgccagttatcctggaaaaaagcactcccaaatccatcaggaccaggggacttgataccagggatagcaaagagagcttccttcacttctgagggtgtataatctgctatcaagattcatttatggctttcattgatcttagggccgagatcaatgatactctgattgacattcctcctttgctccatagacttacccaacaacccaatatagtactcaagaaaggctttctgaacactatatgagttatcacaccagttcccattctcatcttcaatagaaaaaaaatctattatgggttcttctagcttttattgaagcatgaaacaatgctgaattttcatccccatactttagccaagacatctttgccttctgtgaaaggaagagtgaataggctttgtgtacttctgtatagttcctgcatgcttcctgctcatatttcattttttcctcattaagaggatctgtacttagctgcttttgagcctcctctattttctcagctttgtgtattttcgagaacccctctttattgatgtcttggaatacctgctttaaccgtctcagtttagtgacaattcaaaacattttagatcccatagtcgcctgattccaactcttagtaacttgctcatcataccctggtgccaatctccacatgttgaaatatctaaagggcttattcccaaagctcctatctaagtatattgatacaagaatagggtcgtgataaaaaacacccttaggaaggaatacagctgaaaggactggatatcaagtattggggggaaacttctctcttcaagattgtcagtcaaattggtgacccgttgcaagtggacaatatcacaaaaaacagagaacgacttcaatatccaaggattcttgtacaggttagcctatcacaggaattccctagctcgatttcttttactgatgaatttaatcatgatattgatttggaggttaaatatgaatggatcccccttgtgtgctatcattctactggtattggtcatgagacaaataactgcaggaagaaagagatagtggaggagaaggggaagcatgtttgggttccaaaacaaaaacaaagtaaggaaaaagaggggattgatgaagatggctttcagaaggtgactaaggggaagaaagttgtggtggaagaggaggtgactccaaccgaagtaaggaacatgtttgattcactagcggagcaaaattatattggagggggggagattcctctacctccaatggataggctgctttgttggaacgtaagggggattaacagtcaacataaatatcaagaaatcaagcaattgattcaatctaagcaagttggcttggttagtctccttgaaacgaaggtacagaataaaaatatggggaaagtatatgctagtcttttttcgggttggtgtttttcgaataacaattcatggtt

SEQ ID NO: 122353 - DNA, 2341 bp, Cannabis sativa
  modified_base (644)..(646): a, c, t, g, unknown or other
  modified_base (1131)..(1139): a, c, t, g, unknown or other
  modified_base (1262)..(1264): a, c, t, g, unknown or other
gagaaatatttggtggatatgcagttcaaagattattaagttgaattttaaattgtatcaaaacttacctccctagaaatttagatagtatactgatgaaagtgaaaggctatgattagttactagtagctgcctgagtccttctagggaaataccctagtgataggaaaatttcagaatgatgaaatggttgtatacttagtgtaaatcattactagattcatggatgtcctgatcataaacttaagaaaagcaagaactgttaactaaggtttgcatgtttgatagctattctaagtgatcatgggtggaccatcctatggtcattaagataataaaatgttttttttttcaacaaatactacttttctaagaatctgactaagtttgaaaccaaagtagcaaagtaaaggagatattttattccaaagtgttctatcatcttattgtatataagatggtttcattgcctctgttgcattgacacaaacgatgaggtcaataacacttaagttcttagacagaaagtcatggtaccttatcgtagtgggagggtttcaaggaactcaccatgttatgacttggaagacacttgtgattaaaatccatttttagttttaaaaagtaatggatagtcagaatannnaactaagaagcaaagccaagagaattattgctaaaatcattcatataatgtaaccaaaagttttctattacgaagacaagaagggaaattttgaaaataattctattcaattgacttaacaaaactttccaatcctagtacattaagtttgagatttcctttagtaaggtgttagagcatttttctaatggctaactctataggaactctagttcaagtgacttcctttagtaaggtgttagagcatttttctaatggctaactctataggaagtcttttggctcatagacatatattttatttatctaaggaaaagttttaactattctagaaaagataccgccaaggaaataattccttaagaatcaacagtgagaggtctcatgtatgctcttatatgcattagactagacacctgatgttgagtgggagttataagtaggtatcagattaatccaataaaggaacattggaagacaatcannnnnnnnntaagatcaagaagaggaactatacgttagttgacaagggtggtattttaatactcttagactacactgaaatcaaatttctagacttgcgttactgctggaaagtctactgatgagatggtgnnnactctgggggtggagcaatgattttggagaagtataaaaacctatctgaaatctctaactctactagtgaaactgaatgttaaagttgcatgaacgatacttattcagcctatggaaatttctatacagttttttggtaatgtaccaataatgaattaactactagtgctacttcctgaatagcacagaagtggttaccaaaagtaaagaatccagtatccaaagaggaataaacatatagagacgaatttcataaattgtcagattctattactgagataatactacatactacacttgatctggatatcatagtgttgagattaatttaaatgaacttttagtttcatattgaagcaagtgagactttgttgggttttgtgccctaaataaaagctatttcaatataattagatttactaattaatgaaagactaaaaatcgtattatgttgcatggttcacatgatttatgtaatatcctcaggtttgttaaatcatattagtaaccctaactagattaattatgtattaatgagaaattatattattatattatttaatatgtgaaaatatattaatatattgaattttaagaccctgttagagtgttactggaatttttgtaatattagcccgagaagggtaaaattgtaattttatgatatatcgagcttatggataatattattatatagtatgtttattctgtctatctataggtattttttgacaagccagtgcggtatagtcacaatcgaatattttgggccgaattgggttcggggctccaaatatatttttgggatttatttaaggtattgttttgataaatgggaaaatttgaattgatgtgttatgtgtgtgattgaaataactataatgcccttgattatatagatatgattatatttggtcctatgggcattttggtcatttgaccacttaaagcatttttcaacaaaattattttttagaaattaaataattcattttctggttatggatacccctagctgacctctctctctctctctctcttttcctcttccaatttcgaaataccttgagtgataga

SEQ ID NO: 122354 - DNA, 3224 bp, Cannabis sativa
tgagagaggggttgaattgttataacatcttgatcaaacctttttgacgaaaaagagataaaacaactataatttttgatcaaaaacctatctgacgagagtagaaaattaaaagtaataaatgagatataactcataactcatgtataaactgaatgttaacggttcgcgcgagctaggaaggtgttaaacgagacattaagacgtattgataaaagcacttgaacctagaaaatagatagataatctaactattcatatgagcaaattaaaaatatacaaagtgataaaattattaaaagtatattcaagtttgcttaaggcagattataactgccatagcgaggtagaattgacaactgctcgaaaatcaaaaaagtttggtagataactaactacttaaataggaagagtacgagcaatagaagaacccaaaagtactgtacatttgatcaaaatatagctatttacattgtgaataaaaacgcaagcaaacatagttgtattaagttcgaatgaaaagagtacaaggcatttaagataaaaaaaaaaatccccaagtagggttacaaacttaaatgccactaggggcaaactattaaattcatcttcctaaaataaagcatgagggatcagtaaactcgagaaagaccgtcttcatatagctcggagaaagaccgtctacacatagcttggagaaagaccgactacagataactcgagaaagaccgtctacatgtagaaggtcttgacctctacatagacctcattctccacatcagaggatcccatttcctgcagccgagacctcattcccagcctcaggaaatttctcgataccagagagaggttggcacaaaggtcttctggtgcaggtttgggtcttgggttgcttggattctttgataaaaaccacgccaactttcctcctagattcacccaaaaacacgccaactttctcctttgattccttgtcagcctgagcaggacctctaggatcactcgcaagatctatgtccatttctgtaaaaaaaacaagggatcattggagcaaaaaaaaaaaaaatagagtccagttcagaccgccatttacaagggctaatactcactctcaataatcacttgtgaggatcacccataataatcaacggggttccttcggtttggattgatcggaagctcctcagccttggaatccttcgttcccaattcaaattgagatttgaagttcctaagaacgtatagaaaagagaggtggttagcaattttggtgttatgaatctagaggaacaaatttatgaactcaaataggcatcttgacgagagaataacgatccaatctcaaaatggatctcaccaaaaaaccagaagtgtgtggaatatggcaagcttaagccaccattttatacacaaagtccaatgaaaaaaaggccaaaggattgggaaatctaacggttgggagtggggcagaagatgagaagatggctcataataaccctcgataccgtacaaccgccagaatcaaaggacgcgtttttccaaaaagggattatgacgtaaataccctctgtaattattaaaaattactttttactaaaatgaactttttaaggggcgatttttatacccaaaattcggctactatctcagtagaagacatgtgtcaagataaagggaatacggatcgatgatgtcacttttagtggaataactcatcaactgcgtaagtagcagagtatattcacaacccgctgactgtaaagttttatgcgaggtagcaagtacgttacatctagaaagacgaaagcgaggcataatatcgactgcgaaaacactttgtacataacgtacaaactaagtataacagtcaggttggctcgagacccaataagcgaggtgtctatcttgctatgggaagattcattcctgtaaactcccctagttgacttcagacatcttctcagtgaggcttacaatcctgacgagtcagaagctaacattcaaacgagcctcgaagaactctttgttaataagaactgcgatcgtcacaaggaagtaacaaggcatacttcattgacctcggaaggataaagaaaaaggcttcatctcgctattacggtcactagaaccaagcccctgtcgagactttttcggacgtaacaattaaagacatgttaaaatacacgatcatgttgacccaataaaagcaggaaaatcaaagctatatgattttcaaataataactgcatttacactacgtgatatgtaatcaaatcccatgactttaggggattattgttgtaaaaagattacagtcaactttgtaattaactgcctactatgtaattataagtagtggcaagtaagatcaaaaaggggatgaaaaaatcatacgaaagaggccctgagaaaactatcagaaatctgaataagattgactcgtggactatatcgaatgttaactgcaaaaccacgtaaaaaatcctgtgtgttcatactttttattttatagcttttattttttttgtgtgagattgtcaatgttaggctcaaatttggttaacgaaaatctgcgtgaacagatataatagaatttatcaaacatatgatcatgaaagtaacatgttcaagcaatatataaaataataataaattaatttctgatcttttattaaataataaaataagattacaatgaagttgagttttctttagagcataaaactctaacaaggtggtcgtacatccgacatgtccttgacactactacaaaaagggtcatacatgaccattaaagttggtcgtgaaagctctttcacgtccacttgggtctggcatgtaacacattgatattaaagatgtatttttcatatccaacaatgttgaacatgaaaaatatatcatgtcttgtaaagctagatgtgagaaagggtcccactacttgtacctcttttgcatgtagttttattagacatgcaatgtaataatattttatgtctggcattaagttattgtttttgtttttgaatttcaatattaaaagtttaaatatttagtttatattaattatttaaattttaaaaaattacaaaaaaaaattattaaaatatttgatagaacaataaaaaatacactatagaaaaccactacaaattctcttaaaaaaatctactagaaattcataattgaaattacaactgtttacccaaattttaacgacgatg

SEQ ID NO: 122355 - DNA, 5030 bp, Cannabis sativa
aacaccttatccattccaacgctaaagcttgagacaatctccaaattggggaatgtgctgattgtattagcatcggcaccggtaccggagaatgagttttcgatgatggctcggattgactcagcgttttcctttatgaatcgggtcttgttgggtaaggtccatagcttgaagagattgaagcacttcttgagctcagtctcgagataagagttcatggggatgggcatcagaacacctatggactccatagttagggttttgaggaccaagtctgactcgtgaatcgtaactcagttatgtctcaacgatgaagagagaatgaaaaaggaatgaaaatttctactagtttactttaatagggtgaacccttatttatacaagaataagactaaatgaatgagaaactaaatcaatataataaagtaaaatacaatcaagcatttatggagataattaatttgataatttagatatctattaataatattctataacactcccccttagatgtccataataattgcttcatcaaaaaccttcccagaaagcctagtacggacaaaactcggtcaaggaaaaagagtgcagtgtgaaataactctcctttttagatatttgtggagatcttctaatcgatgaatttcgatcttatatatcgtcttctcaaataatgatgttgataataattttgtgaatacatttgcaagattgtcacttgatcaaatttgttgaacattagtcgatgtcaccactctcttgaatatcgtctgtaaagaagaattgatgaaatgggttcaactctatctccttcaatgtacatttttttagttgagcaatgcaagcagtattatcttcatagtgaattgttcgtacttttttattaagtgtaattcatatgtactcaaccaatgatctcatcagtcgcacacattctctacttgctcatgaattgcaagtatctcaacatgatttaaaattacatcattaaattttatcaggaaaacccatgcagtggaataaaacctgagctaaggagaaaataatgcaatacatacatgcattctcttcatacatatatttataattattttgcacgttgtctcgttaaaaaccttgctagaaaaactcagtgagacaaaacctaaactaaggggaaaagagtgcttcatgaatatacctccccctaatgcacatatgatccacaattattttggtgataatatatctcatatgattattgttatcacttttaaaatatcatcatatattatatatctatgaccatacatttactataactcttccagagtatgtatgatcttctaaattatgaacgaggcgttcctaaaatatcaatatttatctaatttatcgaatcatccatgtatgtgtatatacaacattgttcatacctgttgacccaaaaaattgatcaactaacggcggggtcgtatagatctaatgtttgccacgtgttacacaattagaacaagaaagtgaagaacatgtagaattattatagaggtttggcccctttgatagcgggtaatgacctacttcccttttacttgtattgataccaagggttaatattatccagatcactatatataggtgggatctgatatatcacccttaaggctacaaagtagaaattgaggttggcaaatctcaagtgttgagaatgctatgggcgtgtgagagagtgaggaatagagttatcagacttaggcttagaacatggagggttagatacttagttaaggcttaattctcacttaggttctctagagggctgaacccatcaaatgccattctcccaggatttttgcatcgttttgatgatctaagctttccacattcttcctcagcagtttcttgtagtgggtaagctttctattcctactatatttcacttcatatttggttatttttgccatgaatgcatgaacattattatttgctttgaatatccatcgattcctacgttagattgttgtccttttagtattttgatctacttgatagccttaggatatgtaatgtgtgatttctcacattcgattttggaactttttcttattagtttgtctatccaaaagcaacactatttttggtttgtgccactccaaagctggagaaacttgtttgtgcaattggttgtctggaagcaccttatttgtatattgttggagttgtgagcatgctttttggaggataaatctgcagttggtggttggtgatggaagtacatcataagcttcagcataagcatcttccaaattaataaatccttagactctagataagaagtcaaaaaagaatctactcttttccgttgatgttcttcccttagtaaagatcctacagttattcctaatgttagagccaccatctttatatcatcggtaacctttgtctttgcagcaacatccaatcatacgttgaatgtacttcttaaggctttaacttggcttttgcttgatatttgctgaagaactaacctctaggtcgaagtcgtttgttgttataaattattttttaaacattatctgcagatccttctaattacgacagataagggagataatcttttccaccagtcttccacagacttggacagagttaaagaaaaacaaaggcatttcgcatcattactttcctttgccactagcatcattcttgtgtatttggataaatggccccaaggtccgttcttccttcataaaactccattttcggcattttgaagtgcttcaacagctgtacttctatgattattttcacacatggtccgtgtcttcatctttcgagtcagacatagctccatttttcttctaggagatgcgctctgtgattttagttagctctttaatcttacatacgagatgatgggtagctgtgtcttgagactctcttccacgtattcagtcattgatgtgatttctcgagccatctccacgaggtctgcctttctcgtttctagctttttcccacttagcattcagtcatgctcggagatcgtttgttgagagacgtccactttcattatctgatattggatgaacttcttccacatcatcactctggatagtagaattcttaggataatttctatctttcttgatggaagagttttgtgcttgtgcatgagacttttccttatgcgtagttctgcctctagaatcaatctagagaccctgccctgaagcattggttgctttctttttcttatgaggttgattggcggggtttgctctcttatgccgatcactaggaggaaattttttggaggtttctcctattttttctttccctttatccttaggaggattacaggagtcaggatctttaggatttattttcccaacagtattcccttgaggatcggtataatcaggtatacttccatcaggattctgattttttcctccaaatatcccttccaacattacaaatttctccaacatcatttgagaaaattcttcttgtgctacctatttttgttcagtttcttctagttttttggccatcctaacaactttaagatctgactcagggtgctcatctccctcattgacatcattgtcttctagatctataggatctgagtccttaaacttgtcttcttcttctccttcatcgataggatcatcatgaaggtgtttctcatcacgctaatctttccctttttggcgactggtcacctcagtgggatctttgtcgagcctagttttggtatttagataagcatcatcttggtaatgaagaccaaattttattcgagtgagtaccataattactaaacataatcttagatggcaccactgctttttctcggctctcaatgaaagcgccaaattatttatcgagttttttgaagaactaattattaaatatgaatgttaaagaatataatttagagagaaatatatgaagaaaacactcagagtttttacgtagttggggcattaacgagccttagtccatgagtcaatattattaagtattttgctagaaaagtttaagggattatagtaagtatgagcactttattctttccctgagcaagtatctacgaattttcaatcctttgtgtgaaggatttagtgggtatttatagtgttatagaggtcatactagttacccttttcccttaataagaagtttacaaataatacattaactttgggcttctctagtgaagcgcaatccagtcatcattctatgggtgtaagggtgccctaatggaggctcaaagtgggaaattataaaatagtatcaaacccttaactcagccgcaagtgtggtcgacgaggacgtcagacccccaaagggggatgattgtaatagtcagagactcgtgatccgaaagggaaagaccaggagctgtacaatcccacgtcgtttagggaaggtcatatgtgataagtgttaggtatgggactacatagttaaatagggtttaaatggattgattggtactacctatattaacaaggtacatcttattttttggtagcctatcacgaaagaactccacggttaagcgtgcttggcctagggtaatttaaagatgggtgacctcctaggaagtgtgcgagtgaggacaaagcaagctagaaacactcgtattggtttgtaggatctaaagtgacgtactcatgtataagagtcatcattctgtgggtgtaagggcccaatggaggcttgaagcggggatattacaaaatagtatcagagccttaccccagccaaaagtttggtggacggggatgttggacccccaaaggggggtgattgtcatagtcagagacccatgatccaaagggaaaagactgggagctgtacaatcccacgtcacctggggaaggtcatgtgtgatgattttgagactgtataggtataggactacgtagttgaagggggcttaaatgcattgattagtactacctatatcaacaaggtgtatcttgttttttggtagcccatcacgtgcttgacctggggtaatttcaagatgggtg

SEQ ID NO: 122356 - DNA, 1141 bp, Cannabis sativa
ccaattccaatttgttcaacaataaaagcttaattaagtactagtaagtatagtatcccatctaaatatccattaatgaaactaagctaaagtctaatacacatatatctgaataaagattactatagagagaccaattagacagtatacacctaatataatactataaaatatattgtgcctaatataacacaaaacagtcgtagattaggagacctcaaagaactaccaaataaagattaatcaagctattgaaagtcaaatcaatacccttatacaaataggtaatttcatctttgaaccactaaatagcttggtaggagtaaatttatgaacaataataaaaatgcaaaaagtgttatctattcttatagaagtactctcgcaaaatttaattatgtatttattgggccaaaactattctctcaaatctaagctatataatattagtagagtaatttattttttcctaaaatctcattctacccctcctatttgaacaactctctctctctctctcgcacacgaaggagcacacaatcagaccactcacacgactcacgacttacgaaccacctcaacctcacgaccacaccacccacatgacccatggaccaccgcgaccacaccacccaacgctgacaatatgttcgtcaaagtaaacactaattttttatgaatttttaactgcaatcgttttatttttttcatgatttaggttaaactaatttaatttaaggttaggtctatgtttttagtcatttttagaggaaaatatgtaatttttgcagtttttaggctcggatctgtattttagagggaatttgtgatttttgcctgataatataaggctcgatggtaggttaatgttgaagaagttgaaggttgaagaaaatagcccgataagtttggtataaagtccaataatgggcacgatggtcctcataattttaattttttttgtaaaatccgatataagacccgataagcatgatatcaataagataatatcggataccacttattttagtttaaaaaagattataaaaaatcgttaattattttatctaggatgttaggcaacttgatggctagtaaaaatgctccaaaaatatatatatatatttatatatctattcta

SEQ ID NO: 122357 - DNA, 1378 bp, Cannabis sativa
tgatttttgcattcttcaacacatcgaaaatagtgattaggacggttgatttttgcattcttcaacacattgaaaatggtcactaattgattggggctttgattggatcaggttggccaatgtatttagttattttcaataatccaatatacaagtttacaaattaatacaatttatttaggttaattcaattatattaaataagtgatttaattaattgaacctaataaacatcttatttgctatatatggactttgttgtgaaatactaaacttaattagtttgctatataaaaaaacatataaggataatttcaaccaatcttcctctatttccatcaattaaatgagaacacatcaagaaaaaaattagtagaaaaccatatatatatatacccacaattatgaaattagatatgtcttcatcttatattatttcattcataaatctaacctaagtttaagcttcatatatgttttaaatctaattttgaagagtcgtatggtatatgttaataaaaggatgcatggcgtttgattgtaaagtagtgatggaggaatgttgactgttaagtactatttggctgtaattaataattaattaatgaataaattaattatagttagagtcccatcacttgccccttgaaaagagccctaatataaatacatgtagtatatagaagaagaagaagaagaagaaaaaaaaaacaaggaagaaagttttgaaagatggaacaggacatcaaacctgagattaatacttcttctcacgtcactatcaaagttcaaatgcaggtcattttaattattatattttatctaaactttattaattatatatatatagttataaatttgttgactaattaattttgatatttatatatgtatagaatgatttaggagaagtgatattcagagttaacagaaatgttatgctgagagaggtaatggattcattttgtcttaaaatggggtatgattttggcacaattcgattcacctttgacggtgctcgtattacacctcaccaaactcctcaccaggtcactctttcaatctcttctatctaacgaaaataattagtttaacggttttttttttaaatgaacacttttaaattaatgggttttttcatctttacattttaaaacatttttttttttttttttgtatgattacagaattctacataaaaacacatattgcaactggtgctgcagcttaaattgtaacaaaatattgtatagaaactcttattagcgctgcaaccactttagaaacccaaaccataaatttaaaaaaaaaaattatataggataattctccttaaattaattaattaattaattatttttctacatttaaattagac

SEQ ID NO: 122358 - DNA, 988 bp, Cannabis sativa
taaaataatttccaacagaccatgtccttgaatttcttgttggattgaatgaatcttatagtttagctcaatctcaagtgttgatgcaggatcctcttcctagcatcaacaaagcttttgcttctatcattcaagaggaaagacaatgtggtatcactgttgttcatgttgatgttgagaaacctatccctcctccaagtggtgagtttgtaggaggtattcaatcacaaagacaagaactcatctgcactcattgtggtattagtggacacaccatggccaaatgttacaggcttaatggatatccacctggccataaactccataacagattttcaaataaaggaaatggttcgaatcagaccaagaactcacaggggaatgctattgcgaatctttttggaactaatgatgatgttgttgaggataactctggaggaactcaagatccttttcctaatctatcaccaaaccagtgccagcagctcatagccttcttagctcaaaaattccaaaatgataactcctctaccccacaaacccaaccaggtagtgtctaatttttatggtaagaataatctcatccctaacaatcagtggatcattgatactggactacacatcatgtgtgtccccatcttgagttatttcataacactaagtctaattcatcattatctgatgttattctacatgatgggactaccaaaaaaatatcttgttggatccatttctatttcactcatattttattaacaaatattctttatgtgcctaatttcaagtatagcttattttctgtcacaactttaatgtcctctccacaaatgttcattcatttctcttaatgattgttgtgtcattcaggacaccaagaagaactagaggattggtgtaatgaccgctctagtaatttagattagtaagggcaattagcactaattttttattattttattattatatgtaaattaatttaattgtggac

SEQ ID NO: 122359 - DNA, 1429 bp, Cannabis sativa
gtagttctcgttggcctttagagtaatgaacttggtactatacttttggatgctaaaacttttcaatattgaatatctgccactcccttttgtccacttgacctaagacaaaataattactctccaaattgagttgctcagcaacattgtggtacatatttcttttttagaatttaggatattggttatagtttgtggtcaatcatgtaggattaggttggtgaggtcacgtgcatttgcttttgaagtgatttttcgtctcactgtgttggagctttgaggctgtcatatctatggttgcgaaaaattaacgcaaacaaattattcttctctaatttttttttttacaaaggggttaatccattctcaacgttgtgtagtcttcattcctgagacgagtgaaccccttaaataagtttctgcccactaatttcttatatcgaatgttgtttgacaccattcattatttgttagttgaagcctatcgatgacatctaaccatttttctttaaattcttcctccatgtagtagttgtacatcaaatctttaaaagttataagaaaatcggatctttaaccttttttgtagaatttgtattgagatgccaggagcatagaagatgtgtaacatctggcatgtgttccatgatggcttgtttcatggccacatctgggtcattatctacaacatttggcggcttatgtcggcattcaagaacttttttaagtagccaagaataggatgcaagcttctcgtggaggaggagaacaaacccaaaaatgaatgtgtaaatggtggttgacgccaatgacaacagtgagaggcttatcgtattcatttgtcatgtaggttgtattagaccctagtacatccctaaaagccacatagtccaaacgttagtttccatctgcccaaaataacttagccaatcaattgtccttgtccacctaatagaaaacaaagatatttggatccttctccgagagacaatcaggaaatcataatgccccttctgagtcgtctctatctttcttctcgcttggcactggcaaccctattgtacacatatcacagttgacaccagtgagtgtcaaaatttgaagagggagattgaattcctcataaggaagaacaatcccacctgtgttgctatgtgcaaaacaacaaaactgaggcttaaagtgccaagaacggagacccaatgccaccactagtgacaagacagttagggtcatcattggtggacttcatattataggcgagaccagcagctagggagcgctatgctcggactctttgtcacgagcctaaaagcgacatcctggcagtcaaagaaaggggctctaagaaatcgaagcttagagagcccacgatctctttcacagaaggagatgctgctcaagttggtttctgttgggttttgtgccc

SEQ ID NO: 122360 - DNA, 1085 bp, Cannabis sativa
taattctatgagttttatttaaagagaatcatattgctttatgagtgcttaattgattaacattgaatagagatatcttgttagttaattaaagtaaaatctattatcactcagagagattaatagattatattagaattcttaaaactacaagttatagagaaaattgagataattagtaaagtgagattcatagtttaaaatagagaaatcaattctctagatttttattttctaattaaaaatcattgtttgtctaattatttttcagttatttttttatttcattcttaatcattatttactttgtattcagtaattgaagtataaaattaaaaaaatataataattagtgaaatttaataatcaatctttgtgggttcgacaacctttttagtattaaaattttactataactacgatgtacgcttgcagtaaaaactacaggttaagaaagaaattttgcaacattgaaagaagggaaaaaacttatatcatgatgtggtaggatctaagaaatgtagtgtttaacttaaaggaaaagatagctcgaaagaagcaaagttgaagtaggaaaagagtgcagagcagaactcggacaataaaggagcatagctctagaaataaaggaggagaacttgcaaaataaaaaatagagcttgaaaagttcgaaaaggggaaagaggaaacacgctaagaaatacatgagaacttatcaacgtggaccaatcagaacgagagaaaagagaaggtacaacgatcattcctacctataaatagaagacccccatcatttgaaaaagagaacaaattcttgctcacatctaactagtcaagactctgtctgaatacatcatcaagatcattttgagcttgaaaaatagtcaaactagaaaaaaccactgtaattgagagggaattgtgtaaattgctagagtatacaaactttaaatgagttgattattatgatgtaaaaaatcttatgttgtaatagttgagctatttttcaacatcaacacactataggtgtagaattaatcaactataaaagtcaattttttttttaatttttattgaaagtatat

SEQ ID NO: 122361 - DNA, 626 bp, Cannabis sativa
  modified_base (562)..(570): a, c, t, g, unknown or other
aaaagccatataaagtgtccatagttaattatgccatatttatcataaaaggtttaaaaaacccatactccacgtaaattctacataataatattacacctaaaaataatactaaacactaataatattttttaacatttctcatataatataatataagctatacgaattcaaaaagaaaagattgataagaaagaatctatgtatagggtttgtcattgtgtggctaattaatgcgcctaatctagtctagactctagagaataaactaaagtgctatatatatatatatatatgtatattctagagaagatgtaaaagctatattatatttaataaaaaaattaattttgtgttgtaatagttataaaacttaatacaaaatttgattttaaaaaaataataattttatcattaattctttttttattttattacaataaacaattgaaaagaagaaagagtaattcattgattggtataaattttgcatcataattaatgttatattaaaatcatattatttttttgagcattgctattaggcaccagtgatgcctannnnnnnnncgacatgtcacgttgcgattggctagcgatactcactaaaaactattatattaaat

SEQ ID NO: 122362 - DNA, 740 bp, Cannabis sativa
aaaatagttgactaagtcaactttttcaacagcttcaaacacatatatattgtgattacaccaaatggagtacacaaccacacctaaaacagcagaagaaattgcagccaccaaatcattcaaaggatcacagtaatttcccaaccaatcctcaatactaaccagccaaacaaaatggcaaaacctacttgagatttctgagagaaccctcttcgagaagatatagttaaaaaaaatgtgagagtgagattcaaatgttaccacgcaaacagggaacgaaagaaactcaacctgaataagttaggcaattagatcccgagttaaaaacttctcattaacggcctgccaaaggataaatcaatgcttcaaaacttttaacttatgccaaactaccttgtcatagttgattttctttgctgaaataaaggacaagtaaaaactttttattaccttaaacttgcccgaactcccagcagccatcaaagcttgtttatcaatgacatgatgaagcttgataagttttctagaataccagttattgtccaagctcagggtaaaaagccaaaagtcatgatttttcacatagatgttactaatccatcaaatccaaagatagtcctttttagtggaaatagcctaaatatgtttggccattaatgttggattaaaatcctatgtgggcacatatatataatgtatatactattataaagtgtgatacaaaattaagtgaccaatta

SEQ ID NO: 122363 - DNA, 1291 bp, Cannabis sativa
aataaaaacattccatttctagtttaattatacggatgatacgtaacttttaacaattattttagttacatattatttgtctaaaattgtatacatctaatgttgtagattcaataaaactatatattacttgattaatgttttgtataagtaacaaatatttagtttgatattaagttatgtattttacttttcaatgttacaataaataaaataatgttatataatttaattaaataaataatattttttttattgaaagatgtttaatataaagagctatcaagtataaaaaaatataatagtaatttaaaatagaaaattaaattagaatattttttacgaaataaaattgaatacaaaatattaataaaatatactaaaaataataagttaattctttattttgtatatatattaactataaaaataacaaatatataatttaaaaatgaaatgtcacaacacaatatatatggcaaagtatattagggctactatattagggaaatttaaatttatatgcatacatttggtgtatattaaatttttaaacacaagcttactaaaattttaaaaaataggcatactttatattcatacacattatacccttctctcttctcttctcttctaacttcaccatccatactccatgttcctatctatactgatggtggtccgatgagggtttgatggtggcctaatgctacccattttttttaatgtctttgtacataaaaaaaactagcatcatgtgaccatcggaccagcattagaccactatcggaccaccatcggaccatatctacatctatagatgataagctcattcattaagcttgtcaagaaggcatcaggtcaccattggaccaccatcagacacccatcggaccatatcatcgggttaccatcagaccttcgtcttcaacctttactcattttaacaactggaaggcattggactaccatcgggcttgacaaaaaaatagttttttttgcccaaaactcatatctggccattttttaccctaaaatctaacatctactcacagataacaaatattaatcatacaatttctttgacaacattgtcgatggtaaagtcgtgttgatggagaagtcgttgggtccgcggtggtcattgggtccgtgggtccttgggtcccttgggtctgtggtcatggcggtcgtggagagaagggaacaaggttgtgggtcaactgtgtgctcctccgtgtgcgtgtttacagagagagagagtgtgttgttcaaatgagaggggtaaaat

SEQ ID NO: 122364 - DNA, 1416 bp, Cannabis sativa
aaaaattggcatattttttatagtataaaatgtattggtttaaaaaataaatttttaaatttaataagtatagaaaatcaaatttccctttgcaatttgcaatataaatgccatgagaggtatgaatctcatatgagataagatatattgtagtgaaaagagaatgagcttcttattgagttaaatagtaacttttgcaatgattgaaactgtagaaattaaactttattgtaattaattttgactattattatttttaaaactgataccggttgctatccactaaatcaattaaagtaaattttattaaaatgaagaaaagctgagttgggagggaaagatatcaagaggctgtgacaaccaaaaggaaaaaaaataagaaaaaagacatatgtgttaaaatgaaaagacatgttattactttttttaattgtttggtattaatattaattaataattactataaaatagaaaatatattaataacaatttaaaaattagaaaaaatgagagagcaagaaaaatataagaaaattcatagagaatgccatttcatcaagcctaacaatagcattattgatatattaggaaacaacccgtgcttcgagtgcggttatattttatttaatgataattaagtcataaaattatttaaatttcaaattttaatatattttgatatttttttggcttcataaaggaaattaataaacaattatttttaattagtttatctattatagatattttgttaattatactatttcaaacaaatgtgtatattattatacattatgtatcttatttgtagttgacactacatttaaaatagctatcaccataataaaattgttgtcattattgtatcccatttgtagtcactactatatttaaattattgttatcactgtatcactactatcattctcgacagatttaagtatacaaattattggtattaaattttgagaaaaaaattgaaaaaataaaaacatcagcataattaactattttaccaaaatatacattcttgtaactttacgtatcatatcattttttttataatatatattgtagaatttgctaatttgaaatatatatataaaaatatttaaattttacttttgaatttttataactttactaaatctacactcaatatatatttatgtatattttccattagttttgtttctaaatttaaaaagaaagattttactataaaattgtattttaatttttttcttccttttgattaattttgttgttgaacttgaaaaaaaaaaagatcttactaatattgtattgatacttattgatatactagcaaaaactacgtgcaaggcacgtatactaaattttatgctagttttttttctatgttatttgaaagtgatataattaaaaattaaaaaa

SEQ ID NO: 122365 - DNA, 3985 bp, Cannabis sativa
  modified_base (53)..(60): a, c, t, g, unknown or other
gtttcttgaactttatacgtgtttgaattctattgttttagaaattcatattnnnnnnnntaaacaacatacatggtagtaaatttagatactggtaaaataatccccaacactgtgaacatttattgagcacaaggaagaggcgtcttccacgaggggtgaacggttcctgtcacccaccgaagaggtacctgaaggttgggtgaatgggaggttaagaagatttatcgactcccaaagattaacttccatcattgcatgcttcgtgaaaagtgttcaataaatgaagggtctgctcaatcggctcgccgctgttttggcacctccccaaatacgcgctctggacacgcacgaattgcaagagtcgacatttaaagtcatgttagtaagcagaagaagtgataccttttacgaagtgacacttcgattggcagctatttgcatgacataataagtagctcggatttatcccacgtgtctggaacaaattatgaggaagcactgcaagctcccggatcatgttacgtcgtgaaagcttggggggtacatgttgtccatatttttgtaagtttgacacgtggatcctagtcaggttaggataagtgatgattagctggtcaactctcttgaccattgtccagtaagataagggccctagctcgcgaaaagggcctctgtgacgggactccctcgtaaggcaatgatgtaggacaattaaaagtctctcctagtcccgagaattgagaccaactactcccgcgagactgaagttgaatgcttctgcaaaatggtatgaatttctcaccaagtgcccgaagttgccttggaaaaacatctagctgagctataacctcgtttcgcggaggctctgctcgtacatgtcaaactacgaacttggtagccaggcttcttcaggtacgacgtctgagtgtctcccacgctatgtcatggtacatagcatgaacgcccagtcgtacctatctgaatgatccaacggtcattgataaggggaattcaaaaaggaagaccctgagacagcacgtgtataatgtccagtcaataccatttgacaccctgaaaagtcacgtaattttgttggcatatacctgattttataattacttaataataatctattaaaataatattataataaaaagtttatacactaaattcaaggaaaaaaactaattgagaaaaaaatttcaataaaatattggtcaatgaaaataaaagttatgaccatataaagtaaatctagaaagttaagaaagaaaaaataaaataacttagaaaaaagtttcataatacttaataatggttcatgaaaataatagtcaagagaatataaattaaactaatatagaaacttacaagatgctagatgaaaggtatactaaaaagattggaaggagccttgtgtggagggggttggaaagtttgtgtcatttcttgcgtaatgatgttcctacccgagaggcattctgacctcaagtgacacgttcgcttattatggtcccaacctccgcaaagtgtgcatcataggctgccttgtatgccatcatttggttttcttctagaattgtttgggatgcccatgcctttggtcctcaccctaattggatcgtgtacaatatttagattatcatgatgtgttctagttattttttgggtacctatttcagtactttgtctctggtcgtaagtccggaacattttttaggttgaaaatataaccttattgcttcttgcaatcacaaataagcatctcatttgatgatcagagtctatcgttagtgatttgaccactttgacactagcagttgtagtgagtactgcaccgctagcattacgtctacgttcaaaagatgtcagacatcattctggaacatttttgaggttgaaaaaacaaccttattgtttcatgcaatcacaaataaacatctcgtttgatgattggagtctatccttagtaatttgaccactagcactcgtagtgagtactacgctgctagcattacgtctaggttcgaaagatgtcggacatcattccaaaacatttttaaggttgaaaaaacaaccttattgcttcatgcaatcacaaataagcatctcgtttaatgatcagagtctattgttagtgatttgaccactttgaccactagcactcgtagtgagtactacgctactaacattacgtctaggttcgaaagatgtcggacatcattctagaacattttcgaggttgaaaacacaaccttattgcttcatgcaatcacaaataagcatctcgtttgatgattagagtctatccttagtgatttgaccactttgaccactagcactcgtagtcagtactacgctgctagcattacgtctaggttcaaaacatgtcggacattattctgaaacattttcgtagcaatcacaaataagcatctcgtttgatgataagagtctatcgttggtgatttgaccactagcactcgtagtgagtactacgccgctaacattacaaataggtccgaaagacgtcagacatcattctagaacattttcgaggctgaaaaaacaaccagcttattgcttcatgcaatcacaaataagcatctcgtttgatgatcagagtctatcgttagtgattttgaccactagcacacgtagtgatttaattaaatacgatttttaataaatctgttgattaccaacgaaatgcacagttaattttagatcacgataacatgcctaaactaatagggtgttacagagcatctttaatagagtgttataaatgtgatatacatgcaatttttagcctatgtttataaaattgaactccaataatgtgtataatgtagtctaaatttgacatgtgttaaaagttgtgccaaatttaatacaaaattatagtatgagccaaattttacactacaacaaatatattttttatttacttttttgctactcattaatgtaattaaaaactttttatattttatttatatatttaatatagtttttatatatttttaattaaaatttaatatttttgttgtttttttacatatttctattaaaataaattttattttacttttagtgcattaaaagtaaaattataaaatttgagctaaatataatattgacttattgtttgagtttagtaaaaaaatttacaccatcaattaaagatggtcttattgtaatattgtattgtatatttttttagtcttatttaaattttaaaatatattatgtaaaataatttttaactttttcagaaaaaaaaaaataaaatctaactattatgtttggaacctagtaaaaaaaattgaaaaggtttgataattattgatattaatctgtcatcaaagggctgatgtggagcgtgactgatcacgaaaatactccatgcgtgactaaacaaatttaattataaatattaattttaaaaatattaaactaacatattttgatctaataacgaatgctaaaagagaaatttaaatttttatgcttagtttaactatttagttaaaaaaaatatcaaaaaatatatttttttactatgtcttaaatattctcatgttaaaatatttaagttaaacttaacttttacttattttttttttgttaaaaaaaaatttcttaatttttttttcaaccaatagaacaatctcagccctacaatgtaaaaataagagattttttttttttaatttgataaaaaaaaagtaagcataaaaacttaattttttttaattttacccgttcatgggtattacccattaagagtgcactcatatatatatatatatatttatatatatctattactaaaatcaataaactaatatctatcctatataaaatgtggctatataacagaattcttggtttatgagaaaatattgagtatttttttttaataaaaaaaaataacaaattattagatgttgcaattaataataaatttgttcatatt

SEQ ID NO: 122366 - DNA, 1048 bp, Cannabis sativa
aagcttgcaatttgaagaaagcttcgaggatcgttaagtgaaaagcaagctgaagcttgtaaaagaaagtttcgaagaggatgaagacgagcacaacgacagtggatgaggatgaagcttgtaaaggttttggagcggctgcgatatatgcgagaagtagtctcgaggaggataaagatgacgatttttggaaatccactatagtgacggttcaaaatcgttgcttatagtatagacgatggttttaaaccgtggcctattgtatcgactatagctgatggttttaaaacgttgggagtactttttcctgacattttcctacattcgcctattctactcagtattcatgacgttcgtatagacgacagttttatagattgtctaaaattcttcactcaagggtgtaaaactatcaagaattccgagttttttaatagtgactttttattattttggagtatttatgaaaatatcctagtatataatcaatttttaatgtgtgtataaaggcctatgctaatagtgggcataaagttcaaatcaaaagcttgtaaaagaaagttttgatgaggatgaagacgagcacaacgacggtcgatgatgaggatgaagcttgtaaagattttggagcgtctgcgacatatgcgagaagtggtttcgaggaggataaagacgatgattttttttgggaatccactatagtgatggtttaaaattgtttcctatagtatatccgatggttttaaaccgtggcctataatatcgactatagccgatggttttaaaccgtcaagaatactttttctcaacattttcccattgtcgcctattctacccagtattggcgatggtcgtataggcgatggttttatagaccgtttagaattctttattatagcgtaaaactatcgggaatttgtttttttcgtagtgactaggggtgttcatcaaactgctcaaaccgctcgcgaccgcaccacaccgtaaaaaaaatgcggtttgaaattttttgcagtgcggtcggagtttgaattttttctaaaccgcg

SEQ ID NO: 122367 - DNA, 1088 bp, Cannabis sativa
tattctttgtagttttgagctttgattaataaagtttcttttcaaaaaaaaaaaaaaaaaatttatttatattaatatattatctaattttttaaattattcaagaagtgatatagcgacacgcagaaatagtacctagcgacaaataatatgcattttcttcagcattaaaaattgtgacgtactcttggacatcaagcatgcatgaagtaacaattcttgtactgtaaatctcttttaataataaatatatatattacatagtaattacttaatcttttcttgtagaggaatgtgtggtgataatataggacaacaaggatgacttttaaaccatatccaatatattcccaaggtatataattgccgccccacgtcggctgacaacgaatttaaaaacttttattattgtttcacacgtcttcaacaatattgatggttcttaatatagctgtgttcttatatgcttcatattaattgtttaattggaacacataaataaatagttgtgacaattgtccattgttaaagtaatttttgtcgcttaaatttaggtcattttgcttcaaaaaacgaaaataaacaaacaaattttaggccatcacaatatatttatgcattgatgatttgccataaaatagcacagttgctttaatattattggaaatttagaatacgaaaatgattgatgcatagtcatgaaaccatgttgcattaataatatatagcgggaaaattgtcaattttgagtacctagttactagattatctatgtatgtatacatatgtatatctttatatcataccttttaaatagttattatatagtgatatttcttaataatattatattaaattatgtgcaatagctatacttaattacattaatgtaattataaccatatataatatatattacttggtgcttagtctcttctagcatttctcttagttaattatagaggattttacttgacaaaatgaaaccatgtgatatgtttggccactaatagaagaatatttatctttggacaaggacatttaactaccctaactgctttacttaactgtcagttatgacagttagg

SEQ ID NO: 122368 - DNA, 610 bp, Cannabis sativa
cctttccctggagttggtgacgggagtagctctgaaggagtttgcaaaggtaagtctttcatgacagtttccttttatacttcttcacttagtccatcttttaacattctttctctgtacatactggtctgaagataccttatgcttattctcgggccaaatcggctgcctctaagaacgccaccatttccaacactatacgggcgaaagtggacctggccaggaatgatgcttacgaagccagggttcagcttggggctgttcggatgaaactgagagaggtcaacaagaaacttcttgctgtcaagaagaaggtggtcgagctgactaaagatctacaggcttccgatcaacttgaaactgccattgcctccttgtaaaaagaagtgaccacctttcaggaagaaagggaggttctttgagctgtcttccgcaggttggaagaagataagaagagcaaggaggaggagcttcacgctgaggttgagaagtacaagtcgtaggccgagtagcagaaagctaaagtggcgaggctcgcagggaatgtaaatgccttagagacatctggtctcatgattttttattacttctggaaggctaatcctcaagc

SEQ ID NO: 122369 - DNA, 593 bp, Cannabis sativa
gaaaaaaacaaaagtgtcaccaaacgacacctaatttattttttaattttagattttaaagaacattgattgtctttgtgattgtttttagattataagtggatttgtgattgtttttgtgtgatttttagttttttctttcactactacaaaatagacttttggtgttggtttgagggatatttttttttaaaaaaaccgacactaatggccactccaactctttggtcttagtttataactgacacctataatgacttcaagtgtcgttagtagagcgacactaaaagtatatataatcgagaccatccactagaccctagctctcagtaccaaatcatagaaaacaacattcaaaaattgggtagtcgcacttgataactaccatatataatgctggggctcagatttaattcactccctgtacagattctaagtctttcacctacaggtgagtgcacacctaatctacctatgatgacacagagactaggatgtgaaacaataatatgcacaagtcatgatcaatatggctctcatcagtataaccaaagcagacaaataatgagaataacaaaagaacatattccttt

SEQ ID NO: 122370 - DNA, 1184 bp, Cannabis sativa
tcttgtttctgtcaaaatcaaaaaacaggaggaagaagatgaagatcagagatccagaaaaacgacgtagttttgaaaaaaaccgacaactttgagattaaacgactatattgaggtaaacgacaatttactgttggaaggagaagaaaacgacaatattgaggaaaatgatcatatcagttttaaaacgacgagttttaatgattaacgacgtactttgaaaaaacgacaacttttgagaaaacgacaacttttaaaaaaacgacatacttttgagaagacgacaacttttgaaaaacgacatcttttaagaaaacgacaatttttgagaaacgacatacttttgataaaacgacaacttttaagaaaacgacaatttttgagaaacgacatacttttgaaaaaacgacaactttagaaaaaacgataactttcgaagaaacgacaactttctaaaaaatgactaactttttaagaaacgacatacttttgataaaacgacaacttttgaaaaatgacatacttttgagaaaacgacaaattttcagaaaacgacaatttttgagaaacgacacattttttaaaaaacgataacttttgaaaaaacgattactttcgaaaaaatgacaactttctttttaaaaacgacaactttactatgaaaaatacaatattacgactggcgaaaaggatatcattcgtgaaaccatagtttttgatgagtattgatgtactttttggaggagtaaaaacgacatacttttggaaaaacgactattgaggaaaacgataatctcattcgtaagacatcaattgtttaatcattcctagacacgacattgtttataaataataataagaaaaaaaagattgtttcacgataacataataaaacgacaataatttaagggaaaatagaaaaaaaaaattaaaattaaggagtatctgattattatttttttagtcgacagtcacctttatatttttataaatataaaaaaaaatatatacaactttgtatagaattaagtacttattactgctaaaaattaaacttagaatttcacgtataatcgggaattaaatttaggtatttataccgtaaattactctactaattaatatacttttattataaaaaaaaaattaatataattttattgactaattttatctttgctata

SEQ ID NO: 122371 - DNA, 2814 bp, Cannabis sativa
tataaccagtttgagttattttgtgttatttatttttattcattatattatagaactgattctatttttatttatatctgagatatctacttttagtgacttttccaagacttttttcggtgacagtgacttttccagcggcgatgacttttctagcgacaatatctttttcgacgacttttccggcaccaacgactttttcgttgttggtgacttttccaacaaaacttattattgttttataaatatgagattttcacattttttacaaaaaatatggcataaaaagccgatataaatgtaaaaaaaaaaaaaacccataacttcatggtattatttatttatgccataaaaaagtaaatccttataacttttccatatattatataatttctactaaataaaaactctttaaaagcaaaattattacctatgtcttatgaaagtatttttgtaaataaaataccaatttgtatttttaacttaaaaatttcttaaaataaacatgaactttattggataaagaaaaaccctcaacagatctataactcgctatcactttcacctaatacctttttttttaatggaaaagatacttttattagaaatttatatcagccaaaatagtgttttaacaattcaaaaggagaattgttagcaacaaaagtgtgacctcacaaataccaagaattacgcgtaagaaaatatgctaccttattagcagaatactttacaaaacacaacttaacatgaatcacctcagataacaattgttgacagtcttgcaccagcataccaaatgtagaaggcagtgatacttgactgtgaatagcttggactgcaactaggcagtcagtttcaagcacaacactatcccatgctttgcccttaatccaactaagtgcttatttaattctaatcaactctacaatctcaggggaaatatggccattcttactagaagaaacaatttcaataatgtcaccagagctttttcaagcaatgaaacctaaaccaaaagacttggtagcctaaaaaatagctccatcaacatttatctttactgtaatactctcgggtttattaaattagattagcaaccctaattagattaattatgtattagtgagaatttatattattatataatttaatatgtgaaactatattgataaatgtcattttaagactccgttggtgtgtcagatgtattttcgtaattttaacccgataagggtaaactcataattttatgatatatcgtgcttatagactatgttattatatagtatgtttattctatctatctgagggtattttttgataagtcggcgcggtttagtcacaatcgggtattttggttcgaaccggcttcggggcctaaaatacatttttgggatttatttatggtattattatgataaatgaggaattttgaatttatgttatgtatatgtgattgaattgacaattttacccttgttatgtgtgtatgttattaattatgctttgggggtattttggtcatttaaccaactattacattttcaacaaaaaagaaaaataagatttttgttaattgaaaaatcaaaatttatgggtttgaacccttggcagaccccctttctttctctttctcattcttgttttacaatttcaaccatttttgaagaaaaactaggaattgggtgtggattttctatacttagagcttgtgaactttgggtaatcattttaattcatttcctttgattttatttctgaaatttaagcttgttgttgatgcttgaagatgtgcttgatgttcttgggattttttgatgcatgttgagggttgtgaggtgaaatttagtgattttgtgtagttaaacttataggattatgtattattgcatctaggctatttgtgtgagattttaaggttgttcatgttgattaatttcaggggaaaaggtttgagttctgggttttctttaaagctttagagctttgaaagctttgaacctttatttgtgcaagtgtatgcatgtttgggttgtatggcgcttttgtgttgagaacttgattttagggctttgttgtggctttgaatatgttgtgattagtggataaagttagtgaggtagtgaatttgagattacgcgtgattagaattggtaggtatgaattttaggtatgaaattcgaagtttgtaaaaatggcaattttgagggtttccagggcccttgtcgcggcgtgggcaatctggatgttgccgccatggccacaaccttgctcactacggcaaggccctgcttctctcgagaaattttggatttttgtttttgccacaacttttgactcgggactccatttgggatgttcttgatatcattagaaagcttgctttgggctctatatgattatctataattgaaatgcaaattatgtgattatgtgaaattgaattttgggattagccctatttgtgtaatctcaggaatttgtgactaggagtaccgatgcttgctcaggaacacctgaggatttggaatctccacatacttgggataccaagtaagacagtagttagcacgtagagttaagcgctgtggtgctcatgtatgatattatgcttgtgattaggtgagaaaccgagattagggttatcaccctaaagtgagcggttatacgatctagggttattactctagtgtttaaatgattttaaatacaatactatgctgtatatgttgagataaagaattatgcgggtaaggcataattaggttagactcggtaatcagaaccgagataaaccaatctaaggcctta

SEQ ID NO: 122372 - DNA, 2124 bp, Cannabis sativa
cacttgccttaatggttttaaccattgctagaaattaatgaaaattttcaaacatttccactactacaaatttggcttttcccaacggtttataagggggtcaattatttcatcaaaaaaaaaataagggggtcaattatgaaaactgttggaaaaagtaagcaaagatttttcccaacggtttagaactgaagcaaaaaaactgttgggaaaaacaaatgccaaaacagtgaagaaccgtgggcaatactaaatagaatttttttaaaaaaacagtaaatgccaatagtttataactgttaagaatactaagtacaaccgttggctatacttagtattcccaacagtcataaactgttaggaaatattctttttagtatatcaaaaaaaagtttcacattttgaaaaagaaagaatttttttatacttaataaaaaaatttgtatttaataaaaaaaaaaatacttaaaaaaattaaatttaaaaaaataaagaaatttgtacttttttcttttcttaaaaaaattttgtatttaataaaataaaataccaaaaaaaacttcaaatttaaaaaataaaaaaaaaaaaagaatttttttttaataaatttataatttgagaatttataaaattgaaaaatttatttacatattttcaataaaagaataattttgaaaattagttgtatttaaaaatttatgtgaaagttgtttaaaaaaattattatgaaagaggactaaaatattattggacaattatttttaattaaaatataattagagaattaatttagaatctttaattaaaaattatgatatttatagtctttaatctaggatccttaattatatcagatttaacatttcaaaaaaaaaaaattatatcagatttttatttattaaaataaaatagttttgagggtaaaatttaaaaagtataaatagaaagtgataaagaaaaaaaccctaagtatggaaaccctaatcctcttctctttatcctctgctattccgcctctctctctctctcgctcacgttctctcttgcacggtgtcgtattccgcctccatagagcttgctggctggtgccggtatctgatgactacgaagaggatgataatgacaacgaattagacaaaaacaacgacgatggccatttccaccctttttgattcatcgcagagagagtttatgctatgtgtgtatttcagtgataatggagatttccagggtgttattcttcattctaggggttgcttctctattttgactattacggctcaatcgtctactccggcttcggttccggctccaccagcaacggtgagttctctcagctttttttttaacagatttgaattataaattttgataatatatgtcaatgcagccatggttaatgtcgaattacggttaaagaaatatgggtcttgaaaaatatgatgatgcattgttaatttctctataattgaatattagggggttttctttaaatggctttggttaatcgaattgggtactgtttgtaataaagatttaaattttttttttttggtgatttttcaggggcaacgataaatcaagggattgcatgcctgttgatgttggtggctacctaattcactgaagatagattatttgaattggggttggattatatgttgtgtgatttagtcatgaaattggggcaaaatttgtgaatttacataccaattagtgttctgattttgacaatttattaattatgttgttgaggattctattctgtttggtcactgtaaaaaaacagttgcaatatttataattaatatttatttttgtatttttttctgaattgtatataatatatattgttaaatatgaatatgtgttattctaaaaaaaaatatgaatatatattaattttatttattttaattaatattttatttatgaaaactaatattattatatatttaatattttaaaaaatatattaaaaaataatttaatttaatttacataatgcttttgtcaacagttataaatagtcatttaaaaagatttttcccaacagttgtaaaccatcatttaaagtaactttttccaacagttataaatcgtcttttaaagttccgcattttt

SEQ ID NO: 122373 - DNA, 2523 bp, Cannabis sativa
  modified_base (1141)..(1144): a, c, t, g, unknown or other
cagccatagagataaatgactggattctttaactcggtaccatggcaaacatcgcgagacagttcaatccagtattctctctggctccttttcgccattgttgcaaatcatgattctctgaagactcaagtgtgaggtgccagatgaaaaacaagtgcaatgagttctcaatctcataacagaacaaaacattttctatactgctgtgatgggtgaattggagttatgagatgaagaaagggaatgattttctgatatacaaaataactgcaaatttaggtgtatatatggaaatttctcccccaagattggtatgtgactgttatctcttgtatctcaaactaatattaatcagcttttttttgccacttccattctgctactcctattaaattaacaataaattttccatgactgttttttttttttttttgctttcaagactgtgtagttactcacactactgtttttcttcattttcagatattaatcattataaggtgaccacactatacactttgctgctctaagatctcaattcatctctactaaaattactacactaatacatggaagatgattagttatttcttttctaaataataatacttataattagattggagatgtataaattggggaaattttgagaaatttaaattttttaattacatatatttttagagaaaggctaaaaagtatcaggggtgtctcttaaatgtgtcgtattgttattggtgtcacctataaatggtgctaaccttagtgaaaaatctcaaataagacttagtttatttttgaattttaattgatttattaaatcaattaatggaattaacaggatgatattatcccgaataatatggggaccatggacttatgtaatcaaactctcaataagtagatctaaaatttcttgagtaaatttcctcctgactccactatagatttaaaattatactcttgattacatagaacgctatatatatctaatatagatacactataatttattcattgtttcaatcaatgatcctctatagatgttctacattgaatatggacaaaattatcgttttaccctttaatgtattttatcctttaaatagttagctttttgtaaatgatatttcaataaacnnnnataattactgaaatgagtactccagcatttaacttgtttagtcaagctcaaaggaaatcatcatttcacttctaaatagtcataaaagttataaatgttcatatctatgactaatgctctcactcaattggactaccaagttctcaagatgtaagtatggactagaccaacgggtaagccggtaatgaacaagtcaaagaactataatactacaactagaaagaacttaatcatctcaggatttaagatcaattgatctatgaggtaacgataagtttatgatatctttttcactgttaatatcggtctagtctgatttaaaccctatacacgtgatacaagtttattttgctaatgccctggaaaatacatttcacttagccaagtgtaagcaaaatattttgttaattatcatgttagtgtaaatctagtgcactgataagtcatgaaactaaaaagtttaaagcatataatcacaattattttctactgtgttgacaacactataatagtgaataactatatgttcgagatttagcagtttatatattaattaaataattatgagagtaacatgtgaaccaagcaatatacaattataaaaaaagatctctgatcttttattaataagtaagtaagattacattgaaattgtgtttcgtttagggtataaaagtccaacaatagcacccttatattttgtcagttaagctttccacctcaataaacatttttcgaaatttaaccattagagatgctcttagtgtgtgaacagctggcgtggataagaaaaagaagtcaactatgatcttttaggtagaaaaattctagttctcgttcggcttgcatatgttaagcatgtcgccagcgttcatcgtatgacaagatcgaactctccatgagatttattattgcagtacgtataaattccttattcatagacactttaggtttttggggtactgagttctcaccaatgtttgcgttactcaatctgacatttttcgcttctgcttcgtctaccactctttgtgcaggtgcttccctctaggcagaatggtcccctaccaatgcatattagcatcccaaccatatttggaccttggagatttttggaatgccctaataaccaacaaatggcaaatatttttccttgagtgaatactatttcaatgagaacttgatgagttgatccacttatatgtcttgcttttactgttgtctcacgagttactccatgtattgcttgacgtaaaacatataatggatttatttttgtcttgtcttctgttgaatctttttcatggttcaatagtaaattttataaggtaaatactattttggaccccgtattttgcaaaagttacagattggaccct

SEQ ID NO: 122374 - DNA, 1123 bp, Cannabis sativa
tgaaaaagcccctattttttatttatatatttttaaagaatatgtttgtcttttttattttttaattaataaaattaaaataaaataaatagggaaagggaaagggaaaggtattcttcataaaaatggagggtgaaaatttctttttattttctccttaatttgtgtgggttttgtataggaatcaatatcatactattgattcatattcccactaagtaaacatgtcattaaagttatcaaccattggagtatttttttaagagaacataatagatcttatgtggatgagagagaaaataaaaaaaataatattttagcatgatgtgtgtattttggcaactgtaggtattctcttctaaagactgttggccttcttgcctcagatgagtacacttgtggttataagttttcaaagtactctttgtgggaaaaggtcccagttccaaccgatgaagagagccaagattatgtggctcgcgtacattatctcaagagaatagtccctcaggaagctaaagaaagagcctcctgaggtaatcaatgtggatggtcacctactgtgcttagggcagaacgtacttcgttagtaactttcaagatagtcgatataacttttatacttggaacattttcctcatagatcgcataacccataggtttgatagttggtacccaaggttttttgtccaacttagttgtactagctcgtactatgggattgtcgaatagtatgggaccaacttggatagggcaagccacccagattcagattgggatttagatccaattaacccttacgacatattcatgatcacaggatctaaagaatttagtgaatactatagtctttcttcttctccatctgatgattatgggaaccttctttaagtggaaatttgtttcccattttctttttatctatttttgattaagtgttgatgtatttcctttgtctcgcagatatcttgacttagaaaatatgttcagtagccctcctctcgttgacaaaagggccaaacaacgagctgcccaagcaagtgatgcctcaggttctatcaaagaacccaaaagaactaaaatgtaatgtcctcgcttcaagcctccattgggtccttacacc

SEQ ID NO: 122375 - DNA, 1977 bp, Cannabis sativa
tctcttattgataacaaatcagattattatttagggcataaaatccaaacagtcaattcctcaatgcaccatgcctccatgcatgttggcaagccctccagacaagccaccaaactagtagcttacgttagacctttatctctttctagcagtggtgttagacaccacccaatttgagtaaattcagcttgaagatatcaaagtggtacaagagtttcttgatgtatttgtgaaagaacttctaaagttaccattatagtgagaaatagattttttcattgacttagcacctggaatggtgccagtttctaaggtaccctatagaatgagtcatggagaacttaaggaattaaagttacaactttaggggatgcttaacttagggtttacccaacccaatgtgtcaccttggggagctccggtgcttttcgttaagaagaaagaggggttgcttcatatgtgtattgactaatggaactaaacaagttgaccattaagaacaagtaccctttgcctaggattgatgatttgtatgatcaacattaggggaagatatcttttcgatcttcggtcgggttatcatcagttgagaattcgagaggtggacatctcaaaggctattttttgtactaggtatggccactataaatttttgattatgttttctggactaaccaatgctctaacaatttttatggatacgatgaatagggattcaaggatttcctcaatatatgtgttatagtatttattgatgatatccatgtctactctcaatcagatgtagagcatgagcatcatctacagatagttttacaacgactaggggaacataaactctatgccaaatttaagaagtgtgagtttttgttattctaagtgtctttcctagggaacattgttagtaaagatgggattatggtcaatcctggtaagattgaattcgtcaagattggctgaggccaaagatagttaatgaagtcagaagccttctaggtttagttgggtactatcaccagtttgtagaaggttttccaagatttcaatgctctttatataattaactaagaagaataagcggtttatgtggatagacaaatgtgagacaagtttttaagaggtaaagcaacaattgattaaagcttcggtgttagccttgctgtcaaataaagaaaagttcatggtttattgtgatgcatccagacagggtctcaggtgcattttaattcaacttgatagggttacttgttatgtttctcgtcagttaaaagagtattagcagcgatacccaactcatgacctaaaacttaccgcagtagtttttactttgatgatttggtgacactatctctacggagaaaagtgtaaaatacataccgaacaaaagaggctcaaatattctctactcagaagaacttgaatatgagatagaggcggtggttggagttatttaaagattacaattgtaaaattctttatcatcttaggaagactaatgtagtggcagatgccttaagcatgaaaggtcacaaccagattttcagcacaactttaatttctccctagctggtggttaacatggtcaaagtaggtattgagtttgtagttggcaaacttaataatgtgacactgaaattagacttgtcagtaccactttccaccctcagacagatgagctaaactattgtgatggattttgaaggctcttggagtaagtatctgccactaatagagttttcatacaacaataattatcaaaatacgatagggatggctcgctatgagatgttgtatggcaagaaatctagatctccaatttattgggatgagactgaaaaaagaaaatacctaggttcaaaatcagttcaacgagccaatgaggcgatagaaaagatcaaggccagaatacttgcttctcatagcaggcaaaaaagttatgttgatccaaagcgtagaaacatagaattttaggtagga

SEQ ID NO: 122376 - DNA, 503 bp, Cannabis sativa
atgtatatgtcaaagttcagggggtagaaatctaattagtcttattattattattagagaacttgagccattgcacaaggatttttattttttaaggtctaattattaaaaggtatattttttttctatcatactacataaatacaaaatttataattaaacgtttagaatgtatcatgaaaaaaaaaaactggtaataaaattataatttaatgcatataattttcttttaataaaggatttaattttaaacttttgctcgaggccccaaaaatacatgggtcggccgactagcaagaagtggtttcattaaagctacttaattacaaagagaagagttatttggtactttaaagtatttaatatattatattgatataatgttttataattagttaatatgtttttttattaaattaaaatatgtaaaatttaatattaaagtgtatattttattagagttagtctcacattgttagtgtgtagaaataaattgtcatata

SEQ ID NO: 122377 - DNA, 680 bp, Cannabis sativa
aataataataataataaaataaactggatattacaaacgcagcagtaacagagcagatgagcaacaataatcatggtcaacaagtcaacggattcatccctgggtggatgctttgactcttcattacattacaaagatgatctgatcatgacattgcatgatgaagcataacaacctatgtgctttgttttgtgtgtgctatatatatatatttatgtaaaagtagtttcttgagcctaattaatgtaactcttctatatatataaataaatatatatatagatatattaaacataaaatcagctgagactgatgaatttcgaatgaccatcaaagaacattatgcaatgcaagtttacatatgtatttgctttgtaagaaatttgatcatatactaatattttgaagctgttttttcttggcttaaatagtaatgatctttcaattcaacatatgtattttcgaatcttttcttccatgaatttatctgtcagctactccaataagtaattaatcctcatttttgtaaaaggctgattttatactgggaaaagttctcttttctaaacaaagttttgggctatatccacatacaaaaagaagaagggctatttacaaaaatatgggaaaataaaaataagttttgatatatatggcataaaaacttaattacactaaat

SEQ ID NO: 122378 - DNA, 1722 bp, Cannabis sativa
tataatataattaaaataatttttgttttaatttatacatttaacaagattttttttagtaattaatatttataaataatttttttttatattcaaattcttattataaattttttaaaagtattaaatcatttaactataatatttacaataatttttttttttacaaaaattaaattttcattccttttaaaagtcgcgcttcgcgtgcggcagtcaaatattatataaatattaattgaataaaaaaatcgatattaataattttaaactatatatatttattaaaaaagttgataaattaatataaaaaaactctaaagaattcaaaaaaaaaattatgatacatttttttttatgtgtacattatagtgaagaaaaattagaaagtgaacaataaatctataaaaaattcatcatataatttcaaaataaatattatcattgtatctcatttttagttactagtgcttttaaagttgatatgatcactatatctcccctaatattcttcccaataggtaaatactaatttttattatataaagagaaaggcaatgataaaaaataatcaaattttgatatttttagtatagtagttaatattttttttttattaaattgtattagttaatattaactgtatatctttctttaaaaaaattatatatgtagataatttttttaatacatatgtatttatttattagttaattctatacagttgtatagttttattttttattttttttaattaattagtgatctttaattaaataaaacaaaattagaaaaattagaaaaatgagaaaatttaaaatagaaaaaaaaaataaaaaaaaaataagagaattatagaaagaatagatatatagaaattttatttttaattattaattaattgtcgtaaatttaaaaattataaattgatatgttagttattgtgtatgattagatattttttattttttaattattattataaatagataatttatttttctcttaaattatttattaccaagttatgatttaaaaaaatattgtgttcgatatttttgtttttatcattagagattattattataattattgaatatttttttaaggaaaaaaaggcaataagaaaataaaaaaaaaaataagaaaattaagaaaagaatatatgaaggtacttgaagctattttagttgaatttttctaaattcaaaaatctaaaaaatcatgtaaatgaaatacaaaaatatctattatcatttgctgcaacaatatgcgtaatgagatattaaataacaatattaaaagaaattataataaatgataatctatatttatatatgtctatatatagatttattaagttaaaattatatttatatacttataattttgatattatatttcactagaaaattaattaaattataactattctaaataaaatgaataataaatatttatttcttaataaaaaattattttatttataaatattaaaactgtttaatatttacttttttaattttcacaaaattatttattttgtgtttttcataaatattttttattttagagtaatttgtggtataaatacctaagtttaactgccagttgcaaataaatacctaagtttaatttttagcagtaataatacttaagttatatttttggaactctataggtacatgatagttaaatattaaatcattatccacgtgtcat

SEQ ID NO: 122379 - DNA, 1988 bp, Cannabis sativa
tgagtaaaggttgaagacgaaggtgcgatggtagcccgatgatatggtccgatggtgcacgatggtggtccggtggtagcccgatgccttcctgacgagcttaataaatggagcataacatctataaatgtagatatggtccgatgatagtccgataatcacctgatgctattttttttatgtacataaacataaaaaaaaattaaaaaaaaaatgggttttaaatagttgtcccacatagaggacaaataaatccttttatttatactttcttatataaacaatcaagctccatttcaaaaatcaatattaaaaaaattgaagcaaaaaatttataatatattgttagaattcttaactatattctatttataggtcttcataagtgtttcaagagataccgtgatgctatctctttaaagggttcatcgagaaagaatcatttatgtataagaattggggtaaattagccattttttctagttctagatttgtaattttttatataattctttgaacatatttaataaataaataaaatttcaattttttctttcaaaatttgaagaagcatttaatttagatttaaaagaattgtgttattagggatgaaaagaggtttaggttgatgaaaagaatatgagggagaagtctaatagattttgtgagcaattgtattcatatctaatttaaaatgaatataagcattttctaattcttcaatacataatgtttggtaaatttttcaattaatattgataggaaaacttatactaggtaaaaaggaagataacctcatttttgaaagatgtggtagagttatttacatttgggatttgtagtactagtatctattctattgtggaattttaggctccatttcgaaataacatggatggatgaggattgaagcaaattgtgagctgatcattaaaggtaatctcatgtacaattaaacttggcttagtaataccattttggccaccccatctaagggaatatcattttcattagtatcagattctaatattattgcataggctaggcaagagttgcaatgaactaatccaaactaaccataaagtatatccacaaaataactagaattgattacttgtagttaactgaactggctccccaattttattttatgcagagttgagcttctgtaacatcaacatccaacaagtaaattcttgtggtaaactatgtgtgaacctaatccatagaatctcacttgcaattttgatataaatcatgcgtgttcatattatattatattcatttggcttctggtgcagtctcaatccgcactgcagtactcgaatccacaaatataatttacttaactgaccaagacgaagaacgctctaagcaatggcaaagaagggaccttcaaaactcaaccagagtaatccgattgatattcatggtttaaggctagctcaaaaagttgggtggctaatgtaatacattggaaattaattcttatacaatggaaaaacaatcacaatctttataagcataaatttgaattgaagggcccagaaagcaattgttgctataatcacaaactgaggggcacaccctattactttaccccattatatctcccataccatcagatcccttggaacaaaatctttttgtcggttaatgtaggaatacagttcaatcttattattatattattattcatcactcatttaactcaatttagtaatttcaaggcccactaatttcatcatcaatatttattataccttaatcaatctaaataaattaagaaaataatttcaaatccaatattattataaaataataataagaataaatagtggtataaatacttaaaattttaaatttgttagtagcacaaatccattaaattatttagtggctgtttacccaaattttgacgacgatgacgtgtcaagaatagcaccacgtggcacaaaaataccgggactgaattaatgaagaaggag

SEQ ID NO: 122380 - DNA, 843 bp, Cannabis sativa
tctatcatggttggccacaagcacctctgactgaccaacctcctgatctctaccatctagaggatctgtggcctcctctactataccgaccctgccaatggtagccagcttggtaatgtgagggtgaaggtggtgccctgtggtaagattttttggttctggccataatgtatcagtatcaacctcgagatcacgcaaaaagctgctagagaacggactagatactagttcacaaaggcaagactgattgaacctgtgatgacacggttgtcaccgccccaaaccaattctcgaaatcacctgcatattagagacaagggaaggtgagcaacttgacaaagcgataaggtacaaacaaaactctgcccaattgtacccaaaggtatttgctagataaattgcattgtacaaggctaggtatcagcaaagtaccgtctcaagtataccaactttgacaaatggtgagtttaaagttgtacattcgactataacagactcaccattaagtctcatatagcgtttctaagggaaccatgtatgagattaaggttttacatgttggaattttataccctaaataaaacctatttcaatatagtctcatttacaatcaatagaagattagaagtcatttaagtttacatgtagttttcatgattatattgttaatatgcaatttctgttaaattcagaacatatagttattcacaattacagtgatgtcatcacagtagaaagtaattatgatttataagtgtactgaatttaccctgacgtgataatcagcgataaagtttacttacacaatgatatgtggactgttctttctagggcattagcaaa

SEQ ID NO: 122381 - DNA, 2417 bp, Cannabis sativa
  modified_base (27)..(30): a, c, t, g, unknown or other
  modified_base (2375)..(2377): a, c, t, g, unknown or other
tttgcgctattttaattagtaatcccnnnnaggggattagggtttcataagcattttgagtagcatgcctaattatttagggcattacatttgagattgaattgtgagacataactttatagagcattgaaatagacaaaacacaagttgaatctcatcaatcagatcaataatgagtgagttatggccattttactgaaggttgttcatggcccaatgctcaggttaccatcttagcacctagactggacgctgggtgagtgggaagacgtcctcggatgtattttttgatgccaaagtgatattttgacatcacttagtcttttttgtgctctggcaaagttgatcattagttctcgaagatgttgttttgcagaaatgagagacttgaaactcttcatttttgagtattcccatgttagaaatgagaaaagccaagttgtgaatttgacatctctgatttcataatcttagttattgtgaaaaattagacggacaatcgaaacaaaattcgaatcgaataagcagaacccagctcactaggccatttgtcaacttgggcgttgggtgcttatttcggagcttttgggatgtcgttttaatactttcaaggttctagaacttgaggacgagaactcctaccccatcttttcccattctggagtgaatactcggatcaggtttggcatttggatgattgaaactagcacaacaggttgattgtcaacctgggctctaagcccagcactaggtcaacctgggcgctgtgctctgtttctaagcctttgggtttatggtttcaacctgagtttgcttgaatcgtcattatttgtgatgatggaaaaaatactcagaataattttttgagaatctaattggaaaaggcccatgttgacaatatgtcaacctaggcactgggcctagtgtaaggtgtcaacctatatgttgggtcccaatttcggtcccttgaaagttttgtttggtccctagaaatagttaaatcttaatatttactgaaaatatagaatatgcttggaagagttctcaaaacatcattcgaatcagcccaagttgataaaaagttaacttgggcgctaggccagccccgggtgtcaacctgggcactgggccttgcttttggcacctaggaagtgctgtttcttccataaaagtacctatatccccattttttatgaagagaaagatgatgcaaaagtcagatcgtcaatctgatacttggaagtcgcccagattgacaaattgtcaacctgtgcgctgggtgtctgggcaccaggtgttgtaggtgctaaaattaactttctttgaatctaattatagtgcctcaaatatgttcgtgttatgtctaattcatgtcctgatgcaaattttgatccattttcactaagatagtcccgaaaacaaaaactctagttatggatgtcaactttggaactaggtgaaaccctcagtgcccaggttgacttccgtggtgtaggttcatgtaattttagctcccaaggcctggatttgattgctccattcttcatggtacagaataccgaaaggtaatgagttggaaatgagttatcaaagtccaaacttctatcccggagttcccgaagtcaacctgggcgcaaggtaaggtacccctcccaagttaactgctatgactcgggtctactcaactctgtgacatcatctttcttgccatgtgtcaaacattgatgcccacgtcaccaagaaaagtttctatgtctcccaagttagctttacacttgtgtggagtggacttgatgacgtgaaccgagcccggtttctcaaaactaccagatggacatcaattttaacaatcttaggcaattgtctctgttcttcaagcattcccaatagaattaggactttgaattcccttgttcttgtgtagggaaatttcgaaaatcatgtagcaaagaaaaaaaggaaaaaattatcattttttacttatcttttatctttttctttgagaaatttggaattttcttgtatttcttatggcattgatcctgtaaaagtaatttccatcacaaagtaccttaatactaaatagtttctgaaaaaagaaaattatggaaacatgaaaatatgaaaacatgaataagtaagaaaatacccgtaagtcaattgtaagtaagtttcataaaagaaggaagaaaaaaagaatgtcaaaagaaataacattgtaacatgtaacaagacaataagtgagaggaaaaacatgggggttaataacgcaaggaaactagtttccaccaatcacaaagaagattaagtcccagcctttgtttgaagaaggttgtgtggttataatataaaaggactgttgggttttatgcccnnnataaaactcatttcaatacaatcagatttacttattaata

SEQ ID NO: 122382 - DNA, 664 bp, Cannabis sativa
gttacaatctatatagtccacctttgggggggggggggtaacacgaatcgtcttcaagcctcttttgccgtttacctctattagtaatggtcagtcgtgaccgttatttgagttattatgtcaggtgtattctgttgtttattaggggtatttttgtccttaggttggttagttattttcgttattttctctgttgagctctgtatatatacatttgtttcttgtatcatattatcaatcaataaactcaagactttcttttctgtcataatgcctttttgtgttaatatcagaaaattctttattcataaataaaattgtggcttgtacctgtacagagaactaagacaacttagctatgaataaaacagtcaacaacatattaaagttatagaatatttaatcaatagttgttagtatagttcactgatgtgcattcttcagtgctagtaatcttggtttgaattacggatgtaatgtgatatcaaagtgaatgtgttgtatataatagagattatatatcacaatgatcgatatgaatgaagctatctttattgacatgccgttcatcataatgacctaattcatattataacgatgatcaatagtagatcggcctaaatcctaagttatcatgaagtcctgttcatgttattagtttctt

SEQ ID NO: 122383 - DNA, 625 bp, Cannabis sativa
aattctcttcttctcgcccattcctattgcatttcgaagacttggtcgaagtgaagtaaaggccaggagaacctctccgagcttatatcagcagattcatggcggaggcaacgaaagttgcagggttaatcgaagaagggaaattgaccacgatactagggggcatcaaagttttcagagaactttgaaaggacatcaaaaatgaaggactagtagattctatgggtaacttccttgatcgtgcataaggattcatcaagcttgaagaggccattcagctagcagaagccgagctttagcctggccaaccaaaagctccctctgctggaacaaccgtccagctccctcactacccaagcaatttaagctcgagcggtaaacggtcgaacaacaacaataggcaaggtaatgaagaaaagggaaagtttgatggcaaaaccgaacaagcccctagagacaattcttccaacttcgctgctttctcagttttggctgaagatttggagactatctgcatggctagtcagtcattagctccatacaagaaacccactcccatgaaaaaggacgtaagtaagagagacatgaccaagttttgtcgctttcatggagattatggccatga

SEQ ID NO: 122384 - DNA, 1299 bp, Cannabis sativa
tggtaaaatattcccaacactatctgcatctctaaccacgctatcaaatttttcaagatcatgaataaattcttcttgagcatcatcaaacaattttgtaggatgatcatcgaccccttgcttacctaacggatatcatcgattcacaattctaataccatttattataaattttatcgattccaagacagaatacatgattctttaacatggtaatatttccttttgatatattaccacaatcgatacaaggacaccgaatttttttaggatcgctacaattttttaggaaaaactctaaaaagttttgaatccttcttaaaattgtagggtttctctcttgtcttccatccacgatttatcaattttaaaaataaaaataaaattcctaacaaacaagattgaacaaaaacctaaaagttgagagtacaatcctaggcacgcttagtaattaaatattataaaacatgttcatttaagaatcctaaaaaatattaggcagagtttctcatatttctataatatttcccaattatctaacaatgcaacaaacaatgcaagtaaatcaggtaacaaggtaaaataatcataaaagtatttaacaatataataattgctatcaatccaaccgcaatacatttatatcgcagaacctactcactactgatgaatatctaacatcttcaaacttctctataatagttttattaatagtaaaaatttattagtcaataatgcacctctagctagcaatcaatgatcaccgatattttgaattgtttttcaataacaatccacaacctacaatattaaatgtaatttaaaaaagtttaaattaaaattaagtgaaaatagtaaaaagtaactaatacatacataactagtgactacatacttacataactgcatattatttagcattacaattaatttatacttgctaaaatattactaagtcaaaactaactatagcattatactttgaaagccattacaatccaatagctaagtatatatatatacactaaaaaattaatcattaataaaaaaaaagctttcattttcattgtaatcattattttaactacatatttgagacgctaaatctataagtaggataaaatgtctcaatatatctttcatcctgtattttatttttgataacttaaaaataggataaaaaattatcttttttataataaatttaaggaattttttcagttttaaccaaaaaagtaacaatattacaaaaatacttttagttggccaaataaacaaatatacagcccaaataaaaaa

SEQ ID NO: 122385 - DNA, 1643 bp, Cannabis sativa
atattttgaatgagttttcttattttttctgttagatctaatggctttaatatctacaatatatttcttatctttcgcagctttatctcgcacttaaactcgtcccctaaatcagatctagtgctacgaagagagcacctaaaacttctttggagatccaacgtcggtcgggatcactcctccgagggtatttcgaaacttcagcaaacgatatgagccgacagtgtaccaacagtcggaactccaatatgaactaatcttttggatttatttgacagtgtatccagtttctcgtttgcgttgcattatgcacatgaactgctgggtatagatttgagtaatgttagaatttagtttgtgagtttttgttttctggttattatttattaatgtaatttctatgagttattgtttttaattttcagctgcatattgaaaaagaaaaaagaagggatgataatggtggaagaagaagacgatatacagtcatttaagctttattttattttattgaatgattagtaatctgagttttaagagaaccttagttttaatcttaattttttttgaaaaaatatttaaatatatatatgtttaaaatttaatagtatatttttctttttttatattaattttaaatatttaaataattttttattaaaaaattaaaattaaatgatttagaccaatgagaagatgacaagtgggcacttacctggcacttaacagccaggtacccacggaagttccaaaactctaacagaaggtatttttaccgcaaaaatatgacttaggtatttatctgctacttggagtaaaacttaggtatttttgcctcaaattactttatttggtattatgtataaagttagaatgatggagactaaaataaatattaaaactataatattatctctaattatactaattgttatacccatatttcgagggccaatatggttacaacgcatgtaaggaagctgaaaaatgaacgagttgggagtataaagaaataaatgtgttcaatcactcgcctcagaaaatacaagtggtagatatatttaaatctctccttaaaaacttaagggagattcataaataacaactattattttgtaagaccgacgagatgaataacaaatacataatgtccatcttgggatacacagagtaaacaatagaacaacagttagttggaaagtgtagataatgagttctttaagagcatgtaactcattgacccacatactcgtgagtatgttaaaatattaaaggatatacacaaaatatgattcacctcagaatcatcacaaacgacacgggatggtaacgtctctcgtaaatatatccagtcggtcctaacatcacagaagagtgtgagaagcattttagaaattatacttaggcccagaaactatcttcaaactaaacatcaaaagatgattatcgatactgcgagtcataaaagcttagttaacataactgttttttgataaagacaaggacggttatggaagttatctatttattccatgtgttataaatatgaaatgtaattattcatgtttcatgagtagttacgaggataagatctcaatgttgcgttttatgccctaaataaaactctttacaatctgattagt

SEQ ID NO: 122386 - DNA, 1008 bp, Cannabis sativa
ttgtgataaaatagtgctcttttatgttgtagtttttgatattaagaaactatcacttggggttcttactttgttccaaacaaatgttgttaatttttatacaaattgcttcattcctaataatcaaatgttcttactgtgtattttgttctgtatcatagtttgatttgcatgagaaaggaacacttggatgcagttaagtgttaataatcaaagtaagatgcatgtaagccaactagtaaaaaaaatgtaatattctagacttatagaacatacaaagtgtgaacccatataaacgagatgcattttaattagttacgatatatatttagtaatagttaagccggctttacaataaaagaaaacttacaaattgtttgcagctttatgtagttgagatttattgcaaaaaaataggttccaataatgggtagattgggattgggatctcttcgtgtttagccattaattcaattcttacgttttctctttcctctgaaagaaacaaggccaattaagttttactgtttaaccaaattcaatttttaacgaagaaaaagttgagatgaatacttacggcttaaatcgtagtagatgttgtacttcttctttgcccttttgaaaattattggctctaattcttcctctatatatgtcgattgatggaagctttttactcctcaatgcataattttgaacgtttttgctacttcaaaaattgactcaataaaggatctaataaaagagaaaaggaaaaaaaattaaaacaataatagttgggttttttcccaaaaataagaaaaatagttgagaataattaaataaaaaaaccaaaacaaattactatattatattaataccaaaaagagtaatttgcgggataaaacctaagtctaacggtaagaatagaaagaaatggcttggtgccattaatgatgaaatgggatcactagaaagaaataaaacatggattagagtacctagacctaaaggacagagggtaatagg

SEQ ID NO: 122387 - DNA, 811 bp, Cannabis sativa
  modified_base (757)..(757): a, c, t, g, unknown or other
agttcattttatgagagatggagggggtaacatcatcaataatatcattcctatgaactcttgaggttgtaaataaatctaaatagaagctaaccataaggtccgccaagcctgaatcccaatcgagccaaacaccatgttcgtcttgtaacttgtggatcgtactacaatgtttatgagcactagcagaggcatgaaagtatttactatttttgtccccttgcttaagcaaaagtttcttcgaacgttgtttccaaaacacttcgcttttagttaatacttcaaataattctttctcggcagtacgataagccaagatagagacactatcacccttcccttttagacgcctaatagtatttttacaatcaacaatttagtgtttaaaatttcctgtaacatcttttccccaaaccgccagcatttcaccacacttagagagttttgattgaattgaaactgtactatgctcattccaacagtcatggaaaatttggaaacaaagtggctccctcaaccaaaaattttcaaactgaaattttttgacaccattgaaaacattttatacaatggggtccaagaagattggatagtgattggatgatgaagcatgaagattaaaaagtttggctgattattaattgtttaaccatgaaagggaagctaaagctctatcaagtctcacctcagtctaattagaggtgcctctacctctttctcaagtgtagggataacctgttagaaatattttaccagnatctagatttactatcatgtatgtttcattaacatcctaatataaattctaaaa

SEQ ID NO: 122388 - DNA, 1053 bp, Cannabis sativa
  modified_base (479)..(480): a, c, t, g, unknown or other
  modified_base (1021)..(1025): a, c, t, g, unknown or other
ggtggcttgggagatcaaagttaagtcggttcaggaaaaattttcttgctgctgtgcttactggtttagtctataatctgtggaaagctcgcaatctatgtgtatgggaaaataaaaagctgactgttgcagaagtgttcgaaagaaccagaagtgatgttcttcaaagagttcaagcaatttggccgaaaaaggtgtcaactgatgacaccaactggtttcaaagtttatgagttgtgtaattgcagctgctgttgcattgtatagattgaaacagattaatgtaaagctagtcttacattgaaaaaggtggtagctgttgtgaaaagattttatttgtatagcaggttattattttaggccctctagttgggtgctatttgattgtacaaattagttttgagcaataaaattttactgattcatcaaaaaaaaaaaaaaaatcaggatattttggaataaaattttgagaggttttnntcttgagttcttgagagaactatttgaacttatcaaggagcattccttgtggcgttcaacctgacttataaaacgaatttccatcaccgtttgtggcgtcttccttcataccaaggttcatgcttaactaagcattgggtcgcgtttccacatctgaattttgagaattcttataggctaccataattggtatcaggtttcatcacaactgttggtgtggttcgtatcacatagttggcacttaaagacaagttactccttttcttcttcccacaaattgctatgaatacccctcactaaaattaatagggggatcagaaaaaagacacgaaaacattctttgtaagaaatactctatcattaataacagagactcgtagaccacgactcattaatgcccgaaccacgtaaaaactacctgcattaattatccctaagctctcattattacatattcatttagttgccggaaacctcggtcaatattttagtgctttcattgagacctgtgggaagcattgtgttgggctttgtgccctannnnnaactctatttcaatgtaatcttttctat

SEQ ID NO: 122389 - DNA, 3044 bp, Cannabis sativa
atggattctttgcttctgagttccttttccactccttctgtactctcaaaaggtttgttttccctatttgacctctgttttgtagaaaaagggctatgttggactcacatttttctattatttgattcatttttgcttgtgggtttttgggcaaaatcgtttattagcattgtgactctatgtttttgtagattgaatcaaaatttgttatttattaatatatttttaggaaaattttgacacatatataatgtcaaatttgtttagatgatgatatattccagttttctgaaaaatttagaagatttctaataataatttcaattttttttcttatgtcttttttttttgtacctcatccaaattcacccattcttctgttctgttaatgcacaaatttgggcttttcagttcatgatttcaaagtttctgtagatgggacctaatttttgatatgtttagtttaatgctcagtatatatatatccacaggtgggaataattggagaaggtgtaatctcaagaatgtggagttttctggtatggtttatgattcacagcatttcacatggcggctgctttatatgtatacataataatataagccaatctctgttgtttgtagagttttagtgtaactctctaatatttgattctagcttttgttttttcttagcttttaactgttgagcaatcagttcagtagttgaatcatttcacatacctttttcttcccttttactgtagcagacagcagaatctgtgcctttttttggccctctttcttgtaggaactttatccaaccatttgagtttcccccttcactcacacatcttaattagcccactgtaaattttgttgctctctctttctctctctttgattagagggcattggtctttgatgaacaggtcaggtcatctgttatccttgaataaaaacatgaactttttactaaaggttttgcttttgatatatgttttgtctttggttttgaaaaaaaatatagttttgcttatgggaataagtaattaacaattttcaatatgctataagtgagatttttcttcttctctttctttttgtttgagaatacaggttcatacgtggcatacaatgtttcaaggcttagagtttggaaagtcagagaaaaaccttgctctgctgtgttccaacccagttcattgaagcattgtgcgaaaggtagtgaaacgtttgtattttaccagagaccaaatgaaagattcctggttaaggctgccggtggacaacctcttgaatcggagccaaaaaatgatatgaactctgctaaagatgccttagatgctttctataggttttctcggccacatacagtcataggcacggtaacttatttaaatttaatgggagcagtcccagcttaatcgaatttgtttggactttgtttcccatcatttttggagactcatcatatcttttcaggaagcaggcattgagcattgtctcagtttccctacttgcaatcgagaagctttccgacttttctccattattttttgttgggatgttggaggtgaagcataaaatatttcgaactactttttttgaattcacatcataagttttgttcttatgcatttgatcttttcaattcaggctatcgtagctgccctcttaatgaacatttacattgttggtttgaatcagctgtatgacattgatatagacaaggtagcttttactgtcttatcctaaatattttcttaattttgcattctttttaaatttgttttaacgaagaaaacacaaattttttattcttatatttgatcataaaggtcactacatcagtgcctagttctttgccttattattttttttatagaggcagactatctacaattttacatggtaatatgggatatatcgagaattgtgtaactcgatatctattgcatatttcatcacaggttaacaagccatatctgccgttggcgtcaggggaatattcaattcaaactggcgttatgattgttgcatctttctctattctggtatgggattaagctttttgcacaaaaatgtattgtgttaagtattgcaaatttgtcattttgtatttgaagcctataatgttctgacctatcacattatttttcagagttttggcgttggatggctcgtcgggtcatggccattattttgggccctcttcatcagttttgtattgggtactgcttactcaatcaatgtgagttgatctaatctcacataagctttcatatacaatgcctaattagcggatattttgaaaagtattgctcggttttattgtcaaattatgacaaaagtttaagatggaaacttcacaaatttgattctcacttgtcagctttaacacctttcatgtcaggtaccccttttgagatggaagagatttgctttagttgcagcaatgtgcattcttgctgttcgagcagtgattgttcaactagctttttttcttcacattcaggttatgatatgtctaattacgatccaaacattcttatttttcgtgcccaaagctgattgtcttctaatgaagaaataagttatcattatcccattaactgatagacaaaagataactaaattacccattacatagatatttgagtctcttcaaaacttgtttcaatgcctgaaccttacttttccaacaaactcatatttaagggaaggaacaatgtttatatggtaatctgttttaccaaatagctgcatatttgagtctttagttactaacttactgtgatcatgtaaactatgatagtaatgtactttcagatttcaatgattctaagtactgaaatatgcattgattttcagacgcatgtctttaaaagaccagctgtcttctcaaggcccctcattttcgcaactgcatttatgagcttcttctcggttgttatagcattatttaaggtatcaaccgtctttttctttctccatggaacaatgttttgttttctatctctgcttgcttgggcataatagctcaattttcttcttttgtttaa

SEQ ID NO: 122390 - DNA, 2697 bp, Cannabis sativa
  modified_base (472)..(473): a, c, t, g, unknown or other
attgattcatgctaatctaacattggaaactactacggtgttggcggtgtgggtggtgcagttttcgactattttttcaaaccaacccgcatgcgtgtggtttttctaatttctcaaacctcacccgcaccgcgaaatcaaaaaactacaaaaattgcaccgctaaaaatggtgcagtacagttttgcgatttctgcgatttagactatcacaaataattaaaatatcacaaatacaacaaaacttgagcaacacttgtaaaaaaaaccataaagcttgaacataaatatataaaaagaaaattaagtttcaataatacaataattagtgtattattggacctaattattgtattattgaaacttaattttctgcgatttatatattggacattcacatattggacctaaataaatataaaaatttgtatttgtttttgcagtttgcggttgaacattcacatattggaccnnaataaatataaaaatttgtattttcataatgtgtggtgcggtgcggtttgagccgcatatgaacaagtcaaaaccgcaaactgcaaaccgcaccgcaccgcaccgcgcagtttaggaaatattcaaaccgcggccgcaccgcaaagaatttcaaaccacatttttttgcggtggcggtgtggtgtgcggggacggtttgagtggtttgatgaacaaccctataaactacagcaaaaacaaagtttgaaactatcactaagtttgaaatgtggttctagcatttttcaatccaaaaagcatgattgtataataatatataaatgtctttgtcagtttggaagctgatatgttcttgatccgctacgtgtatcattatttggttgtaaccggagtatgcattcatgaaactgagaaatttgtacttggatgtggcgtaaaccatttgatctattcgtagaagtagaaatcagtcttttagacaagttttgtttcgatatgtgaaatcaatgcacattctccaagttccattaagcttggggaccaacactggattggcgagtcaaattggatatagagcttcccataagaattctatgttggttagcttgtctacttccgcatttactactttcgctcaaactggattaaatggccttctcttctaactgagtggatctgcctttgggtctacatttaaagcatgatagattacatgaggactgattctagtcatatcaaaatggttccatgccaacacatcactgttcttcttcacagttgatagaattttctctcttacaactggaggcagattcttccctactttgatgacttcataggatcttcatcgttgatgcacacttcttctacctcctccattggttcaataatttttttcactcctttacgtggatctaattcatcttcttcccgaaatacccccagtgttggttgaacggatgttccgagttcaactggattctcttccttaaccataaggataattttggttgagacattataacaatttctcgcacttttttgatgacgcctgatagttccaatacttccagtattacttaggaactttatatataaatggtgaatataagttacagctccaaagtctactagagcaggtcgtcctaagataacattgtatgcagtgggacaatccactaccacaaatgtacaatatttgaaggctgatattacgttactttcagaaacttctccatttaatataattgaagttgtattttttctattggcagcaatatatctccgttgaagacttagagttgaattggacaaaatgttaagtttatttctaccagacctatagcttgaaaggcaactttgaagagaatgttgacataactcccattatctacgagaactctagacactttcttatttgtaatttgagcttctatcaccaatgggccattgtgtgaaaaatacacatgcttagcatcatcttttgtgaaatttattgggatttggttcatggagctcatctcccttattgacaggattgtcttcttgatccataggatatgaatccttagactcttcatcttcttctccttcatcgatgggttcgtcatcaaggtttgtttcattacgctgatattttcctttttggtgactggtcgcctcagtgggatcttcatcgagcctaattttggtatttggatcagcaccatcttggtaatgaagaccatattttattcgggtgagtaccataattatacaatgtaatctttgatggtattatggctttctttagctcttaagaaaatacaattgagaatgaaatatatgaataagacacttaaaatttttatgtggttggagtattaacgatccttagtctacgagtcaatattattataaagttggctagaaaagcctttaagattactgttaggttgtttttagtattatttttaggttattttttagtatatttttaatttagttctactcttgtttggagcaattttacgctttctatcttttattcttgcaaatttaaaatagaaaaagattataaaatatcaaagggataagatggaaaaaagataaaaaaatctcacaaaaagatgatgtataaaatagagaaaattatgcaagaaaataaatttgaaaattcaattctgaattcaactatgttctgattagatttttgaaaagttaaaacataaaagttctagatctc

SEQ ID NO: 122391 - DNA, 2484 bp, Cannabis sativa
  modified_base (44)..(45): a, c, t, g, unknown or other
actaataacagcaaactcccctaaaccaaaacgaaccctatcannaccaaaatcgaaccacatctctttagaatttggttgatggacttccttattgtagtgtgaaaaatctgatgttgcaatttataagactgaatatgcaataaatgcccaaaacaagttgcaataaacatagcacgctacttctcagtcaattttgctctaatatctactaaacatcatcattataagtctagaatatgattttaccacaaaatctttcctctggcttcaagtaaaattctcacaactgcaacacaaagaaaaaacaaaattagaaactgaaacgtatatcaaaacataatcatgaaaccaacagaatataaattttaccatataaccattaaaaatctaaacaaaaataacaaaacagaaacttacaccacatacaacacatgacaaaagcagctacactagaaacactctattttaaaataagacacaatagaaacttgccaatacaaatacaacatcatataacatataaaaatattaaaaaaaaactaaaacattctaaaccaactacgtttaaaaaaaaacaaaaataaacctctcaaattttattgtaaaaacagaacacataacatcaaaacataacctattttacaaataagaaactaaatagaaacttgccaacacaaatacaacatcataacatataaaaccattcaaaaaaaaaaaactaaaaagattctaaacaaaatacctttaaaaaaacaaaaacaaacctctcataattcatacaaaccaaaactaccaaaactcataacatcaaaacagaacctataaaaatctgaaacaacaaaaaaaattataataaataaaaaatataaacaaaacagacactaatcaagtaaaaataaaaaaaacaacacatcttcaaaaaaaaaaaaaaacaccaaaattaccttggctttcgcaggaatcgcaatactactttcatcctcagattctagatctccttcatcaacctctgccacactcttcaactttagcttctttgatttacgatcatcaggagaaacatcaggcacacgactctttttcttcgccaaagaactcactgaactctttttcacattctcagcaactttctcgtttattttcttactcctctcattcacaacatccttacacatagaatcgctactcttcctactcctcctctcattcacaacatccctgctcacggtatcatcactcttatcatcacccaaagatattttcctcacattgcctccttcatcaccaacatcttttctttttgaaccagaaggtgatggagaaatcgagcttctcgtaatcgtcgtagcaacacattcaaactcttacagaacaaaaaaccaaaccctaaaaatcagttctaattcgaaaaacacaaagaagaacaacaaagaaaaaaataaaataaaaataaaatgtaaaaaagaaagaaatcttactgattcaactcaaaatatatagacagagaagaaaataaaccgtctgagatcgtgagtggttaagcaatgggagagaaccttgagaaaactaaacaatgagagataaaaaagtaaagaaaaagaaagaaatgagcgtgactgattgggactaactgaaaaagggatatatagctacagcctataaacgtgtaatagacgtataagatatgaagaaataataaaacaaagaaaacggtatgcatggcatgaaaatttttaaaataaacggtataaaatcgtattaattaaggcgaggccaaatccgtaaataagtgcaaaattaggttctctggtgcaaaaacttcttatttatatggcgacagattagattatattgtcaattgagaattataaacctaagctatatacgtgacacctaacaaacctagtcacccttctcatttttcaatattatacttcattatcatatttcttatatcatttaaaaaaaataatagacgactaaatagaagaaacttaagtcacgcactgccacatttcttgtgtggtagcgcatcacctccaccgtgcattatctttcaatatgccattttctttcgtttctttaacttgaacattgaaagtgaggcttagaagaaagtaactcctaaattgagttagctgacatgcatgaatctggatcaagggtaagaaaagtatattttacttcatagcatgttatgttgtaatgcagttaatattattgagaattggttgatattaagactaagatatggttattattgttatataatgaaaagattaattgattaagcaatgacaatataatgattctatgaatatgagtaccaagcgtaggtacaggctcatctgattaggtgaagtgatactcttggtgatgtatcaagaataggtacgggcgttagtgatatgaaaattgccaggttatggcataaaatgaaatcgttgtagggtttcgtcctgacgatgtatcagacgtagg

SEQ ID NO: 122392 - DNA, 1031 bp, Cannabis sativa
ttatctttctacaagggtcaaagggtgacctttgactacccaagttatggatattacatatctgccacgacctagggctcaggtcgtgacaataatactatctttttattttatgagattaaaaagggttttaaatattatagtatatatgatatttataattttaaaacaatacatacatatatagtgatataaagaaaatagtacacattgtaactgagaaatataacaaaattgaaattgaaattcaatatctctctcacgacacacatacacactctttctctctctctttatctatctatctatctatctatctatctatctatctctctctctcacgcctctctctctacaaggagaattggtgttttctcaatctccatcacagtgtcttatgagttgagaacacattttgtgatcagaaaatttattcatcctattaaatcaataagccttctcttatcatgagtattgatgatggtttataagacatggtgtgattcttcttcaagtccattactagattggatgaacgaaatattacacgaaaagatttaaggaaatcctaataggaaataagaggtaatttcctaattgaactagttaaatttagtttatgcgatattgtgttgagatccgagatttaatgttcatatcggattcaaaaaaatatttttttaaaaacccgaatccgttcacactttccctgcgactctgatatgaaccctaaaaaaccaacaacagtacctataaatgatatacatgtttgaaaaatatgtaatttaagagacctctataagttacgtcaatatggaaaaaaattatcatatattgaaattattatcaacaataaatgttaaatatttatatatgtgatagactaatatgagaaagaaaggatcatattattaaatttatcgagaattatcgacgtatattttgtttttggccaaaataatatgacgttgtccagacaagtttactcacataaaaagtgaagtaagacctgtagggtgtgcaaataaata

SEQ ID NO: 122393 - DNA, 1296 bp, Cannabis sativa
cgggtatatgtataaataaattatatttaacgtgtttcaacgctctttttttttttttttttatctaaatttgttgtattattttttataaggtatattttgttgtttgagttttaatatgtatattgttatttttgattttttttttttcttaaaaattgttatttttggatttaataatgtaaattttattgtttagatctcatatttagttcggagtaattcgtggttagatttaaaagtttttttttggtggtattggttctaaaccgagactttaagtgcaaaaataaatttcgcacccgtcggtttagaacgattactggcggatcctcgccgttaaagggcaacaccggcggattctaagattattaccagcggactgttccgcccctaataatggtatttgttgtagtgaatgtcgagttagaattggcaccaaacaatatatttttttgtcttaataaaataagtataagtgtcagtttaaaatcgacgccaaacatacatgttgtagtagtgctccaacaaaaggcaaccttaattttgaatatgatatgcatccctctcggaaacaaataatgcttcatccttaaccttacacaacccaacaacaaaataaaattattattattatttgatgataagattaattacaattaaaaattggttaatcatatatagtcgtatatatcaagaatatataaatatatacatatataaacatgccgggaagtatgtaacgatcccatatctaacaaacaacacattgtgtgttttttttttttttttttttaattttgaagtgtttgacaagtagtatgccaataaagaatcgtgagagcaattttgaagtttttctaggaattttccaccattattatttattatttattatataataatattgtaagcatgtatagatatgttaatttccgaccatgacaaaaatctatcaactacttcattattgtgtggaatagagtcgactaatataaccttctagtaacattatgtatatgtaattgctgacagcaattctaaactagacactattagtattaaaagacattactattgagtatattttttatttttatatcgttattagtataattaagtatcaaatcttttatataatataatataatataatataatattttttagaaaatattgttaataatacgagtatctaagagcaatgcttatatatttgagtaatttgcggcaaaaccccttcaactattaatttacttgcaaaaaaccatccaaccttatattttggtgggaaaa

SEQ ID NO: 122394 - DNA, 504 bp, Cannabis sativa
tttaccagggtccgatggaccaacccattaagtggagataccaggtttagggtttgaggaaattataaattttattggattttacactacatgtgcaataatattgctcttttcaaaaggagttattttatggtaaaaattcaagaaaacgctgaaaaatatgagaaatccaagtaaaggttaccagttatcttatactctcatactaacacttttgataataaaccatatttttgtaaacttataccttaaaacccataaaaatgaaaattgccctaggattttacacatgtgggccgtatctgaaataacattaaatgggttaggcttccctaaaagaaatagggtttaagtgaatgatttgaattttcttttaagttgcgatcgttttatgctcatattaaaaggataattacataaggcattattttttgtaaaaaaattacatttttacgttttaagaattttttatacattttcacaattttttataaaaacaacaca

SEQ ID NO: 122395 - DNA, 1194 bp, Cannabis sativa
  modified_base (1148)..(1154): a, c, t, g, unknown or other
tagagatatctactattccgactgctatcctttgtaatgaccgcgaggtctaactctttttattgatttataaacgcttttattcaaaagatattttttttctttcatggaatgaagtttttttttttttttttttttggggggggccaatttttgattttggtgctctatgtttctatgtatgaaaatgaatcattgtatttgtaccacattcttttttttcttttttttttattttttatcttattctaagatgttctttccttttttgggaagaaatattttcattattattattttattattattattattattcacatttatgtccctgcagaaagaaaataaaaaaattattggacactttatgattttgtatatggaattttaagagttgttttggttggcaatgtgttttaatttgttttattttttagtaagttagataaataattaattgtgtatgtatggtatatggtatggtatggtatggtatggtgagtagtgttttttaatgttttttgtaatttaatatttaggaaaattgaaattttattaaatagttaaatagatgtttgatagtctaaaatactaaaaaaaaatcttatgttgaaaataagatgaccaaaaatagctaatcaaattgtaaacaaaattaaaacattgtagttaggtttaagctaacatctttcatgggttaagtattcgaatacatatttgaaagaaattagttatgcttagtcttttggaatataaatttattttggtagtttattagggacacttaaaatattcagtatcgatgatcaaactaataatggatgaagtacgagtttcctagagcaaagcatatggttcttgctcgcgggaattgtctaagacaaaaagagtaagaaaatacaccacgtgatctctccttttcacttagtgaaaaattcatgtataaatcatacattatgatttgtaattaatctttaagtgtacaactaaataataatttaggtacacttaaattgcacacactaattataatccaaattacataattaaaagtgttgtagtcctcaatccttattttaaaatagaaatgattaatatttaatacagtataataagtatgtacaatttaaggtgccgtttggtaacannnnnnntttctaattttttaatcacaaaataaaagtaaaagttttg

SEQ ID NO: 122396 - DNA, 635 bp, Cannabis sativa
  modified_base (298)..(304): a, c, t, g, unknown or other
  modified_base (461)..(474): a, c, t, g, unknown or other
cacgatatagatatgctatcagttatctattgttataatcccaataatcaatgagcttcaatgcattgcataccatccgtgcgcggaatggggagtgcctggccgaggtttctcggcgctggaggctgcaagcagcctcttcgcgaccgtaccctggcattcagacaaaatcatcaccttcagactgagaattctacgacatgtgcgtgtctgatgcgtgtgcacttgagaaatctcaagcatccgcgcgcgcacgtgtagtgacaccaccccggattttttcaaaacttcaaaaaannnnnnntaattcaaataaaattgaaattaaaatgtgtaaaaaagagaattggttaattttttccaactatccaacatagatgattccagaatgaaaattctattatttttcataaaaattttgacaagcatcaatcagtcatcaaataacacacagatcaacnnnnnnnnnnnnnnatcacacacaaatcgttttaagtcaaaattttttgaaagtgaatcaattaccatggctatgaggcaagttgttgaaattatttttacaaggatcttagatttactaacaagtatgttgtttaacatctaaatatgaacttctaaaacagatcggaagagcg

SEQ ID NO: 122397 - DNA, 1125 bp, Cannabis sativa
cggatactaaaacagatagagatgtatcggtgtatcccttttaaaggggtgcattatagaatttcctaataacttaaactcgtagatgaaaacatgtgcatggacaaaattttaaagagaatgaaagaaataaagaaagcgaagcctacaaagttagaattgaaattattttcaaacctaataaatttgtcatcacctttcacagccatatatccataacataagaactaccaaagttgccacctaataaccactttctattattaatactattatgttattaaaaacttaagtcaagccggctaatttctctcgtatacctctttttaattataatatataatgttcatgtttacttatattaatttcttcgtgtaaaagcatattcatatagatattaaattaattcattcatgtgaatttataagtgccgtgtctaacaacttatgagcacatttgctctttgtttttaatcattaagaaacacaacgaaaaaagcaaagttgaagtcttccttattttcttcttcttttcaataataacatgaatttggtttgcttaatctttaatgagtaaaactttgaattccaacactctttaccaacaaattctttggatgacaaccaataaataatttttgttattaatgtttgtgtatacaggtaagcttgagtgttgagtctctatctcaagtctcaacaattggaccattttaaagtgtacattcttagcttagtacgtgataatattagtatcaaatacttttgaaaaaaaaaatatgaaaatttgagaaatattatatatgagttaatttttatttatacataacataattcatgggctcgctttactattttatttcgtctttttcctttattaaattcttgaatgcattgatgacctttttgacatttgtgaattttaatttgtacgaaagtctaaagcaatagaaggaaaaaacaaaataatatcaaatgaatcattgtgatcttatactgcttatatctatgataattacttctcagtggcatgtttataatttcttacccctcccacacacacacacaagaaaatacaaataaagataaactatgttgggttcagccagggccggccctaggcata

SEQ ID NO: 122398 - DNA, 809 bp, Cannabis sativa
  modified_base (28)..(33): a, c, t, g, unknown or other
tagaaaagattacattgaaatagagttnnnnnnagggcacaaagcccaacataaactgtataaaatatatttagaatataaatacatctatcattactatatatacattatatatatacacataaataaaaatatatatattatatatacatttaaagaatctatatatataatactcaaaaaatatattatacctaaaaaatatatacagatatatacacagaacaaaacaaaaaatctatatacacagaacagagcagatcaacaaaaaaaaatccaaaaattaagaactcaaaccataaatcatttacagtgatcttgaaacaaacaaagacagttttcatagaagaaattttaaaaactatggagattggagatgacttacagtgagttgtctagctctttggggccgtttattttgaatttttgcacgaaatcagtcctcctccacctctggccggtgctaggttcgaaaataaagaaaacaaaaaaaatataaattgaagcaacaaagaaaaaaaacagaaacccatttcaaaaacatatcaatcttcaacaaaaatcaaataaaacaagaagaagaatgggcagagtaataaaatacacataccttggaagttttttgacgaagaataacacccacatacgatctcggcgaaaatggggatgagaaattagggtttgagtttgaagagaaaagagggaaaattggggaatgagggggtattagcggcagactattagtggcggatagtccgctgttaatagtaattattttttttttaattattattagcagcggggtccgc

SEQ ID NO: 122399 - DNA, 724 bp, Cannabis sativa
  modified_base (671)..(680): a, c, t, g, unknown or other
ttttcaaaaatactgtggttttataaaacaccagtaaaacacaaagcagaacaactcaaaacaacaataaaacaactaaaaaacaccagtataacaccagtaaaaattaacacaatatactgcagtatgaaacttataaaaaaaacgcagtaaaaaagtaaaaaatatcgcctgacagtatttttgtaaaagaatgacaaaagttagtataccgtgtaaatttccctttaaaaaaagattgtttaattttttgagtttaattatttatatatttttgaaagttaacgggaggatcaaacctactaatatcgttaaatttaacataatattcttttaatttttaaagtatattctgttaaaccaaaaaatgccgttaaataagtacttttaatatataaagatatatacatacaaacaccttgagttagcacgggttagtccggtgtttaggacccacctaaatttagagcacaaaatttgtatacaatatgttaatgtgttgaagagaaaaaatagtaattttgtaaaattttgttaatagataacacccaccaattatctttacttcgatacaacccataaaaagttttagctaggcccatttttttaggccgagccctattgtacttatttatttttgaggaaattacactttataccctttttatatnnnnnnnnnntatttttaccttcttttttaaaatatatcatttttacctctttt

SEQ ID NO: 122400 - DNA, 1356 bp, Cannabis sativa
ttgtatatgctatattacatacactatattatagtctaacaatcctctcttttgttttctatttcaattaattttgttaaacggtctggggacatggggctaactttttaactcgtttttctggttctattcctgactgtattttccgcgggagttatgtctctgctggtttggaagctattttagtagctgatttgatttaataaaagttaatttttttggttaaaaaaaaagcatttggttgaatggaatggatagaataagaatggtaatggaaaagtaattatggtgtttggttggcataataaatcaatagtggaatagactaaggaataaatttaattttttttaataatcgtaaatacaagaatatttttttaaaataaaaaaattattatcttagaaaaaataattcattcaaatatatataacacatttaaataaaataaatatatttatacatgattaattaattagacgttataataattttattatacatttaaaaaaaaaaaagaaaaatcttataagacattattattattataaacaaataaattgtattattattttattttagaaaaaaaaaaggtcattacacatttatattagataaataaaagataaaaatatatataataaggggaaaaaaacaaaataatgtgcggaaaagaattgtaattccatcaagtttttaatggaatgtcaattaattcctatgtagaagtgaaaagcaattcctatggaaaagtgattctatactaaaaagtgaaacggaaaaaaggattacattccaatggattaccaccaaccgatatcactaccttagtaatattgttcaaataaaatacataagttttttatactatgtgtgcaaaaatgactttttttattcttttgggaaattatttgaattaaatactaaaaaaatatgaaaaaacagagttacactctcaatgaaagaggtaaacaccttctacctctcaaaaaatgaagaaaatttagcttaagagtcaaatatggactctaataggtgatatataattttactgtgacaattaagagcacttacatcatatgttttaaaataatatttttaaaacatatttaaagaactaatctaaaaacacgcaacaacaaatgctctaaattcctttattttaatttttttaaaattaactattcatgctctacatttatagaataatattcattattttaaatatatatatttattaattgtttaggattaatttttctttttatattagaatatgtgtaaatattaatattatatatttgaaatgaatagaatatattaagtaacattttagtgaagtattttaaagaagttga

SEQ ID NO: 122401 - DNA, 843 bp, Cannabis sativa
atatatatatatatttatatatccatctaactcttagttaacctcctaaaaatattgtaccaactttgtgaggatttaattacaattgagaaaaaaaaaaatctcatgagttttacaaatctctccttattttttttattttttattttatttgtaaggaattaatttattattaaaacattttagataaataaatattgtattgaattagttgtgttatgtctaagtgataatgatattatatttttccttttatacgtatgtctaataacattgaagataatgacatttaaattcaattacaaagtttttgaattttttttttttttgcatatatagcataatatttcacttatttttatttatatatatctaaagcactgaatgtaattttttattattaaaatagagtttaatgttggtttgattggcttctttacctaattatttaattgaataacaccaacatgatttatagctataacacattcaattttgttggtaattaattactcaatttgtttttttaatgaaaaatgtaaacttcattaactaacaaactcaatcaccaaacaaggtaataaatcagtaggaacagactccatactgaaagtacgatcagggtacaaaatagagactctagcaaagctatgagccactaaattagcatatcctttaacaaaaataacctcaacggtacacaattcaacaagcaaatttttatagctttgaatgacttgaccaaacaaagaaatcatacaaatagaactacgtaatgcttgcacaaccccaagacaatcactctccacagtcacatgatgccattgcttcaatttgatccaa

SEQ ID NO: 122402 - DNA, 742 bp, Cannabis sativa
tgtataaaaaaaactagttttcctcattttctctacacttatggatagagataatcaacaacaacaacaacaaccaacaatatgtcccataggacccatactacatttcatttttttttttaataatggcaacagttttactcaatatttattcactggaaaaatcaagcttaaaagaatagacaaaatatataaatcgacaaaactagcattacctcataaaaaataatgtaaaaaaaaatattcttacctctttcactcaaaacaactaatgaaatattaagaacttggaaaatcaagtcctaattttttttttccccaataaccaaacaggaataaggaacaaacccaagatttacagaaatgcagaaacgaatctcaagtgaagcttaaaataatttatcccaagaccagttgatagttaaataaagataaaaaaaaatagaaagcaacaaacttacgtgaaatttgaagagatctaatctagatgcttaatcaaatggtgaaaagtaaagattttttttcttctgtggcagtggcagtggcaccaagcaacgaaggaaagagattgggcgccaaaaaggaaggagtaaaaagagagaggaaagaggaatgaggagatcaattaaggagaagaaataaccgaacagaacagtgttcagttctctagatgtaccgaaagtcaaattttgactgcacactttcaccatatttattgttggggttttttctattttgggtt

SEQ ID NO: 122403 - DNA, 1330 bp, Cannabis sativa
aagccatgtcttcggagtatgtagttggaggaaccaagccgaatcgtgtctactgaagtaacactccctcgagtacttgttcccaaactggttgagaacccaactataaaaagtcgagagtagcttttgatcaacgacttgaagtgggacacatgtgtctttgatgctgtggacttcttcttcattttagtgtactcaacgaactacctaggccactttctctatctctggttctccactagttctagagctgtctccaagacctgtatctcagaatcctgagtatccccagtgctggtgatcttcgtgttgtcaggtgtacaaaacatatcatcatcatatggtctataataatttgggagaatgatttcattttcggtgacttaggctcttcttatgattgtggatgtggctatggctgtgtatctggtgtcggccttctaggatcttacacgagtctcattatagtcttcgaaggacccataatctcgttctgtcctttcaaaagagcagcctgaccttacttcaaagctagttgttccctctccaaaattgccaaccttgccatcatggcagaggatactgattctcgaggctctgaagtgttgggaatagatgtagatagggcaacattagactcatctggtagtgaagatggtgcaggtggtggagacggtgcaggtggtgtagagtctctaaagattcgggctgcatccgctcgttcttttaatgtcgaggcaagcttctgggactagcttcgcaaaacatcttgtgttggttacccatcgtcacccaacactagttcctccaagtcaataaataaaggcgcctcaccaccagtgatgcaactcacaaactaagtctcattcacttggggcataacatagagtataatgtcaactgaaaattaaaacaaatatattaatagatggaaattaacataaaataaatgtaaagcgtaagaaacttacatttctagcaaataatcgtatcacttcgtccttacggagtgtcattttcggcttactctcccaattgaccattctcgaaaagcaatgcaacatcttcactgcatactcattgcccagctccaggatggcctcgtatgctcaatactgcaacactacaatatagccgtaagatgagtatttggcctccttctgactaactcccttttcaatcttcttaagaatcttattcttcacatctatgcagtcttcactacaagtttccatcaacttgttgtacaaaatctttccccacgggtactcgtaagagaatagaaggttgtcaaccattcttatgaaaaaaggaggaacgacagtcttct

SEQ ID NO: 122404 - DNA, 1214 bp, Cannabis sativa
taacaatatatgatttctcaaagatttgaatatgattaaatatcttgctcataagtttatttggcatatatgcctatactcatatatgccaaataattttttagtttattttggcatattgaaatcaatttttattcttttgtttatatagtagccttttcgtatagcctatcatcgtatatgctaataaaagatgcagatgaaaagatagaggaacaggttttcaccataaataaccaattcacatagtgaagaaaataggaaaaaatgagtactgttctaattaattggtttttatataaaaaatagaaagtttacaaataaactctgcctattctatttgggatccgaaccaaaaagagaaaaaaaattaattattcaaaattataaaatgtggtacgcatcccataacttgttaggtatgatggaaccatgatatcagcaatagaattaaatgtgtttaacaagctactaatatattaaatataaaaaacggtaatataataccgtaatatcactaattttaaaactcacgttaatattgatattaaattaagaaaaacgtattgagatgtaaattttcctatattatatatatatatatttaatcaaatttatatatatttatatttatattattaattgtatttataaaattataatgcatttttaaaaaaacagtgcactgatatacttctacttgttttgatattcgaaagatttttttagtttatttttttcatgctagtgtacattatagttatttaagacgtcctgtaaattttcgaaaaaattagaaaaatttaatacgccgaaaataaatttcaaacgatctattacatgtgtgactcttttatttagagtgtgcatttagttaattatgataattttagttaattaatataatattgatttttttattttattaaaaaataatatagcaataaagaatatttttgtgtaatttttagtgttatggttagagtgaaaatagttttgacatcaaatttaatagtagtgtcacaccaaatttaatatcctccttgaaaatgattttatgtgattcgtgtatgcatatgaaatacaagagtaaaggaagaaaactcataattatatatgatagagagataatggctttaactctgatgttttattttatatattacctataaaatagtttaaggaagaggtttcaatggttacatttttattgt

SEQ ID NO: 122405 - DNA, 1770 bp, Cannabis sativa
  modified_base (647)..(648): a, c, t, g, unknown or other
ccaggtgtaggctggctggccccacaaagtttggaggctggccagccaactcccttaggattgctggttcgtcattttttatccctcctaagtattcggacctttcgttagttgaagtgttgagtagatgatttgatcttcttgtttacgagttatactcttacgtgtcattgatcttggccacgtgaacataccacgtcaaatgaataaaaatcacgataacaatgcgtagttactaatctaataagtatccttgctaaatttcaccattcttcgttccactaaattatttgaattgaaaatctaataaatgttagagagccactcactaactctatacctttttttctctttccatataaatataagaaaaaagacatataagtaaaaaaaatatataagtgagataaaaaattagaaagaaagaatagaaaatgcatttatttattgtgtgtggtatataaatagaaaaaaatatatttatttattggttttaacttactaatatagtatttttttaatgtaaaaataagttagtaatatatatatttttatatataaaatgtatctatctaaccatatttttattggtttaaagaatataaaaatattctgttaaatttaatagtgttagtaggattagtttnntaaatgtatataaatattaatattatttattttatattaatttaaatattttagattaattataatatataaatattaatattaatatattgtttgtagtattattattttttattgttgtttttaatattaggagtatgttcaattttaatatttttaaacttcatatttattttttcaaatttttaaaattttaaatattattttttttaaaaaattaataaataatttcttttaatttataaattttaaaaatacagtattttcctttgggaaaaaagattgcagacaccattcaataattttctctccacgtttttttttataccaaactttagttttacttttcttacctatagtttctctccttctattcttcttctataccgaacatttttatacaaatatatattttaaaaaaaatacaaaatgatttttaattttttatattatacacatttcttctaacaaaaagttatcaaattctttttttttttttttttagtgtaaaagttatcaaattcttaatatatgtatttaaagaaaagtcagaaaaaaatatatttggtatttttctccgaaaatatataaagatattattatatttcttaattacttggtactctattaaagaaagaaatcataaagtaagttttacacaatgaaataggaaagcaaagtctctactaaaacttcaaaatctatgatattactaatgtttcctttcggattgttgacatataaattagattcatttccctagctggtacgcaatttatatcccaatctacaaataagttacataatatttttttaaggagagttacataatgttttaaaattttaaaagaatataaattataaaaggtatgtattacgaattgattaatggtatagggtggcacagtttttggaaaagctaaaagttggtttttgaaaaaactgtgataaaaatatatttgacaaatcgtcaaaaaatagctttttgaagaatttttggagaaataaaagctaaagatgttccaacctaacttttagaaaaagttgttttgattaaaagactataataattttttttttgtactaaaaccatatttacttctttattacatattaaaaaaa

SEQ ID NO: 122406 - DNA, 1938 bp, Cannabis sativa
  modified_base (42)..(49): a, c, t, g, unknown or other
  modified_base (318)..(329): a, c, t, g, unknown or other
agtagttttttgttgtgaccaaaagtcacatttagtcacaannnnnnnntgttgtgactaaaaagttatcactaaaagtagctatttttttttatagtaaataaaagtgttattttttttaaaatattataatttaaatttaaactcattagacatatttctttagaaaattaaaacccttaactttatttgcaatcaaatttcaaaaatcttgtgggactatttaatacccaacctatactgttttgggctgtctttttaaaaagggattatttcaataaaacataaaaataacaaaaaatttacaaaaatacggtnnnnnnnnnnnntaaatatttttatgatttttttattttattttatttacagaaaattatacgatttttttatgttgtaatcttgttaatgtgttgttgattttttgttagctgtatgtgattttttgttattattttgatgttattttcatgttacttttatgtagttttcttgttcattttatgttgtttttgtgttattttttgaaaaactgtaaaaatgtgaaaaaaatattctttgaacataaaaatgtaattattttacaaaaaatggtaccttatgtaattattccttttaaaaataattagtttttttaagacactttagcttttaatacacatttacagtgattgtaaacgtatgagattttaaaaaatgttaattataaatatctaagttgatatgaatgtaataaaaaacatattaaaattttaaggcatgctattattaaccaaccaacaactttaacaatatacttagcattttgaaaaccaatatcaaataacaataattatgtagcagaattagcatgtaattgtaatatactaatgaattaattgattacgatacgtaatgatagtttatagtataagttaactgtgattacattatcaatgttagtttttttaatgcattttatagtttattgtttgtgaaggtataacatgaaaagttgtaacattaataacaacaataaacatgtagcaagattaggattatcatacaaattgtactatactaatgaattgattatagtaatagtgatttattaactgtgattatatattattaatgttagtttattgatgctatttatagtttattgtctgtgaagataagatgaaaagttggatgtagtttttgtaaaaaaatttgtatacattttgctatataggattatatatatataaaagtattcaatgtattaatttagattatttttttttatatataaaaaggtaaagttattagtatattattagtatcattggtaactaagaggtttattgtgaaataccaagaaaaaaaaaattgggaattgaaactttttttttttatttattttttattttttatatattttggtataataaagtttggaatcatgtatatttatgctgatgtgacacgatatttttgtaattattttgaatttgatgtatgtttattattattattattattttgaaagaaataaatataatatttcaaaaataagaaaaatattataaaattaaagtattgtggtaattataaattaaaaatattatggtaattaaattaaatttataattaataacaaattttgaatactattatatattttttttatttataaataacgtttaaattaaatatttatttataaaaataattttgtttattgaataacacattcaaaagaaattaattatataattaaaataaaaattaaaaatataatacatgtatttcacgtaatattaacctaatatatattgacaaattgataaagttttcatttttttactaattaaacttattggatttaaggacttttttctaaatttagtaaaaaagtctaacatagatgaaagttcagggggcataatttagtgtatgtcaaagttcgaagggcat

SEQ ID NO: 122407 - DNA, 1323 bp, Cannabis sativa
tatatacaactgacatttgcaaaaacacagtttttcacttccaaaatagtagatagagatctacgattcttaagcttctcccacattcttagtcacttttattttttttttcagcaccattttttttttctttgagtacattcttttctctcttagtttgtatcataaaaaacttaattttttttttctaaaatccatttttatcatgcttttaaaaaagaattataaccaactacatcattaatggtttcaatttaagaaaagtactatcttgacctatattttagtatgtgggaagtatatgttttttttaccattatcaaataagtcattccaaattaaaagtaatcttttagtttattttatatttaattaaccaaaataaaatattttaatttagttatataattaaaaaaaaaacactaagacattagtttggttttgttttaaatttttaataagctccattttaaggttatattatcccatatgtgtttttgttacctatttaattaatttttaaactatagtttcattttaaagttatataatgttattgatcaagatacatttacgttattgatcaagatacatttacgttatttattttttaatttctttatagcaactttcacgttaccttccaatataattaaggagttacaataaaatataaaaaaaaaactaccaaataattaattagtataagaaatatatgagtataattttttttttctgtagtataattattgtataatatttaagatatgatttagtttcttcacaaattgattgtttttagatatttattgaaaataactctataaaataagcttatataaagtacgtacataccatatggtagctttaatatgaatttacaaataatttttagtaatttataaaattagttgacatatttgtttgttttatctggttactttggaatcatagaaataatcttttccataataagaagttgctgccaccctggcatctttatgatcaggttgtgagttatctattggagtatgagcatgctaaccttccaggttttaagccagacagtgtcaatttcagatataatgagcaggttcaatcatcacagcatgaaggatggagagttaatacggatgcgggtgttagtagtactgctaggaagcatagtctgggagtggtggttacagatgaaaaggatgatattaaggctggcttgattatacctattgtcggctcagttccaccggaggttgcggaagccaaagctgtcttggctgctatttcttgggtgcaagccaccaagtgtaacaccctaactacctt

SEQ ID NO: 122408 - DNA, 1281 bp, Cannabis sativa
attttctagtatctatagatattgtgaaaagcctacaataatatgatatcattgtgcaaaggaatggtctaaggtaataaaaataataattaactctttgttttcttttttattatttaatagcaaagaaacgtatatataaggacaaaattcggtgattatgctcttcttttgcttgggtcatttttcttttctttaattgtgtttttttatatttatttatctattttgtttttttttttaaatgacctcattaaacctttaaaattaaatttagtggaataaagctcaagagaaaaaagagtgtcaagagatatcattaatcaaatagtctacctgcaatataatacaaggactaacaaaaagattaaataaatattaaaacaacatatacttcactatatatatatatttacatatatatatttatatataagaaaggtagaagaagaatatatatagaaactctcattcacaatcttgagcgtagattagtggagatcaccatgacttgaatatctcaaatgaccctatgaacctaggacttaacttgtccctctttccaaagcgcttgacatccttcattggtgagattcgcaggaaaacatgttctcttacctgaaattctatatctctgtgcttaagattagcataacttttatgtctgctttgcagcgcaagcatcgagccttgatcttttctattgcctcacgggtctactaagctaattcaggacccaaatattttctttcttcagttttatctcaatgaatcaaggaacgacatttcctaccatacaacatctcgtagggagacatccctattttactatgatagctgttgttgtaagatagttctatcaaatgcaaatatttagtccatgaaccctcaaagtctatagtcaggctcgtagcaaatctttaaatatttgtattgtcttctcagactgtccatcagtttaaggatgaaaagttgtactgaacttcagttttgtacccagagctctctgaagactttcccagaccttagatgtgaatttcaaatctctgtctaaaataatggattttagagctccatgaagacaaattatctcatttacttacaactctgtatactaatccactatataggttgtctttaccaaaaaaagtgagttgactttataaaagagtccactaccgaatcatacattcccacgattctaggaaactcaattataaagtccaatataacatcttcccacttccactcagaaagtgtcaaaggttatagtaaccttgc

SEQ ID NO: 122409 - DNA, 2129 bp, Cannabis sativa
gatccaattataattggatatccgattctattggatcagttgggattggatcggtcggttgagattggatcggatgactttctgcacactccaatgcattgtatgtttcttttatacatttattttttgtaaggaagcatattgtatgaaatttatatattagcctacgaggttctccaaattgaatgaaaacttggaccgtgttgtgttgttcataataaaaattatttatttatgtttttgttttagagaaaagatataagtacaataaagtgtttatatatatatatattattaaatagattaaataagagttaaatttacattttgcaatgacaaataagagaagactgttaataccttgacataaaaatgacaactataaaatatttattgtgggtgggtagcttaattttgggagtatggtgagaaatttctacagaactggaacacattcattaatcattagtgtgacagaaaattaataatgaaattaagtaatatttcatattattataattctcaacctccttcggccactcctatcaaccgtcctcacctgcctcaactacctagttttgtcaactacactacccaaatggttggaggcaaggtccaattcaaattcaataaacccaactaattcaattcaatttaatttgacaaaagttagattattattagattagatcggtcattgaatcttaatttcaaaattaagagtgttcacagattagtttagtctgaatttttaattttttcaaatcaaacttatattacagttttttaaaaatttaaaaccaaatcagacaaattaaatgatcaaaccaaaccaaaccactcaaaaacggattggtttggttcgaaccatgatttgtatttcgtagttattctattttttttttacaataattgtttattttttcagtatttttttttacttttaataagtttataatacacaaataacaataaaaattattactgtaacaatataaactcaatatcaatattctacctaaaattttcccaaaaatatcaatattttataattatacgaattggtttggttcgaaccagtatcaagatttctaaaattgtgatcgaaccagagaattcaaaacggttcggattgatcaaatcattcacaccagattcatttggtccagtttcaagttgtttagtctggattgattggagtttggaaccacggattatggattatatgaacactcctactcaaaatccaattaaaaatcgatgaaatctaattatatttaatatgtattaaaaattatttatatttatttgtataataaaaaatattaagaaaatatattttaattatatttttactgatttttttcgttaaacttgtaacatttaattgttttatgtatttgtttatgatattttgttttatttgattacttgattttgttatcgattgagttatttcaaaattttagttgcattaaatttgaaataacgatatttttattgagtattaaactcaaataaagagaagtatttagttttttacatatttttcttcatgttcttaacttaataattaaaattaggagtgtaattagattaaattggattagattgatgaataattttttactaattggattgaattggaatgtattagaagaaaaatgtaagagcactcacatcagtttctctattttatttttcaaaatatctcattaaaactttattttctttattttacttcatacttttatattacatttacatcatatatcaacttttctattatttttgtgtaccatttaaatattatattttttaatatattttattatataaataaaaagaattaaaaaattaaatgaaaaagaattaaaaaaaaaagagagaaaagtactatccataagttaaaattttgagctattttggagtctctttttgataacatttatctacatttttaccttttgagctattttagctcatgagatataagtgctttaagacaatctccaataaaagatttaaactttgtataaaatttagcacaaaaaataagtttatactatatttgacttactatttataattgtgctctaatatacaaaaggggtaagttgaaaaatgcc

SEQ ID NO: 122410 - DNA, 978 bp, Cannabis sativa
  modified_base (30)..(47): a, c, t, g, unknown or other
atctatattaataagtaaatttgattatannnnnnnnnnnnnnnnnnagggcataaaacccaacagtcatctattcttttcttatttttttttaagaaaaaaaaatatttttaccaaaaaactttattaatttaatatttaaaatgtgatgtgggactatagagaaatcttttagagttgtcaaccactataggttacattaacaacttttaaagttgtcaaccaatattatgggatgatgtgttacttttaacaactatgggtgttgtctctcattagaaatgctcttagagaaagtgcttgatgatgtggtatgatgctaaccattagagatgcatgtttaggtgtcacattaaaaatcaatattgatcccatactcaattttttgaataaaactaaaacattaaataataacgattggcatcatagtagtaaatttgaagattgtttattattggagtacttttaaaagtaaagagtgtaaaaaataatataaaaaaataaaatattatcttttaaatattatatagagagttttgatatttttaaaaagtgttacaattgaagatgctttaaaatattttttatttacttaaaatgtgtttttcgggaatagttagtctagaatttgctcaactatatatataaaaatatttaaaactattttgtgggacataatttaaaacaattgtactcgctataattaaaaggatttttaaagtacataaaataactttttgtaagcaatttaattattagatgaataaactttgtaaacaattgtactccattgggataaaatgataatctcctgtatatataaggcaattcataagagttgaaattgatgaatatgagctgtaaaaacttacaaacttataggctcttgtatactttatttatatagaacaagcaatacagagataacagaattctgttatgaatgagctgtgcaagagtgacaactcttacctaaac

SEQ ID NO: 122411 - DNA, 1509 bp, Cannabis sativa
tttaataaaataaataatatttaaaatataattaacatttaaatgatataaagattttgtttaaaaaaaaatgatataaagataaaatataaaaaatttatgtatagtgtaatataaaaatttgagataaaataaattaaatttttaatgagctattttgaagacaaaataatacaagtaagtaaatctgaaactaatttaaattattttttttttaaaaaaatacatattaaattcaaatttacaataactagagatgtagcttcaaatttttaattgaataatggcaaaaaaacaaggtacgatgcacacactttatttattattagtagtaataattagaagtagagtgaatattgagtcaaaaaaattcagtttatatatagatagaacatacaaactttattaattagaatatggagttacatgagtgagttaccgacaacttttcagaaaagtttaaattttttgaatgaaagaaatgagtgagtttatatataaataaatatataggaagagaagggccacaaaagaagaggggatcagatagagaagtgactagtgagtgggggcatgcggtgtgactctgtgtaataccttcaaattttggtggtgttgaacctcaacaacgcatttcaaattttatttgatttgatttgattttctttcttttcattccctattcatatcataaccctcaactctcattgggatcaaacattttagctctccatatcaataataatgtcttttagtaactttctatcagtactattttctttttattttcctgatatgataatttttgaatggaaacaagtgtaaagaataatagtgttctgtgtatccaaacacaattagtcattcagatacatccacacataccatattgaaatgaaattaatttataattgttgatgtgatattatatgttttactcctgtcctaattagtatcactcaaatataaaagaaatgattaatggaaggacagttggctttgaaagctaattttgtgattctaaatttttaggatgcgtaaacacctggacataccacactgactcaagggtctacactctacaatctacacgacctctctggctctctcctctcctaactttatcaagataagattgttcttattttctaattcacattttaagaatacatacaattcaaaattgactaattttaccatcatttttgctatttgtaaatttattagtgccatatgagaaaatatcaagttttcgagtttaggaaaaagaaaaagtagcaattaattaaaatctattgaaaattaacaaaaaaataaacagtaaaaattgtaacgtcccccgctttaagcctccacgagtatgtcactttggctgctttatggactgatgactggtcccagaccaacacaagtgcttccagcgtgctttgtcctcactcgcacgtttcttgagaaaacttctcaggaggtcacccatcttgaaactacttcaggtcaagcacgcttaat

SEQ ID NO: 122412 - DNA, 2136 bp, Cannabis sativa
agggcataaaacccaaaagatacttggtattggaataaagacactgctggcttttatacagtaaaaagtgcatatcaatatatccaagaactcaaaggggcttggaattcagatatggaagataaggtgtggaagactttgtggaagattaaagccccacctaaagtactccatttgatatggaaggctttaagcaactgtctacctaccctcaccgaactctactccaagcatgtacctgtccagttgacatgtccgttttgccatattgaggaagaatcaatagctcatgtgttgttgcattgtcagttcagcaagtcttgttggaaccgttctggtttggccactgcccctgcccactgcaatttctttctctggtttaagggtgttgtcgacaagaatgcaccagaattgttggaggaagtcgtgatgctttgttggtcaatattccaagctcgaaatggactaatctggcaccagaaagcttgtaatgcagctgatgttatgttcacagcaaggttaactttagcacaatggaaaaacgctaactcaaggaattttgagccactgctggttccatctggaacttatgacagtggtgagcgttggtcaaaacctgctgctaatatgctaaagattaacgttgatggggctgtcttccacgctgcaaatgcatatggttcgggtgtggtgatcagggacactgctggttctttgattgaggctttctctgtgtacaacctcggctgtagtcaacctgagattgcagaaataattggcataaaggaggcgttaagttggataaagacgcaagaggatcaagtgattcaaggtgttataattgaaacggattgccttgttgctctgcaagccttgcactcttcaattaggatgccttctttatttggtttactagtttctgaatgtcatgagactttatctaatttgcacaatgttgagatttgttatgttaagcgatctgctaacagagttgcgcactgtgttgcaagaaactcttgttattggtcaggttgccattttgttgaaggttctattcctatggaacttcactctttgttaattgccgatttggttgattaataaaaatttgaaactttctcaaaaaaaaaaaaaaaaactcctcttaaaaattagtgtaaaatctctagcttgtataatcccatttaattacacttgcaacaagcatttcttatgtcacggccacaatgcttgtgggaaaatttcttatgttattcctaaaaattatgtcttttgctttctagacaacaaccaacattttttcctgttgtaaggacaaatcttaagtttagggaatctaaacttcaagttaacattatatttttttgagtctttttgttctttttgaatcatttagccacatttacataaaattcatttgtgtccttctcataaattcatatattgttcataagaacaaaaccatactgcaggtaaaagtaactaatgatatcaggtcaatcctgaaattatggagatgggacgttataaagttttgggacccttgatgtatatagcatgcacaaatgtaagaaggaaaaataaaaggaactttattattcacttaataataatttgtgtttaatttaattatttattataatatttatagtttcaatattataaattatataatttgttcttaaaaaaattacaaaatagtctttttagtttatttatgtcaaaactaatttaaattaataataaatattttatgggttaattgcgacaaaacccctaatagtttcattttacttgtaattaacccccaaaactcaaattttggcggtaaaactcccaaaaccagcattctgttagcaaaaacacactttcgttcccttaactccgttatttgccagcgtggctcagttcagttcagctaacgtggacacagtgtacacatagcacaatattattggtccacgtaaatatttttttaaaaaaataaaataaaaattaattaattttttttaaacacaaaaaaaaataaaaaaatcattaaataatttttttttctttttttttcctgtcttttttttttcctttcttcacgctcactctctctcctctctcctctctcctctctctctctctctc

SEQ ID NO: 122413 - DNA, 1360 bp, Cannabis sativa
  modified_base (1329)..(1334): a, c, t, g, unknown or other
actttttatgccatatttatcataaccttaatatttttctcatatttttgaaaatagtcattctttctaattaaataaaaaaattaagcataacaacttaaatttttttaataatcaccattcatagataatacctattaagagtgcactcatattattatatatctacgacataaaattaagtcgatgccggccccgcactatatgtgtagggataagttgagaatattctttttttattacaaattaactaaatacaattgcaaaatagttttaattgataaatatcttcttttataatcaaaatgaccaaatataacctcacataatttatcaaaattagagtccctaatatacatattggggatatatggcttataaaattgggtataaattaaagagtattaaaaaaaataaaaaattaaaataagaaataaaaaatgggaacttacaaaatactagaatttgtgttagcttttacaaaaatactgtcacatgaaattttttaaaaatactgtgtttttataagacaacagtagaacacaaaactagacaactaaaaacaacagtagaacaattaaaaacaaccatagaacaacagtaaaaagttaacacagtagtgtaaaacttatacaatattttttaaaaaaatttccgcccacagtaaaaaaaaagttaaaaatttcagtatgtggtgttaaataatccataaaaaaattgatataaagtgtaatttcctaaaattataaattagttttctcttgctgtagggatatatatattatatagagaaattataaattattttttttatatgataaaattattatagttatattttgtctatttttaagaaattatatttactatatggagaaatagaattcaaatattagcttgcatgtgttcttatttcattttatacactattttaaattttgttcatatttttcaatcagtaaaatactgattataattatagtgtacactattataaaaaaaaaaaaaattggatatattttttaaagtataaaataataaaaaatatttttagcttatgagaaagagtgatacacccacagctctttaaataaatatccaaatatgtatatcaaatttactatagcagtgaaagacttggtaaaaaaagggaaatttcactttttagccttaataatacaagtcatatcaaaatttataccctcccttaatttgtacaaatttagtccattaattacatgaacttccattttacccttttttttcataaaaaaaaaaaaataaaatagctaaaatctgaaattgatatttctctctctcttccctctnnnnnntgcaccactctctctctctagaaaaa

SEQ ID NO: 122414 - DNA, 999 bp, Cannabis sativa
aatatgatatataatctaattcaatataatataatacaatacaataaagatgagataatcaacaacacctaatattatatatatatcctatattttggttcgatacaggtcggttctaaggtatatgaaatttaaggtaaaattaaattttgaagtccctatatatagtttaattcttattaaaactcttaaaagttttaaagttcaaccgtttatattataaatacacattagatatttaaaaaaaaataaagattggaaattgatctctgacctctcaacttaaagtaaaaatttttactactacaccaaacaatatttgttatattttttattatttaatatttatctatatattaataattttttttcgcaatttcgagatttgagtattcgggaacccgaagcgcagacctagctcgtctaccctaagagctggcactacaaccactagctagaagtatatatatatagtactatatagtagaagatgttatgttacatatataattaatttactatttttttcaacgcatgaaaaagaagaaactttttaattttgtagtatagcttttggctgtgttaaactattcttagtcaaaaggaataataactttatttttccttgtttgcatggctaaaaacgacatgttacgtccatttcatggttgtcaaaacgacaagatactccactatagtatatctagacttacattacaaagaaagaaaacaacactttaattaggcaatgtacttaaacaattttgctacacttttagcctctaacaagattaaaatgttacacatattcaaattataatgaaataaagagtgtgtgtgggaggagaaattttctcaaaccaacaaaaattaaaaactattgtctaataaatttacggcaaaaccccccaactatcaatttacttgcaaaaaaccatctaatctcatattttggtgggaaaatcctccaaagtactgttccgtttacatttttaaggt

SEQ ID NO: 122415 - DNA, 1208 bp, Cannabis sativa
attggggcccataaataattagattcataaataattataaaatatcaaaaattagtgctaattgcctttactaatctaaattactaaagcggtcattacaaaatcattatgcaattttgtttattttcaaaaatgtctattatgccaaattcccttaatgctttactagcaattgaaaaacttaatggtgaatatttgcttaactggaaacttaatctgaatatgatgttagtttgtaagaaccacaaaaattttccttattgagtagtgaatttgtaagaactcatgaattgcaagcaattaggcaaatacatgaggcagagacacatgagtctatcgtagaccagaggacttaactatgccattattcttcagtcgctcactcattacaacaaagtgtttaccacaagccatgttatgaacaagctatagttcaacatgattgaatagttgaacgagttgactatgtttgaaaaccttaacaaggataagtccatggaatgtgagtcaaaaaatattaaagcaaagtccaactttcctccttattctgataagaaaaaggaaattgaacaataaggacaacaacagtggaaagcctaagccaaaaggaaagaaggaacctaaagccaagaagaacaaaaccaccctaagtccaaggataatcaaggcgaaaggcaagtgtttccattgttgcatgatggaacactggaagagaaactggaacaagtatctctttgtgcttaagaaaagtaaattcaatttatttgttcttaaagataaattagtggaagataaaaactaataatatttgttcttcaatgaaaatacttaatttgtcaaaggaattggctaatagaaaggtgaccataagagtggacaatagagcacaagtgtttgtcaagtgtgttggcaaaatccgtttaagtttattaataatgagattattaattccaagttcggaatgccaatttgttctgcaaagcagagtaatggaatttatgtgctcaacccatgttagcaattaatgaattatttatagtagcttcgcctcaatataaaaaagaggcaaaatagtttcgaatgatgatgaagcgtatctatggcatctacgtttaggccataatggcttacacagaataaaccaattaacaaaggatggtcctttgagagaactaagagttggaactcttctgatttctgaatcttgt

SEQ ID NO: 122416 - DNA, 2302 bp, Cannabis sativa
  modified_base (213)..(230): a, c, t, g, unknown or other
  modified_base (351)..(353): a, c, t, g, unknown or other
  modified_base (544)..(547): a, c, t, g, unknown or other
  modified_base (2252)..(2253): a, c, t, g, unknown or other
cttttgcaaaatacagggtccaaaatggtatttacccttttttaaaatgatatttaagttctattttctattatatttttcttgacatggtatataattttatgatcatcctatatatatatatttatttttatttgttgttattctatatatatatatatggaatacctttcaatggatattacccattaatgggtactaaataaatttaannnnnnnnnnnnnnnnnnaaaatattaaaccattaaattttaataaggtatatattttttgttatatggtatataagttttattgtatagtatatcattttattttagcttatgaatgtttaatttttattttattatnnntaaaggtgatatataattttgtaaatatggtgtgattattttatagttgtatataattttattaatatggtagatacaatttttttaataatattatattatttttttatttttaattgtaggtatatatatttttatgtatggtatatagtttttgttctctattgtatatcatttatttaagatgatannnngtttttattttattatatataaatcttttggtatgtatacatattttaatagtggtatatataattttattagcatgatatatattttttgagtataaatttagtattgttataatttttttgtgttataattttattagtatgatatatcaattttcagtgatacgatatgtcaaataatattatttatatttaatgatctaatatatttattcgtttttgttgcaatataataatatgcaatacaaaaaaattatgtaacttaatttaattataatatatatttttttaaaaaaaaaagtatgtagttaatgtatttttgattaatttttattagctaatttattatatttttcttaatttttttttaaaaaaattatttactaacttagttttgggtcatttagtagagtgcgattatgatgggctcgactatgagaccagcccaagtaatattgctggacctcaaggggtgataaaaagtgcagttatgagctctgaagcaacatgacaaggctgtaagggtgtgaggcccaaacatgaccttagtcgaccgttttagttgaaaaactactaaatgttcattttcaacgccccaatgggctttttttttgtaagatgtcgtaatggtaagtgatagagaaaataatcaaaggtaatgaatatttgaacatacgacatgtaaataactaaatatatcaatctctacataatacaaattatgaaattaatgaaatcttcgcgagcggttgtctaaattatttgtcacaaaaattaataaaaatttaacaaaaacaaaaattaaaattgacaatatacataaataataaattttaagttaataaatatatatttaatattataactttatattatacacatattataatactgttaattaaactgattttattaatttttttttcttcataatttagatatttcaatttcaatattcattatattttttgagttatttaattattaatttataaaatataaaattaaaaaatagattttaaactttaaaatgtctaatttactaacaatattaattaaagttggatacaaattggtattacgaaattagaatgtatcaatcatttaaattcaaatatattttaagtgtgtataaattattttgatatttttaattaatatttattataaaattcaaattgtatatcatagatattatctattaaatttatttaactcaaataaagttatttttcttacgttaatatttactgtattacacttgtagttatatttaaaatatttgttattactatatcttatttgtagtcaccattaatatttaaattcattattattatgatatctccactactacaaatattaaaattcgcgacgatcctaaaaatgatttttttaggatcgtcgctaaaaaaattaagtaactattttaaaccgttggaaaaaatttagtattcccgacagtttgaaattgtagtaaacaaaataggcgacatttttttaataaaatacaattatttaggagagccctattcctggcggtttaaaactgtcacctacttctcaccacatttcccacgtgcccacacctacttcttttctatttccgacatgcccacatatttcttctctatttcctacaccttaaaacgaaaatcttaataactctccaaaaccccacccacgcctccgcaccatcgccctnntctctcgccgtcttcctccctctagctctcgatctccctttcttctcgc

SEQ ID NO: 122417 - DNA, 939 bp, Cannabis sativa
ttgtctttgaaactcttgaactgattggaaaaaagaggcatggttagtatatcagcgagttgatctttaattgatacatggactgttttgacaattctttcttagaccttcaatctcaccaagtgaaaatctatctgtatatgtttggtcctttcgtgaaacactagatttacagctatatgttgagcagatttattatcacaacatagcaaagcaggtctcatgctaaacctttagttctttcaaatagtagccaaacaacctcacatgtagtgttttccatagctctatactcaacctttgatgaagatcttgaaacaatgtgttgtttcttgcttttccatgaaatgattgaggttccaatgaatatgaaaaaccctgtggtagatcttcttgtatctggacaagatgccctatttgagtttgtataagcatgcaactttacctctgtttttgaggcaaaaaacaaaccctgaccaggactactcttaacatactaagcactatttgtgtagcaagtaaatgagtaactcgaggtgttgcaaacaattttctcagcttattaactgagtaagaaatgtctggcctagtgattgttggatactataacttgacaataattcttctgtacaatgtaggatgtgccagcttctctttttcattgtgtccaagcttgtgatttgcttccatggctgtattcattggcttacagcctaggtatccaaggtcctcaagcaactacagagcataaggtctctatgatacaaaatttccctgttccgatcttgcaacttcaaggcttagaaaatatttcagctttcccaaatctttcaatttgaatctatcatttaatttgattttcaaggcttgaagttcatgcaagttgtttcttgctagaatgacatcatccacatacaccaacaaaaaaaatgaaatctc

SEQ ID NO: 122418 - DNA, 867 bp, Cannabis sativa
aaaataaagaaatgagcaatgtgtgttggatgagtggatgttattaccaagctttatttaattttgggttcaagtccgtgtacacaaaataccaagtctattttaagcaatccaattgaattgttgtaattgttaattttactcgtggacttgttaggattaaagcttagtgggttttagtttcagttgatgcagttgggtacttgtataaatttgaagaaatccactgaaattaaaaataattattacgtttaaattctcagcaggccataggtgaaaattttctctcgcaagttggatatgaaactataaacatgacagaactttaataagtaattggaattaattcaaaattaccactgttttggacccttcaacttataagggggagcaatattttaatccaattcatgtttagctttttgcatgttggaaaaacggctggtatggtttttgccaagttgaatagcgatttaataacatttaatggtgtagtgtagcctggatgaatttatttagtgctgtaacaagtttctgttggtggtgtagccttttatgcaattttcctttttgcagaagtaaaactcgatcatcaatggagggtcggtgctggcgataatagtaaagaagcagaattccaaagaaacaggaaccgtcgtgagaaggaaaccttttatcagacaaaccaggagataccattgaacccgaaggaaccatgggatcaggagatggactatgatgacagtttgacccttgaaattccaatagagcagatgcctgaacccaatgggggcagcaatgcagaggcgcttgtttcacctaagcatgatgtagatagtgcaataacacagattcttgacagtcaaa

SEQ ID NO: 122419 - DNA, 959 bp, Cannabis sativa
  modified_base (585)..(588): a, c, t, g, unknown or other
cagctcacttgttaatacttcaaataaagtggggtgagtgagtaagaatcagtttatgtgaacatggaaatttagaaaagtttcattgcaacctcattttgtgcacttctttttgcaaccgcatttatatattagtatatacatgtaaaataaccagagagagaaagagagagatgtggaaaaacttgatctttattcatgcagtaagtaacatacatgccagtaagaaatggcagcagaaggtttgttcagaacattactaaggaaaattgtaaaagtgaacagcagtaggacctaagaaggaccttgattccatcagcagaagtctaatctaatcatttacaagggaaatgaacaaaaaagaaacaaccaaaactccaaaatggcacacttgttattccgcagcagcagcagcagaagcttgccttcttaactagatacggaaaccacagtgctcccatctatcttatcagccattctcagcaaaatctcaatctaaaagaatcggaaagaaacaaagagaattagtaaaaggtttcattaataacataaaagggtatatcattatcaaaaaaaaaaaaaaannnngaagaagaaaaagaaaaagagaatcgtagtgaagttaagagataaacaacctgagccttcaccatcaccctgcctttcttctcctctctgactccgatagtaatggtagatgtccttatatctgctcatttcccaaattcaatcattactgtattcgaccattgaaaactattaagagaaagatatttaaaagaagtgagtactacttacccttttgaactgccaatccattgcgtttcagaatctcagtaattaagatcacggtgggaattgctgttagaaaggagatgttgatgatgaaaaagaaaagctttatatacacattttgatccgaacaatcaacagcttattatatatacactacttaaaat

SEQ ID NO: 122420 - DNA, 1740 bp, Cannabis sativa
gtaatgggttttatttagggcacaaaacccaacattatatacctcttgcattcactattgaagatgatggtgaaatgggaaatctggtttaaaattcaaaaaagaatattttgagagtctaaagtgatgaaaaaagaggaaatgggtttggaaaatccatttatactttgaccaagatcctcgcaatttgaaatggatggcccatatctcctcttccaaaaagcacaacatgattcgatggatgggaagttaaaaggttggcatttaaaactcactcctagcatttattcttcatcattacacgccttgagtattgtacgcattaatggagaggtcatggcaatcgtcttgtcatcattgcaacttctcccaagaaatgcgcccctagcacgcgcatgtggtacacatccatattgaaggtgttgcatgcgtgccactcttatggtgccttcaacttatttcctttacttgatgtagctcatatgatacatccgtgatcctaacaatcaccacgtgtcaaaaacttatcgcgaaagagaaggaagaagattgcaagctcctgaatctcaaagaatcctagaagcttagggggtcaatattatctgtgtttttgagcatgtggtacatgtcatataaagggattaacctcataatctcgctaatcaaaatcctcaattacaaccctatcacgaagaagcctcacaaattcaagaacaaataaagactaatggataagcgaaagtccacactaccttatcctagcttcccggacgcagaagcatattatctctcccagacccggagtgctccgaatatggaagtctgcccaactgatacccagatgggtactcaaagggcctattgcagatatcgactacccaagaatgtcttggacgtctacctttggtgcaacctagatcgcccagtgacggttataatttttctgacacaagatcagatcttgttcgttgtgtccaggcatgctagtgtgcgcgtctcatccacctttttgccagacagttatatcagacctctacttttaaaggtgaaacctttgagtgacatgtgccctctacttttaaaggttaaacctttagatgacacgtgttcacaacgtacaaatggtccccaattgtccagctgcagcacacacgagcacaattatttccaaagggacccaatagtcagctctcttttgcatgtaatttatcccattagtgagcttttagcagaaaccctaggtaagtcatgggcatgtccatacccactcttagcctataactagccttctatttccatacgaaacctaaatagcaaaagttttgtcaatattactttaaatctttttcttcttcaacagaaactaaaggtacagagttagggcttcttgctaaatactgtaaacaaatcaaatacgccattaaaggctaatagactaactcataaattaaaattaattaatacctcaacgacataaaaaaaaaaaaaatcttaatatctttatcactgtctataattgctcaacatcaaatgatgtattatgagctaaagcttgatgttttgaaatgacattagataaaatggtttcaaaaattataataaaacaggaattattataaactttgtctttagatatgcgaaatatgatatttgatagagattttttctattatagaccaaaaatagatgaaatttacatttatggccctaaaaaaggaaataaacaaaagtggaaactaa

SEQ ID NO: 122421 - DNA, 1444 bp, Cannabis sativa
aaattcctatcttgtgataaaaaagttcataaataatgcataaaatattgaccattcacatataaatacttcagactagtatttatttggtattggatccactgctaattaggatattctttttggcaaatttatgcaggaagtagtgtcagaaaactcccaaagagtaggacccaactacaaccatcaactatcaaccatcacgccatgaataaaaatgggtacaaaacctattataattaatataatgggtatttttcagctataacataatatttcaaaaaatttacacataacaaattttgaagatgcaaataaaaaagaattattaggttatataaatcaaaacaaaattggtaagaaacaaaaaaccaacttatgaaattgataataattgggtattctacccataaaattatttaaaacttctaccgtcatcatagattttttgcctcatttattatgagtacaatatgataatgtaaaaaatcataaaacaactatacaacacaaacaagaaaaaacacacacacacacacacacaaaccctcaataccaacctgttaaacacattaaaacaactgtacaacaccaacgtataaaaaaatcataaaatagtgctgcacaaaataaaaagaacgacttcatcgaattaaattctaggttgagtctcggtctaagtcgctctctttaagacattcacgacactgtttagaactgtgcaaacagactaccagtctcgtcatcctcagattaaaacaacctagtcgaaacactatatcaaagctctattgcatgatagagaaccatcgaaataccacacccaatataatcgtactactgctcaaaatacatttgtaatataatcgtatataattttttttgtgagaacaaaatgtatttctcccgttgattctaattatatagggaacacaccaaaagtagtaacgagaagaaatacatttctgattaggagaacataagaaagtgagatagtgagaacgatgctaaaaatcaagacgagacaacgtctttatatactaattaagtaaacacgtttaaaaactattttaattaaataaaaaaatgaataataataaaagaaataaattttctctaaaaaataaagtgacaccacacccacgcgcgcatgtggtggtctggtgtgtgagttctcacccatctgcacaaaatggcactactacaaatatcagaattcgcgacggtcgtaaaaataatttttttcagtgaccgtcgctaaaaaaatgaagtaactatttaaaaccgtcgggaaaaatttagtattcccgacggtttaaagttgtagtaaacaaaaattgcgacattttttaataaaatacaattttttaatggacctttataggcgactgtttaaaaccgtcgcctataagggtccatcgaaaaatcatcacctacttcttgc

SEQ ID NO: 122422 - DNA, 1710 bp, Cannabis sativa
taaaagtaaagtataagtcttaaaaacatattttacattaatttttaataaaggtagagtgccttacttaattataggggtattatctcccttaaaaaataattaagaaaacacaattaagtcgataaaaaatattagtttgaggtttaattctaataaagtttaattggggcaaaacttttaatagttttatttgtttgcaattaataatcaaaatttaaattttggcggcaaaactcctaaaactacaatactgttagcaagttacaatttccatccaaatttagctttaactgtcatgttggattgtaattgtggacacagtatatacgtggcacaattttattagtccacgtaaataattatattaaaaaaaattaaaataaaaaatataaaagatatatatttttttttcaaccatatcatattttcctaaaaaaaaaatattttttttctctaatatttttcttttattctttttctttagttatatactgtcaccaccaccaccatctatagtcaccgtaaacaccaccacccaccactaccgaaaccactgtcatccatagccaccataaaccccccactatcaaaactatcaccacaacctatttttcaaatccatatcacaaaaaaaaaattaaacaaaactcaaaccaaacttaaactaaatttaaacaaatccaaatccaacaaacaaataaacacacacgaatatctacagaaaatctcagtcctaaaactcaaatttgaaaatcttaaatttatttctcccacaactattatcttttctcatatctgaaaacaaagaacacaataatacccaaataggtatatctacacacagatataccaagaagattgcaaaaaaaaaaaaatgaataaccctaaatctaaagagagagaaagagagagaggagatcaggacagagagagagagagagatagacaggtgatcgagatttacttggcccggtggtccttgataatggcgcttgactcggtggtcctcgaaaacggcgatggcacttgagtcgtgaaaaatatggtacctggatcatcgagagagaaagagaagaaggctgagagagagagaggatcgagacttacctgggtcggtggtcctcggcaacgacgaagcttggctcggtggtcctcgacgacgacagttgggtggtggtcttgggtatacttgcataatcgagagagagagagagaaatagaagagagtatttgagaaaatgaaaaagaaaaaaaaaaagaaaaaagtttttttaatgattttttttattttaatttattttaatataattatttaggcagaccaataaaattatgccacatgtacattgtacccacatggataatctaacctagtagttaacactcaaatttggatgaaaattgtaacttgctaacggtaccgtaattttagaagttttggcgctaaaatttagattttaagggttaattacaagtaaagtgaaattattgagaattttaccgcaattaacctttttaataatattataagtaaaggtagaataatactcaatttatcaaataaagggtaaaataatactatgtcgaaagtcaagggtaaaataatattaatgacaaaaatcaggggacaaattcactactatatcaagcacaaaagtgagttggggctcttgcaaatgttagaaaaattaataataaacccaagat

SEQ ID NO: 122423 - DNA, 2672 bp, Cannabis sativa
attaatatattatataaaaacaattaccgatgttatacttccagagcttgacagagccaggtgtttcccagtcaccttcatgaacatcaatggtgtggatcttatcagtagtaagattaggtatgtggtgacattggcccttcaaaatattatagaacttctcagctggtgtctttaattctatttctttctctaccttcccaacaaaaccagccatgttttgtttctttctgatctgctaataaaaatctacactttagtggttatgaaatatgatcccttagtatttatatatagggctgaattatggtaccaatagtggctaacgcgttttaattaaggatgttttctattatgaagaaaaaatttaccaaaatttcatttcaacttatttctttctatattttaaattttggacttttattaatttgttatggtggaggtttaggttgttgggtatatgaatataaaattaaatctatgttttattagaatattttatgaatttattatcacaatacgtttaaatggataaaatcaataattgattatatttgatcataagtcaaaaatttcatgtaataatttgatatttatttaatgtattttatttttggtgagattttgattaataaaatattttattatccgaatttattttttaaattagttgttaaaatattattaaaattaatatgtagagtatctcacttacaaatatagagtataaaatattgatcccaaaactcacaacgcattcttttctattttgggctaaaattatttaaaattaatacttcaactactattagaataaatacttaagtttaattcccaaatattacaaataaatacttaagtttaatttttggcaacaataatacctaagttatatttctagaactctataggcacctaattgttaaatattaagtaaatttccatgtcgcaatcctaatataggtccaagtcatgaatttttaattttttttaaaaagataatttatatataccaataagaaaatgatacgtgtataatgatttgacatttaatgttcaggtacctgcagagtttcagaaatataacttaggtattattactgctaaaaattaaatttaggtattatttacatctaagagttaaacttaagtatttataccacaaattactattacaaacatactatttttaaatttttttatctacaaaaatattttgtagttacaaaataaagtgaaactagaactaggcaggcatgtgaaaaagactactttagtgcatgcaagtcggaacaacaacaagataagttttctcacacaaatctataactacaatgaaactatgtgaaaaacttacttaccttattagtttttttttcatgatatctattagtctatcaaccatatcatcactttacttaatatatttattttttattttaataatatatgtcattagaaaatatgaaaagacacttttatcatttcccattattttggttaccacttgcaaaatttttttggctaaattacaacttgcaatattgtgtaaataaatatggcttatgacaaagaatttatttcaataaaatatatatatcaaggatttcaaaaaaaaatatatataaagttatattaaatatcatttggtctatgtctatcaaatagctattgttttatgtcttttattattactattattttattattatttttaataatatgtgtttgtaggatatatacagtttacatagtttgaaaaataattaaaaattatttataattcaactaaattataattatattattaaaaaaaactatcaacacaactttaatatataaatcaactaaaacctaacatattatatgtgcaacttgaaaaaataaaaaacaaacaaatatatatatgtatccaatcatacaacaataatcataataaatgtattatgaaaaattaaatatatttatttttcttctatttgaacaattaaataatatcgtacaaataactagataataactcaatgtaatatgaaatttaatttggcatcaatacacactactacaaaaaaaaaaattctgacgtttttaaacagtcgtttaaagtaatctcgtcggtttcgataactgtcgcctatatgaccgtcgtaaaatggacaaaataggcaatggttcaaaaccgtcgctaatgtgggtttcccgatagttcaaaattatcgcctataactgggtataggcgacggttgataaccgtgggtggggttttgaaccgtaaagggaatactatgatttttttaatggtgattgtgacagtcagcactcccgtaatctgtaaagggaaatatcgagaagttttgcaatcccacaccgcttggggaaggtcaagtggaatgattttgagactgtgtatgtatgagactacacagttgaagagagcttaaatagattgattggtactacctatatcaacaaagtatcttatttttttggtagcccatcacgaaagaactccacgattaagtgtgctctacctggggtaatttcaagatgggtgacctcctaggaattttttctaggaagtgttcgaggtaggaaaaagtacgctggaaatacttgtgttggtctatagggccagtcgttagtctatgaagcagtcagagtgacgtactcgt

SEQ ID NO: 122424 - DNA, 1414 bp, Cannabis sativa
tacccttcctaggcccccttctagagtacacaaaagtgagtggtggtctatcatttccccgagtcccaacaatgagtacccacattgtctaaaagaatcaattctcatggggatggttttcaaaggtggtcagcaagattacaaagcagacagaaatgttctattgatttttcaaaagcaccatataaaggacacatggaattttcaataatcattctagaggcaatgtttgcacgaactgaaagtgcttcaaataagatacaccatcaaagtacgttatgacgcttaaggattttggcattctaaagttttgttccaaagggtaggagagaccattcaaagaggagcacaattcaaagcttgtatgaggtagcctccatttagtagagaaattaacatttgactctttcatatctacaattattctaagtaacaaaattatggtatttgaacgtgcataaggggaaaaaaacattgttaaattactaaactatagtacttttgaaattgttgtcaacatgcatattatacataaatattgggttgaagagagttattaaaagtttgtctttagaaaaatgatgtagtaattttttagagaattgttaaacaatatcattagtgttccacattatttaaggtaaattatattattaattatagtataatttaataaaaaaatttaaatattttaatttattgattttatgaaaaataatcatttacttgtaaaacgtcacttggattcaacatgaacatgacataaaaattatatgaatcatgtttgtgttcgtattttatctaaaataaatttaaaaatttcatatgacacgaacatgacttgatgacactaaaaatattaagggaattttttatttttatatttcaaaatagtttttttttattattatttttatttttatttttatggaattatatatcaaaactcctgtagcaactaacaaagcaatctaaattgcaacaaaaatttctatagcaattcacataaaaactaccatagcaatctaaatcgtaaatttaaaaaaacaattaaaaaaatagtatataaaataattctctaaatattaatttagtttaaaattttaatatgtctgtatttgtactatttgtgtccataatttttcaaaaaatttaaaatctcaataccacacgaatttgaaaacccaacacaaattgacaacactaaaaactaaagttagacaaatggaccacacaacatacatagtatcttaaaacattatatattttattttgaatgataataatttcttttgaaaagattgagagaaatgctaaaatgtaccagtggtgtcaagcaccctcctacgtgttaatatcgctattggtctaatttagtatcggatccatatagtttaatataatagcatttagg

SEQ ID NO: 122425 - DNA, 2487 bp, Cannabis sativa
tttaaactattttgttaattttttctagattatttattattttaacgtaaatatcacattacaagtgtgttaattcttcttaattgttttcttttaaaccaccacgagcaccatttaatttctcgaagatcacaaatcgatatttgataaatactatgttattatcaatgttcgaataaatatataaatataatcgatattagaagatatcaatggcgcaaaataattgtggtatggttaagcttccaaatgaaagagtctccaaaattatttcgagaaagttatctgtctcccggaaatatgttcctagacagctaacctgtcaatctggaagaagtcttgtagaatgatagtttccatccggaagggagttcccggatgactatcatgtccactttgggtttagtccataggaactaagctagccttcctctggaaaggagttcggaatggctagctattcctcttggaagggagtcctggatagacgagtccaactagttttgtcttatctggaaggtccttcagcgagtgtctgggtccgtgattccaaaagccctcattcatgctcccagatgcactcttacttatgctgacgagatctcactcaaagaagagtcggttaagttggttattttctaattaacttaataaccttgcttcttgcagcgaccgactttaggatcatgatcctaagcttataaataccaccaatacttatcatttcaaacaaaatgatcagattgagttgagatatatatatatagagagagagggagaggaaagattgagaggtagagagagaaaggtacagagaaaagagagagattgggtttgagttttgtatgaagaatcttctgtagatgaacgaagattcttgggtaagaatgtgagagttgaaacactttgagagaactcatcagagaatctatctcgagtgtattgtacctattcttgctcaatcaataaagaggatacagtggtgttctagaactaaagtagattcatagttcacatcaatctatcgcacttaaactagtatatatcttggtgttgattttattattttactactttaattgtttttggttgctcatactatgttcatccctattattccttcgattactgcttgtgtttgttaatcttgtcattgctaatcgtttgcttgttagggttttattcatatgatttttcagtaatatattatttctctgtttgctttcgattttgctctcatggaatcaaaaccttgataaattactattgatatatgtatatataaatgcacatacatatttatgaaatagtagtagcttttgttgtaggggattagtgtacggatggatggtgttctttaagagaagtgattcttggttgtccaatctttgctctcatcttgtaagcttccctcgtattcattcatgtatttgtttatcaatttatgtttcggatttgggatgctctaatttgatacaaattactgaagagtcaaataatctcaagaattctgtgagatggctcttcaaattcagagctcatatggggcttcaagttgaattttcttttttcttttttttttttttgccaaaataggttgatgggttcataaaaattcttctctattagttttctccattatgtctgctggataacttatgtgttactctactatgatttgtttattttcatactaattgactcaaaaaaatatcattataactttacatgttttattttgattttagagccactcacattaattttctctattttctttctttgattctattaatggtgggattaaatgtttaattaacatatttgtaaacacttttttgtcttcatcattacaaataaaaatatatttttattcttctaaaataagacagaatttgttgttggactaattttaataagtgccaaaaaaatttattttctgttatcataagttttgaacataaattaaacatttaacttttacaatttttttaataagttattatttgaattttcttttaaaattaagattatttcattaatacttaaaataacaaaaaatttataaaaatatggacgatatatatttttatggattttaatataattcttttagaaaaatacacacaattgactttttttttttttttgaaaatacaaataaaacatctataaagaaaaagttcataaaaaacagtatataaaaacaatgttattttcaatactttatggaaatttattttatattaaacatttaattttatttgaaatgattttaacttactaaatcttgaatttatttatttaattaaattatatatacaattttaaaatttatattacattagttaaataaaattaaacttacgtgcattgcacatcattttaaactaagtatatatgtataataaaaaaaataataaataattcttttttttttaaaaaaaaaaaaacacaataataaaatagttcaagaagtatgtttgt

SEQ ID NO: 122426 - DNA, 753 bp, Cannabis sativa
tcgattggatggctgaaatcaattggagcggatcggatggtaaaatctaacatccaatatatgattggatcggatgtggatatgcttaaaaatattggatgtgatccaataaacacccctaaattaatatatatgatttatgattaacgtgtagaccatggaccatacataataaataccatacacgtattaaatcaaaatgtgcatgtaagattgttaccttaattagtatgcaaatagttaacaattttcagtaataattattaaatttaaaatatttgagatctaaatatttaatggaaagtttttatttttatggggttttttttgggtaaaattacaaaaatttgaaaaatatagggaaaattgtttaaagtaattaatggggtaatcggttactttatattgcttttctcatattatttttagatttttttcccataaaacaactatacatataaacacatttttgtataaattgtataaaacctcataaaatgtgcaaatttcttatattttattacatcaaaaacgatataacgaattaattttggatgaatattttcccatctctcctatataatgatgtattaaattcttaatttgctcatatctatttttaatttgctctcaaggtagggccggcaaaacgggtcagacacgatgacacgactcgaaacctgcacgagagttagcgggtttgggtttgccttaaatgggttcaggtcatattcgggttgactcgtctaaccc

SEQ ID NO: 122427 - DNA, 739 bp, Cannabis sativa
aggtgactattaggttataagttaattattatttatttttatttaatttctaaattaatcacaatcattcaatgataatttaatggctagaaaaatgtagccattatggttacatatttaatgagatgctgacatggcaaattaaaattggttcaaataggtctatgtattctctcttcattctctcattttttatatttttttaataaaaaatattcatatacttataccacaaaatttttaatttactattttttctaatattttaaattaatgattattaatagtatgtggcagtttaacaaaatcatttatatatactttttcactaccaaatctgtaatgcccatatttgaaaattgactaattcggatataaacttattttattatatttataaaacctcgtaagtcaggatccgaagtttaaaattgttgtcgaaaatacatatactacatatatagttacataatatattatatattttttttacaaactacagggcaacaccaaaataaaactcaaaatgtgataagatcaaaaccctccaggttgcactgccacgatatgtacaatccttgccgagctccatctcactgttcctccaacttagcttacccttacctacacaaggtagcaaactgatgagtcgacacactcagtaagatatgcatatagcaaatcatatataacgaacttgtgtctaggtgcccatacacctattcacaagactaaccaa

SEQ ID NO: 122428 - DNA, 937 bp, Cannabis sativa
ttatttaatttccaaattaatcacaaccatttaatagtaatctaatatcttaaaaaaatataatatggttacaataaaaatgtaacccttatatattgatttattagttggaggtagtaataatttagtgaatgaaatttgttgatgacaactacaagtaaaagcctaaaaatgctcccttgttagctccacaaaattgcttttgtctttgttttttttttttgcttatatatatttatagagtattgttatttattgtgtctagtattttagacacatgacttaacaattaattaataatactctttaaatattattatattaaattatataagatacaacgaataaatatttacgcataaaaaataatagacactttaacatttcacatatttatatattagggtaatatggagaggcttttttcatgggtgtcctgtccctcattaatcttgtggggtattttcacaaacgacaaaccatttaacaaattgtttttctcttaaattctcttgctttttaggtcgagtagtttttagttattattaattaattaatatttatttgattaatattaagatagtctccatatcctacccatttctattattctatataagttatgatattattataacacctttattatatacgaccattgtatttccttattattccaataaatgagtgtggtctttttttcataaccaaacaaaaaaaactttttcacaattgatggcgtcaatttttccgcctttacatataaaataaattctcgtaactttatgttggataaattacattttgaattagtgttttataaaagttattgattgaacagtttatcagaccggttatgcgtttaaattgattataggtaaaaaaaaattaagcttttactatgaagataaataatattttttaaaattattaaaaa

SEQ ID NO: 122429 - DNA, 1096 bp, Cannabis sativa
cgctattggtccccgctattaatagtattagcggccaaaaattggttctgccgctaatactgttaatagcggcggagcaatagcggccgaggtcataatactgcgcagttccttaaaaatcaaaatttttattcaaaaaaaaataataataatttgtaatatggatggcacataatactttccttgatgtcataatactgtgtttgaaaaataaaacacaatatatatatatatatatatatatataattatagtatgtgtttgcaaaatgaaacacgtacgtacaatgatattattttaagtagttgatcaatgttggtcaattttttttattaccataaattaactttaagaaaataaaaatcttgagttgctcatgatattctggatcatgcatgttaatcatcttatctttagggtaggcccaagccaattgaattgaatgccttgaaaaataatagtaatttactgtatgtacgtaagctatatatatatcttctcctataataatttagaaacaatattcatgacttttatatatagggaaagatataattaattaataatggcatatggggttgcatcgtgtggtgttaagcttctcttatatttatttaaagtgtcacacaaaaatatatatatatatatataatgatacaatatgatcattattacttatctcaaaaaaaaaaaatatgatcattattatactttactatatgaattcatatgcagacaaaaataaattatacatacggcccaaaacaaaaattaaatttatttaaagtgtcatgtcacacactctaaaatctctctaatttttttttttctttcctttattcttgcataaatctataaattaatattttattattattttaataaattatttttttcttttctctttaatttactcttttttaatattctattacaatataaatctataaattaataattttccattattttaataattttttataaaaaacacactacatattatcacatgtttttattatgggtaaataccattttgaaccctctattttgcaaaagttactaattggaccatgtgttttgttaaatgacaaaa

SEQ ID NO: 122430 - DNA, 1217 bp, Cannabis sativa
aacacatcaaaacaacggttctagtgtttcctattgtattccagcatgtaatacacattctttacatgttcatagtgctcaattttcactttggctcaacaagttaggacatcctattgctagaatagttcaaagtgccttacaatattgtaatataaccataagcaataaaactcaatctggattttttgatctatgtgttgcatgttgtttgggaaaaacatcataagcttattttttcaaattcaactaccatttacattgaacctcttcaattattgcactttgatttatggggtcctacccctatcaactcatcaagtggttataaatattatataagttttgaaaatgcttactctagacacacatggatttacatgctacacactaagtgtgaggcactttcaacctttaacactttcaaaacacaaactgcaattgggactcaagattaaaattattcaaacagactgagggtgaatatcaagcttttactaatttgcttcaacaaagtggaattatccataaagtctcatgccttcatacacatgaacaaaatggagtggctgagcgtaagcacaaacacatagttgagatcatggtgccacattttagtttggtcaagatcatggtttgatgaaataatgttgacacaaccagaaacagtttcaccaatcatgatatagagaccatttctaaatttccctttaataactattttagaattctttaagagaccttaagaaacttgtcatcaacttcaactttacaacatattttaatcaatacaccaatagataataagtttcttttgagctctggtacatacctaacattttgaatgttcctcttgaatccatcatgcattttgagcacaactgaaccaattccatggatttgacaagccttgttgtcaccaagaagtattgttccccccttttctttcttcaagatctttgaacagttctttgattggacacatatgaaatgagcatcctaaatcaagaacacattcatgaccaaaatatgcatttgaggccaccaacacatttgcagattcatagccatctgctacaacactagcttctcctttctcattgttcttcttactgtccctcttaagtttggctttcaaagccaagcattcatctcgaaaatggccttcctttttacagtaaaaacacttcttgtctgtaatttcccttgagtcatcc

SEQ ID NO: 122431 - DNA, 797 bp, Cannabis sativa
agagtacttattaaatattattaaaattacatgtgaattcatatagatatattacatatattatagtactccctcacagttctcttttgatcaaactccttcagttcaatatttgctgtcaagcatataatttttattccaaaaattgaagacactttcaatataaatcttacttttatatactatttcttttgtttcctaacatatgcttcatttctttttattctcattcattcatttttctattgatttccacactacgattaattttaatgggcatgtaaatttatattataatttaacaaatttctctaatttttcaatctgttactgtatttaaattttttttgaataatttacaatataaaaaaaaataaagtttagactattatttattatgtgtaaaaaaaaaaaatcacacatgtgtaataaaaaatataaattttatttttttggcatggtaaaactatttaaatttttttaaaaaatttacatgtaatcttaaataattacaacatacaaaattataaaaaaaaataattgattaaaaagttattttgagtgtcaaacaaataagggatacgaaatacccttttaggtgagtgtactgtagacttaccctataacttaaaattgcggtaaaagtgtctaaaaagttcagtttgatgcagataagttcctaacctaaaaaaatagcagtaatagtccccaagctcgagattcttgtaagtacgttgatcctcaacagattcgttagttgctccaaaatatcacgtgttgatattaaagtgcgatat

SEQ ID NO: 122432 - DNA, 540 bp, Cannabis sativa
caaggatctccatcccagtttttcttcacatcatatgttgattttatgcccatgattgcctccactagtaaaaaataaggattatacactattattattaataaatacacatatcagctgttaaaaataacaatacagtcatacacatagtttaatggttctacacttctcctcacaaaaaagaaatcttaagatcgaatctccctcccaaaaatcaaaaaaacaaaaatacacatagtactagatacacacaatacattatgaatacattattatcatgttttttatatgtacttgtaacttttggttagtttagtttggtaattttgttctattacttattcactagaaacattaacaactggttaccatgtaccgatcaaaaaggataaaaacactggtaattagttggtgcattttttttattattattattttcaggtttaaacaattaatttcaatattcaaaatctatctaaaaaaaatagggtaaatatcattttggaccttatattttgcaaaagttacagattggaccct

SEQ ID NO: 122433 - DNA, 1014 bp, Cannabis sativa
aaaaaaaaaaaaaaaactcatactgtaagtttgaccgtcaagaaaggaatcaaagacggtaaaacacatggccctcaaactcatttttttaagagtatcccatttttaaattctcattaaaagcctgctccccactgtaaaaataaataattatacaagtaaaataaatgctctcggtaacctaatcataatcatgctctctctccctcccagccctcttcttagacagagatagaaacaaactttttagagtgacaaattatttacagcttatattgtatataatatatgtatctacatatgacactactgtatagctagctatatgacttttgacctcaggcgaagataaggaaggaacaatctttagggtcggcaaaatgacaaaccctagctctctctctcttattagttttagtttatcaattaatttgtaccattttcttttaaataataatattagtaataatattctttttattgcttttgtaagaaaaaaatttatggaatatgtatataagatttatgtgtaccatagcttcttaaataatatatgttttggtaagttagtttttaattaaatttaattttttttttttgtaaattagtccccaaactatataaattttgacaactcaaactttatttttttgacaaaatagtccccaaactttgattttcttaaaaacataaagtccttactcttaaataatggtattttatttattatttatttttgtaattattttaaatagttttatattaatatgttatcaaattaaataaatatacatttttttttttatttatatgtcttttttttttaaatatgccaaataaaaagaagaaaagaacaattaaaaaaatttaaataataatattattatttttttacaaactaccgaaataaattttatttttaacttatgcttcgcgacgaacccatcactacaaaaaatcttacttttactcacaacaaaatttatgactaaaattaaaaaattgtgactaatt

SEQ ID NO: 122434 - DNA, 3402 bp, Cannabis sativa
cttttagggcgtggtgtgttgaaatatttggtttgggtgatgctgaaaccatagctcgaacccggccaccatgctcatctgtcccgagagccatggtcatcacgtcccttttaccttccacttgtacaacaccctcttccacttgcttgcataattcgtcctataaacaaaacaagtagagttagaaataaattatgaagcataacaattaatacaaatgaaattaaactttaaacttacaatccgtttaacgatttttggagctgggccctccacctcgcttttcgtgtttacgtgaagtcttttccagatttcagatctatcgaattcagtaattttgtggccggtctctttctccatttgttcttgaagcatccttaaaccacctcatccggtgcaattgttgtaaatattacaagccctactcttttgggccttcttcctcttcacctcaaattttggacttaatctcgaggccacaaactctctctattgttgcaaatcaattattttttcataaagttttggtggcttctcgagaagatggggagccacatctttgaatgtaaaaataccttatgttatggtatttttccaatatttccacctatctccacctttagaaattcttaatttcttatttgtatctggtacatcgaacacggtctatcacattgacaatcgtaattataagtacaaattataatcaatagtaaaaaactagaataataaaattgattttacctttatgtgattccataattggtttataaggtcctaactcactctaggccaccaaatgtctagaagtagaatattagttcgcacccatgctccaagtcgggtaacttttgccgtcgctccctttccccaattttgtccgtagttgttgtactcaacctctaacttttttccctcgctaatcacttttgttatatcatttcgtttgcttctcctgcgagtatttttctgtgttggttgttcaggatcaccattaccttcttccatggatggttgttcaggatcaacactagatcattctggcacggatggaccatcaccatcataatctaaccacacactccactcatcgtccccacttggttccatgatataaaatcctacacaaatttaaaatcatacaatagaatatataaaaatatgtaaattaatagctaaatgtagaaaagactaaataccaatacatgtttgatatatgactcatgtattgatatatttggtcaacaataatcttccaccatcatcatgagatgatatgatatcgtccccaacagtgacatcaataggtggttaggtgatttaatgaatttggtcactaagcatgagatcatcgccattagactcttgattatcataatcttttggttgcgtcgttatctaatgggtcgctcaggtaaaacacttgattagcttgggacgccattataaacctatcagactcgtgtctgattcgattcaagtccaccagcttgaatccaaattcatcgtctttaacctcattatcactcctaacccagtcacaaagaaaaacatggattccaaatctactgtaatctaattcccaaatttcttgaattacaccgtaaaaagacatgtcacattcaataggatttttatctttttaactagatatttggaaagtcttagcaacaatcataacaccgctattttgcattttttctagatttattagggcttgggtgcaaaattgagtactatttatatagtactatgggtacttgagtacatcacacgaatgacctcgtgatatacaaagtagtgtgttggatacattacccgaagattcacacatttctgcatatacctatgaacatacaagttgattagtgagtcaaggtaaatcaacatatgatgcataacaaaacagtaatattaatagtaccgtattttttaactatgtactgaaattttgataatgttcatcttgtacccatttttgattccgtgccttagtcggattggtagtcttgatccaattaaaattttccttcaagtattcaattgattaattttggttcaattgaatattattaatatgttttaacaatgaaaaattaacttaaatgtactcaatgtacggttggaccacgtcagtattttgcaacacaagtcggtgctcttcttcacaattagctcgacttacaccacaaacagaaaaacccctaccccctgcttatttccctatcgacccgagtagagcgagagccaacagtggtaacctctgataagtagtttgagcagaattcaatcgtttcttcaacgatgtacgattcaacaatataaccctcaggcctacttctattactgacataacccttcaagattttcacgtattgttcgaatgggtacatgcatctcaagtacacaggtccacataacttcacctctctcaccaaatacactgttaggcgaaccattatgtcaaaaaaggaaagtgggaaaaattgtttcaaataacacaaaacttctataatttctaacttgagattctataacttagtcacatcaaccactttacagcaaagagatttgaagaacaaacacaatctcgtagttacatatctaactttctttggcaacacagaacggatactcactggtagaatatgttgaatcaaggtgataatcatgagatttcagaccactcaaatttaatttgttcatatctacccaatcagagacatttgaggagtacccttcaggtactttcacctcggagatagaaccacataatgattgtttttgtgctttagttagagcatgagaagctggtggtaagaacgttcgtcaaccaacaacttgtgggtgtaaattggcccgaatcccgaaccctttcaaatttaggcggaatatgattccatctttgctacgcctaggaatattgagcaaggtattaagcaagttttctaacacattgtgcatcacatccagattatgacgtaacaacaaatgcttccaatactcgagctcaaaaaatattgacttcttcttccatggcccttgaggttcatttgcaataatgtcacttttctcacggtgaccttttcttttctttggattcgctttttgctttctaatgtggaattgaactttattcaacttttctaacacttgttccccttgcaaaggtggcgatggcaattcaaattcttgcttaacgtcaaatgcttttttccaagtccaaaacacatgttcttttgggaaaaaccttcggtgtcccatatgacacattttctacgagtgttttaaatacatagaacgtgttttctcctcacaaataggacatgctttgtaccctttcacactgtatccagaaagatttccgaaagctggaaaatcattaatggtccacagtaatat

SEQ ID NO: 122435 - DNA, 3234 bp, Cannabis sativa
cttcaactatgctcaaattcattacaggaatggcataaggggaaattcgggaacatcaagaaaaaaataaaaaatcagcaacagcatgtggaatatcttaacaacctgcaagttcgttcaccatctgcaatgcatgaattacaacagtccgaatcaattttggatgaattgttagcacaagaagaaacttattggcaacaacgttcgcgtgtggattggatgaaatgtggagaccaaaatacgaagtttttccatgcttatgcttcatcgcgaaaccagcacaacaaaatcaaaatgcttaaggatgctactggtatggaagttactactaaagaaggtctcactgatgttattacttcctactttgctgctttattcaatgcttcaccaattgatgacactgctttgcaatttactctgaatacaattccaaccactgtcacggcagaaatgaacaattcattaacaaagccttatacaagtgctgaaatacttaaagctcttcgatctataagtcctgataaaagcccgggtagtgacggcatgtctgcaatgttttatcagcaatattgggatatagtgggtgatgatgttaccaaggttgtgcttactgtattgaatgaaggccatagtttggagtcaattaatcagtctttgataactttgattcctaagatcaaactgccttctgatatgggcgacttcagaccaattagtttgtgtaatgtcatatacaaactcatttccaaagtcttggccaatagatttaaggaagtcctaccatcagttatttcagagaatcagagtgctttcctttctaataggctcatcacggataacatcttggttgcatttgaactcatccaccacttgaagcacaagactcaaggtaataaagcctattctgccctcaaacttaatatgagcaaggcctttgatagagttgaatggatctacatttgtgaagttatgaggaaaatgggcttccacaacacttggattgagactattcataggtgtctaagctctacaagtttctcattcatgctaaatggtgaagctgttggtaacgttcaaccaacaagaggtcttcgacaaggtgatccactttctccttatctcttcttgatttgttccgaggggttgtcaagacttttgcagcatgaagaattgttgggtaatctgaaaggccttcgattaacaagacatgcgcctttagtgtcacacctcttatttgctgatgacagccttttgttctgtgaagctactacttgttcggccaatgctattaggagaattcttgatatctacaacaaagcttctggtcagttgttgaacaataataaatcagttatgtcattttctcctaacgcttcacaagctgcaaaggacctattccatcatgtcttaggaatgcctattgccgaatgccatgaacgttaccttggtcttcctgcatatgcgggccgtgataagaaagaaatgtttagtgaggtaaaggaaagaatatggcaaaaactacatgcgtggaatgaaaaactattttcggtagggggaaaagaagttctcctgaaggctgttgtccaatcgattccaacatatgcaatgagttgcttccggttaccaattaccttttgtaaccaattggagtccatgatggcaaatttttggtggggagcaaataaggatggttcaagaattcattggaaaaggtggaaattgctttgcaaatccaagtttgaaggaggaatgggtttccgttcttttgtccattttaatcaagccttacttgctaagcaggcatggagaatttatgagtatccaaactcgttactcagcaggttattgaaacatcgttatttctcaaacaattcttttttggatgctagattaggacactcaccttccatgacttggcaagctattcattggggtcgtgagcttctaattgaagggcttcggtttaaaattggtaatggtcacaatgtacgagctggaacagataaatggatccctggctattatatttttcatcctatttctttcagtggcccaccatctctctcggtttcagacttcattacagaaacaagagagtggaatctccaacttctacaccaacatttccaaccaattgatattgagaaaattgttgccatacctttgagtttttttccaaatcatgatagactgatctggcatcatacaactactggaatgtacactgtcaactcgggttttcatctggcaggtaatattgaggacagaaggaattcctcggtttctaacactcatacagcctggtggaagactttctggcagcttaacttgccatctaaaattaagatatttgcatggaaggttatgcaaaatgcattacctgtggctgcagctttgcacaagaggaaagtgatcacttctgcatcttgctctttgtgcacaaatgcttgggaatcaattggccatgctctattttcgtgtaagaatgcaagattggtttggaaaaattcaaggttcaccatagactttcaaaatgctcgaaacatgtataatggtgactaccttattcacttatccaatctatataccaaaccagattttgaattgctcatcagtataatgtgggccatttggggtgagagaaataaagttatacatggtggacaaagaagagaaggtttacttatttttatatttgccagcaactacctggacaaatatcgacaagctacagatggtatcaaactttcctctcttcaacttaatgctcagagttcaaataaccagcatacaaatcgtgactccagccctttacatcatcctgctagtgcgaactggagaccaccagaccctcttggtctgaaattaaatgtggatgcagcagtaaattcaagcactaaagtgttgggaataggtgcagtagtgcggaatcatcaagggcatgtaattgctgctttgtcaaaaccgattcaaggatgttttcggtcagatgaaatggaagctaaagctctctttcacagcataaattgggtaatgcaacagcaacttccgattacacatattgaaaccgatgcgcttagagtttctactgctctaaattcttcttctcatgatttatcaagctttagtgatttaattatggatgtacgttatcttttatcctctttctccggcgttattgtttctcatgttaagagaaatgctaaccagactgctcatggtttagcaaaatat

SEQ ID NO: 122436 - DNA, 1479 bp, Cannabis sativa
aaaagactagaaaatgagttgggattgaataccgaggtgtaagaaatggaaaacgtacgagatgggagtagagcaccggtgaggggagcaagcgagggtggccggagagaaggcttggaatgtaggaggtgattagggttatgaaagagaagtgggcgggggttatgaagattagtgttaagcatggagtgagccgtacaaagctccatatttgagtggagagtagagaggaaggtaggtcagccgctgatgaggaggagaagaaaccagaaatgatttataatagtgtgtgtagtgtgtagaatatttggaacgttggcaagtgtttttttatagacaagtgagtcacaacaagagtgcgatagggtttttccgaatttcaaaaacaacgagactccaatgaatgaacattaccaggcccagtcattacgaaaacaaagaggcccgtattcaaaaaaaaaaaaaaaaaaacttaaataattgataaatatctcatctaataatatttatttaaccttttcaaaaaaaaaaaaaatttatttaaaaattattaactataaaatttttaaatacaaaatagtttaactaataaatataatacaccattaaaaaaaataaaaataaaaataaaaacgtcaggtacaaaataaacttcgctccgagtcttgtggaaacccttcaggggtgacaatccgccttcaacttcccgttcttgtccttcgctcgtcggccggcgtcgtccttctgcaagtcttgtcttttgtgacatggtgtgattgattccgatttgttttgtttgatgttttctgggttacgtctttttgttgagtcttgattcggttggggctgatgttgagtcgtcggtctatgtggtcggattgggtcatttggtttgagtcatcggtttgtgtggttgtttggattcggtttggttcctgggttcgactggttcggcgtgttctgggattgtttggtttgtttgattttccgttcgtctggtttgttgtctctggttcgtggggtgcgacggggtaccatgggtgggtgcaggagtgaggttggtgtgtagggggtgtgggttaggtcatcggggtgtgggtttagtcaaaggttattgttctttgtttgttagggggttgtacagtcgggtcagcatcaaaaaaaaaagaaagaaaaaagcattatatatatatataaaacagtaatcgaaaaaggaaaaaaaggagtgttctcatttaatttttatatttatattacatttattaggtgttttggtatgtgtgttttgtggtacagttggttggtgattatggcttcgtcgagtatgcgtgatctagatgatggtgatttgggtgttgacttccttgtgtcggatgatcaagatggtcatgatcatctctgtattgttggtcagtttcttactgcccgaccaattgattttgaagccatgagacatgttatggcgtccttgtggcagcc

SEQ ID NO: 122437 - DNA, 1801 bp, Cannabis sativa
agagagagagagagagagagtccttcattctttgtctctcaagtcaatacaactaaaggggagtagactattaccattctcacggggccgaacattcaacaggatggttgtaactcgtgggggaaatcaaattgatcaagttgacttgatggtgacagatatccaagtgttctgactcctagaaacacaaaagactcaccatggagtgacttcccctatggttgggttcacactgggcgtacataaaactagaaataccagtacagtagtcgaccaaaccacttctggcaacgagatcgtgtccagcaataacactcaaaggccagttagagatgacaataaactccaaaatctgcaagttgtgcttggacttatacaagggccataacaacatgttgcaccatgacaaggaagatctccaaatggctatcaacattgcctttgacgagcaaagatgtcaattcatagaatggaggaattgggagatggaagtcatgagggctcagcaagcaaccattgataatctttctaggcaagtcatcgtaatgatcaaaagggcctagcaagttaccgatcaataactagtgactgattctagcatccccttgagtaggatggattagtatgctgctggtcatactgcaaaaacttacaacggacagccatccaatccaagacctcaagtccaaatattgggccaaatggtagatgactagattttgccagaccccccccccctgagaggaggtactcaattaaacaactatacttagacagaggtatcaggccaacctgacaaccaggttggttagaccaatataccacttagtacttcagtgttcaatcgattaggtaccgtacatgacctcaagaatcacctaaattgtaaaaggggattggatgagcaaaacatttgaccagccatcaagccaaataactatgcccaagatctagttcaaagagatcctaatgtgacacaagttagtctatgacctaactaagttgatccacttgtgcaagcacaaatacaccaacttaagagcctagtacaaggtctaactggcccaaaactcacagatctcaaactagactcggcaagaacatcacctttctcacctgaagtcaatgctctttacctacccccaatgttcaaaatgcctatatggaagatgtacactggaaaagaagatcatatatcttacttgaaatacttttagatgcaaatggatctacaaggagttagaggcaatgtacggtgtagaatttatccggccacactagcataggctgcccagtaatggtatttcaaattatctacaggaaagttaattcatggattttcttttcatctgaattccatgcatagttttcctcctctcgttagcctccttcgcacctagaaggcctggtagaagtgaaacaaatctcaggagaacctctaaggacctacattgtaacgccctgactcttagggatgccacgtgtgtacttttacaaacttattaataactaatctattagtttagagaaagtgtggtttaattaaaacgtttgattaaaatttaacatagaactttcatacaaaatactgtcataatacgaggatcccttgtttataaaattcttttacaactagttataaaactgctattacattattacaaacgtaggttacattttcaatcataaaaaaaatattgatcctgcttctcaaaagccaagacaccacggctgatatgtacactactgcagagacctcaaactcatggctgcccagttttgcctttccctttacctgcac

SEQ ID NO: 122438 - DNA, 712 bp, Cannabis sativa
ttttgcaatttgattcataatccactcaacaaaattatagtcaaaagaaacaagacttacaattgaaagtttgttgaggatgatggattaatctcctgccttcttcaacattcacactcaattctaatctttttttttaaccatgttgtggtaaaatcaaaataaaaaatgcacataattttaatattttttattttacataaaaatatctttaattatattaaagttttcatatatttttttttaaatatacatttcaaataaaaataaattacattttaaatattataacaaaaaattatataaaattttatttaaaaaaatattaaaattaacacaaaataaaattaaaaaataaaaatattaaaagtattttttaaaatttattttaaaatcttaaatatatatctcatttgattttttattaagtaaaacccagtgagcacacgaaacgaagaagaagatgactgaaactcaattttacctgaaataaatcacatctgtcaaacagtcgacagtaattcttcgaaaggtttggcggagcagagaattagtgattaggtgcaaatgtttggtgcgagtttgtgaaccattaaccaatgtgccaaatcttcttctacataataatggcaaagattatataaataataatattaaaattaatcttaatcttaattaatgataatatactaaataataccattttagtata

SEQ ID NO: 122439 - DNA, 602 bp, Cannabis sativa
tccaattctttggtgtgacaatctcggagccacatgtcttgcctccaattcagtcttccacgtcaggaccatgcacattaaagtcgatcttcattttatcagagatcgtgttgttgtacccaaaagcaagtgttttaatatttatactcgtaagtgcacgaatcgtttcagaatataatattcatgtaagtacgaggttgaacccatggaagttgactaacattaaaagaaactttttcaaacaaagcaagaattttctaacctagttctaaatatttaatgagattttgttttagaaaaataaaagacaagtaatagtaagatttaaaattaaagatgagtgagtatgaaaatgattttcaaataagattattaagatattagaatctacaaaatgcaagttcaatagtatttataagtatattgattctcaagttttagatatagttgaaataaatcacactatattttctaaaatatatgttctatttaaacacaagtttctttcaaaaatgtaggatttttcttcacttataaagtgtataatttttaagcattaaatgtgttacaatttaataaaactacacaaaatcaaagaaact

SEQ ID NO: 122440 - DNA, 1481 bp, Cannabis sativa
agatactggtaaaatatttccaacatgtacatgtcagggcggttaggccaagagcgtacgatctttgagacatcaaggctttgtgttgtatagttgctaggcgaaaaaacttttgtatatgaatagcaaacttttgtacatgtattttgtaaacgggatcccgagattttataaatgtattactttaagtttctaagtaaataaataaatttttattgatcacgtttttcattaatctcgttcattagcagcgagctgcacagtatattaaatatcatgctaacacgcctaaattagttagggtgttacagttttattcttggtagtcagattgatcgtggcagcgcgcttccatgactggaaataatcttggccaatcaattggaagggaacaatgaggaaatttaggttgtctccagtttcgagatgatatggattgcgttcatcaatggaaggtcgatcaagattcataagaggagtatcaaaaatacgaaagtcaggtggaaaagagagagagatgtcgttggagccacgggaggatgagctgaaaaactagagaaaaccgaagacaccgatgtgaagctcatcagaagaatggatgtgaagaatggcaaagaagacaatccaggaggacacggagatggcagcagaatggttgacgtagacgaaacaccattggtcaagatttcaggtggtagcggagcgatcggtggagatgaagcaccggtggtcaagatttcagtagagacgatcgtcgatgtaggggagacaaacggagctgttgaagacggacattcaaagatcagcaaaggtgctggaaaagacgcctgagctacaagaggaacctggtgtgaagcttcaataggggaagagtggggatcgacagcaacggcagcgacggccggcgagagacagagagcacctcgcgtctgaactatggcgattagggttttgagagagaaaagttgttagaatgaggagtatatgtcatctgataccatattagaaaaatggtaaaattctcattggaaaagtaaggtacatatacaaagctgaaaacatcacaaataagagaagtccaaaatagattataaaagcccaatcttaatacaagatttgttgtaattaacgttgcaatagatcatttattctctgctcttaataatttgacgaatgcaattacagctcacatgctggcttcatgggtatgcttcaaatcaaatattggttttgtcattagttttctttactaatattgtgatgttttgaatcttttgactttctctaggctaaataaaatttcttgataatgaaataagaaaaataaaaagaactattgtatccatataattttttttactgggttgtctaacatatagtggaaggaatacaaattctttcataaaaaatactaacttttaaaagataaatacatctacccaataaaactaaattacacatttatgttggaaattatttta

SEQ ID NO: 122441 - DNA, 595 bp, Cannabis sativa
aatcagattagattgaaatgggttttatttagggcataaaatcccaacacagccgccgtcgcacgtcgtccgctcccagcagtcgccgtcgcacgtcctctgctcccagcagtcaccgtcgtacttcatcccttcccctgtagtcgtaggtttcaggtatgtctctggtcttctgaccgtccaagagctcctcccctgtgccctacacattccagccatatcctcatgctcgtccctgcatatcaacaacttaggggattgaataagttttttcagaatacgaaagcattacaaaaaaaaaaaggtcaggtcttgtcgtatgacatggtttctttgtttctctgttaatgggcaggtgttaaggtcgtattgtgatagtcaggagatctcttaggtgtcgggtttcttggtcttctatgatcgtggggggctatttttgtggagctttgtgttttcgagtcgcagcttggtgataattatggcttcgacaagttggaacaatggagatacagaggaagaaatattgtggtttcagattgaggaggaggatcttgaagaagttgcagtgatcacagggggaggagatgatggaatt

SEQ ID NO: 122442 - DNA, 604 bp, Cannabis sativa
tcaacttattctaaactaacttaacgtggcataccaggccaaagatttaaaaatggtagcctacctctagattgtcaagataagatttctagatttacaaaattcaccattaaccagtgccgagactagagaataaccatgtcgacgccctagctaatctcgactcaactattcaaaccaaagagggagtcaccatccgtgtggtgatcatgcaatggccaacgacatggaaacccaatgaagatgtaaaaagtttgactgaacaagacaattgagtgacaccaataatacaatacctagaggatggaacccttccacatgacaataatgagtgaagaaaactaagagctaaagttaccagagttatgctatacaatgggaaactctatagatgaccattcttagggccattgctctgatgtctcttgctagttgaatctagctacattctcaaagagctacataaaggagaatacagaaaccattcaggccaccatagtctatgcaacaaagccctaacaataggctactattggccaaccatgcgaggagactcctatagttttgttcaacaatgtgacaagtattgttgggttttgtgccc

SEQ ID NO: 122443 - DNA, 1535 bp, Cannabis sativa
attttttggaaaaccgtaaaaatgtaaaaaaatattttttgaacgtaaaaatgtaaatattttacaaaaaattgtgccttatgtaattattccttccaaatttcccaattgcctcctacttaaattctatatctctctacttaaatttcctatcgtctttagctgtacggggcttcggttaaaggcttcgactcccatcttcctcgactgctttcaatcgaacttgtggtgagtctctctctatatatatatctcactcttcaattacacacttcttaaatcagatatttattttattttgttttttaggtgtttcgagatctcactccaatggtgcttgatttatttcactcttagattttcttttatatatttatttctatatataaacatgaaatgttgcatatactctgagatttgatatttgtgatatttgttttggaataaatctaggttagatcaaacaaaatggaaggtatggtcggatttggctttttttaggtgcattggtgcaaaaccgacacaaatggtgtcaaaaattagcttttacactatttgcatcaattttgcactaacacaagctttcagacccaacggataggaattggcgttaaaactcttacatttgcctctacagtacatataggccagttataccaattaatgctaaaggtatatatgttggttggaactgaaactaaatgtgacttttctagtagtgaggagtactcaaggaaattatcattagagacttggtttagggaggatcatcaaaggtttttgaccatggttattcttgttagaaaactatttttaattagtagtctaagggttcgcatcaaaaggtaaacaagcttccatttcattactttattgttattgatggtctagggttttgagttaggaataataagtgatgatgatatataatgatgatagaatgttaatgttaatttaaggtacttagagttacttagggcttgatttggggctcagtgtaccttaatagactatgcatgtctgtgtgtgtggtaaaggaacttgttggaaggttatgtgtgggtcatgtgcgtgagtaactgagccatgcatataagttacatagacaaggctcgagaatttgaactcttgaaaataaatgaaatttgaattaattacccttatattggcccagattcgttcctcaactcacatgagatttttggccatatatttgctctttgtatagcccaacagtattgtttcttacctgttctcgctcgatagatcttccaaccagagagcttattggttatgtgggttgatgatcactaagagcttcattaattacttttcttgggcatacaatttttgaactgtaggatgcaagtgttagttttatggtactaagtcaagtacacagcgaaagaatttcgtattatctaattattattgtaccatattttaatggatctctagatgtgtctacattaaatcaaaataataaatagtaagtttagaataaatacctctggtgttttcaaaaaaaaaaaaaa

SEQ ID NO: 122444 - DNA, 1328 bp, Cannabis sativa
catgcaaaaagtcactccataggcaattacattttttttctaacaaaggatcaaattttgtctcccgttccaggccatggttgtgcacgtacacaccctcaaataggcattttgcccaacgacctggttaaagagtatttttgcaaaggagatacctttgtgtgacgcgtgtcctagttcatacaaaaactcgcacaaacagttttatgttgcacagtacagaaggttcttaccagcaaatggtcaaatcgtcctttagcagtactggccttcgtggcgtgtggagtacgaaaccctaggtaggtaaagggtatgccctttaccccatatgcgcctataaatactcccattttttctttaaagaggaggcggaacaattttacttacagacactctgcaaaaaaaatttaagaaagctctctttctctctttcaagaggagtgaaagaaatagagtaatccctactctaaccattttttaatctctatatatttttgcccaaagaggccaatccaattgactcatagactaaagatcattaacgcctgaaccacgtaaaaaatctatttatttattgcttcgtattatttcttatttctctaagctctaaatatgttcgttttatgaaaaactcattaaacagattcagaattaagaattggaccaatcaaattcaattgactgctcaaatcggaccaatagagcaataatataattatgaaaatcactgctcatcttgtgtggtcttgaagatttgagatgcatattgaagattgagaattatatcgtgtgtggtctttaaaatttgagcggttatatcggttatattgaagacttggaattatataaaatacgttgttatttttgcttaaattattatttttaggatgagatagttatcatagttaagcttctgtttaattcttttgaaattttgtatacatataaaaaaacatgaaaaaaaatgttaaaccaacaattgttgttaaataatcacattttatatataaattttgaattttttgtaggtaatatttttctgcaaaaaaaaaaaaaaagagaattacctcatatattatttttctaattttttttttcaaatttacagtttaggttgttgttgttgctacgtgaattttgattctgatttatgttacttcaataattactatgtgaattgctttgtagatttctctgaaaaatatatatataaaaaaactactttaaagtatataaaaaaaaaaagtcattaaaaaaatataaaaatagcataacaacctataaaatattataaatattaataattatatcgatgtctaaatctttta

SEQ ID NO: 122445 - DNA, 2117 bp, Cannabis sativa
  modified_base (27)..(31): a, c, t, g, unknown or other
  modified_base (58)..(60): a, c, t, g, unknown or other
ctttgttttagaaattcatattaggannnnnatgaaacatacttgttagtaaatttannncctggtaaaataatttcaacaataacccactctattcgtgagtgttgaggttggattataaaagattgtggcgtgtgagaactcttcagagcaagttcttagattggatgttcaataataatacaaaagataatgaggaccccctgataggctacaagatgtattgtctctatatttattagtctagatttaatatatatatatatatatattatgttaagatcattggacttatggttatgttaacatagatttttattaaccaataaataagcctttttttgtaataaatgaactcaagaattaaataaataataataatatatgataagagggtttttaacgtagttttgaaattaattcttcatagtccataagtccatcttattttgggattttataaattgtatacagaatacaagaatatattgatataattccctattttccctaaattggtcgtcccttgttccctaagttttgtccctatttataggagttgtatggtgatagttattccctcgagatcttatccttgtaaccgttcatataacgtagacaatcacacgtttaacatttatatcacatgtgataataataaataactgcttataaccaatctttagcttaatttgtaagtggttatgctaactatgccttattcttctcgtaatacaagcaatctcctcaagacgctttattctggaaagggttgtcagtgactaagtatattctggtaatacttctcgtgctcctatataaaatgttgagagaagcaaacgcaagacactaccgtagtgtgacgattccgagaggaatcatgttgagagtgtttaatctttcaacatactcacgagtatgtggatcaatgagctgcaagctctttaagaattaattatctaccatttccaagcattgtcattctattgtctattttttgtatcctaagatggaccttctttgttagttatgcacctcgatggtctcatcaggtaatagttattattcatagcttgttcttacctttaaaagggtgagtttgaatatttctaccatatgtatttaccaaggcgagtttatttaatgtattaattgttttataacacgaccttgtttattttccagtttctttacacgtgtcaatatcatattattgctcaaaatatgggtataaaaattgttcccgaaaaagtattttttttttaaataaaaaggactttttaattgctagagggtaagatcgttttttccctctttaaaaagaagctacatgctttattttggtggttcagtacttcgaggtaagcatcattttagcctttattattctgactcttttttccccaatagttcccattcgttcgaccagtcatcataacgatggaacagtttttgcttgggtataaaaaatttgagttttccccctatttcaccattaccatttacagagcttcagaattttataattttcaacttttttctttttcaaattgcatgccctcataatctctcacatacttttttcgagtttcggttgattttattcctcgatctcagaatcgccagggttcaagtcctctgcattaggagtatccaataaagaattttttgagaccttattccccacatcgaactataaaatgactttccctcactacttttttgattaatctcttttccttgttttttatatttctttttttgcattatttatttgttgtgtggaatttatatgaatgtttagtaatttagggttaaaaattttaaagtggcgtgtggttagaatgaatgaaaatacaggaatgagatcgagaataggaataagaatatgaatggaattgaataaaataaaatttaaaatgcataaaaaaattattaaaaaaattattaattttttagaatggaatagctattctactaaaatggtgaaaatgccattttactggaatgacattccagccctttaatatgcaaccaaacaaaaaagtaaaatgaagattgtttcatttctatttttttttttttaaaaaaatgaacatcttattaagcaaccacac

SEQ ID NO: 122446 - DNA, 2034 bp, Cannabis sativa
  modified_base (88)..(89): a, c, t, g, unknown or other
  modified_base (284)..(289): a, c, t, g, unknown or other
  modified_base (316)..(320): a, c, t, g, unknown or other
  modified_base (1996)..(1999): a, c, t, g, unknown or other
tttaatccatataattcagcccttaaccctagttgaaacactataaaaggaacatgatgctttcactcatccacttgatgccttcaannaaatcaaacctagttttctatgtccaaaaactagtagatgatagagttcctcccatagtgttttcattctccttcattgtttttcaccattcaaagccttgagtgatagagtgccataccagcacatagcaagtcaagtactcaatcatagtgagtaagacgatggtaaccaaacccaaaggagagaaagagatnnnnnntcagatcttgataatgctctgcaatannnnngaatcaagggctagagatctttaaaggaaggagtcattatattccgctgcaattaatgtaaggttttcttaaactcttatgtgcttatttcattgttttagagaattcatagttaggatgttaattcaacatacttgttagtaaacctattttctaataaaatattcccaacagtagggtacatgatccttaattgattactgcaactttcttggagttttataagaatttactatgtaccaaaatggaaaatagaagattagctgaggctgggattttggcaagagggcctgttgtgacctaagaataggctaatgtgttctaccaagataactgggaaattattgttgatgacatttctaatgatttgacatcattcttggagccaggtaaaattctcaaaaaaattaactcaacaataattactttagttccaaagattaagtgccctaacacagtcaaggattttggaccaattgcttgttgcaatgttatctataagattgcaaccaagcttttgagctctagaatcaggaaaatcttacttgagagaatatctcactcacaaggtggatttaataaagggtagacttattggtcacaacataatgatttgtgaagtcttggtgagacattatggaaggaaatctaacaaacctagttgcatgattaaattaaatcttcaaaaagcttatgatactattgagtgggacttcattgaaaagattctgataggtttaaagttccctaatgcctttattaagctcatttggaattgtatcaaaacctctaaattctctctcatgtccaattgaaccttgcatggtttttttgaatctaagagaggacttaggcagggggatcctatgtcccctctactgtttgtgttgggcatggaatacctatcaagactaatgaggaagataggtgagaaggatgtttttcactatcatgatagatgtttggatctcaacctaaatcatttggcatttactgatggtgttcttcttttttgcaaaggggactttagatgtataatctacatattgacagccttaaaattgttttccttaacatttggtttataccttaattcaaataaggctgcaatatactgcagtattatgcagtagaaggtctcaaaccaggtgttgtagctatatgattttactaaacatgagctgccattaacttatttgaggatcccaatctgtgcaaagaaaatctctaggagagaatgtgacttgttggctgagaagatgattgcaagaatcaaaagttggagctcgagaaacctatcttttgccgggagaatcaccttaattaactcagttctaattgctatccaagcatactagagtcaaatgatgattgtaccaaggaaaattcttaaaggcatagaagcaatatgtagagccttcctttggaaaggacaagcattatttcatggagctggagcaattgcttgggaggctgtatgtcaaccaaaaataggggtggattgggcattaaaaagctggaagagtggaataaggctgaaatgtgtaaatatgtatgggccattgcaaataggaaagagagcttgtggatgagatggtgccatattgtgtacattaagagggaagattggtggagctacactacttctgtccactctgttgggttttatgccctannnnaaactccatttcaatgtaatctctatcttttaaat

SEQ ID NO: 122447 - DNA, 1225 bp, Cannabis sativa
gaagggttaggatagatatgtatatatgtatctgtgtcccatgatcctaattgaatcacctaatctaataatcccaagccaaactgaaaaattgttctagctggcaactagctaagatgatactgaaatagtaatttgtaaccatttaccacatcccttgtattatccaatatcttatataaatatcataacttttctatattttaaaaaaataccactatataactatacatagaaaatactaaattccaaagcgtatgcaatcaacttatatattcaaacttaaataccacaaaaataatataacacataatataatcaaaatgagattgtggcattacattattattattattattataggaattaagttaactatgtatccatgctcatttatataatcatgaagagtttgatttaagtaacttgttgttgaatgagtcttgttatggctgagtgtgtccccaaacaagaacaaatcattcccactatgataatgaaaatagatcctgcaatctgaattaatataacaattatattatataataattaatcaattattaatactaattaattattaatcataaaatatgaagatcatgaacaataaggatattatatataagttaattctcacctgaaactttgttaatcttcctctaaatagtctgatataacacgcacatggaaatataaaagactgcaaacaaaaattacaaccctttagttgtactatatacatttatattatagtatgattctgttttgctagttgttactagagtgtgttaaaataactttttaaagttaaaattgaatcgtacttgttattgaacgagcaaagaagaatttttagaacttaaagaattgttggggcttcaaaaatcaaaaaatagcttttaaaaccctaaccaaccagaatgtacgagtgaagaaaataaacttaccactagcattgagcacaaagaaccaagtaattgcatcacagtagctgtatacatcaattaaaacgacacaggtataagataaaataagtgtatgcaattgactatttgaatcatattttaatcagtaccttaaattgctcaaaatttctcgagtacgaacaacatacttactataactatagtgtacatcatcatataaaaaatagggaaatttacattgtatactaacttttgatatttttttacaaaagtactatcaggcggtattttttactttt

SEQ ID NO: 122448 - DNA, 1065 bp, Cannabis sativa
  modified_base (50)..(70): a, c, t, g, unknown or other
tttaacatagtattatataaaaatatgatatataatccaatttaatatannnnnnnnnnnnnnnnnnnnncctaatacgacgttccaaacgagatcttatattcttaatttgccttatcatatctgaataaatattctgccgcctaaatttatatatgaagtaaactaaaaataaaaataaacaatttgattgtgtttaatgaggagaacacattaactaagttatacctgcatttaaagccggagatgcgcaaccaaattgtggtttgaagcaaaagccacgttttgttaaggctgaagtctcatatcaaaaccctagcacactaacactatgcatagctaattgcctaatcgtattttgaagtgttggtgtgaatgactattttatattaaaaatgcagaatattaaaaatgctctccaggagcacacttatttgaagtaatagagcttggctctcgagtggcattgttgttcgacaatactgttatctgttactatggacccttctaaagtttgtgatctgtttgaagatgctgttcagatttcccaagaagatatcacatttgcccttaacccaggggaagtggatgaacccgaagaggccaatcaagtcctactaggcaagatcattagtcgacaccggttcggaaaatcagccatacagggttccctaaagctgtcgtggaatgccattaagggctggaaatggaaagacattggagatggtattattcaatttactttcagtcgcagagaggatgcactaaatgtccttgctcgtagaccatggttcatttgtggcgcactaatagtgatcatgccctggccggcatggttatctccggctgaagttagatttgataagacgccaatatgggtacacattgaaagcatccccccattttattggaatttatctaaccttaaagaacttgcctcgaaggcttcccctgtttttgaacttccccctggtgttgaagatgcagtcggtatgagtacgctccgtttcagagccacaatagacattacctgtaacaccttaactatcttaggcgtattacgtg

SEQ ID NO: 122449 - DNA, 2720 bp, Cannabis sativa
aaaaagtaaactacataaatcctgaatttaaatctaaaccaagatatattcatctcaatctgtctgcgtataaagtaaatccggatagatctctaagtagtcatcattgttgatggcctatcttgttatgtacagtcttcctctctggttagtgatgaaaagaaaatttaatatgctctctttaatgatataagacctgcaacaacccaaacataatatcgatgcatatttagaaccattgattgacgatttaatagaattatatgagaatggtatttaggcctatgatggttttaaaaaatagtacttctttaatttgaaagcattgttattgtggactgttaccgattttcaagcttacagtaatttatcatgattaagaacataaggttacgaaggttgtgcgattttttagaatttagaattgtgtttgattaattcatatgttaaccctactcatgtttgtttaccttaaaactaaatgggttttatagtttgggatgatttcaacataattgcatgatcattgttgagaagttaatgaaagatttcaagaatagaatgcgaaagtacatcataatgcccacattagaagaaaatgatttgcaatggttggatgataaccctcaaaatcattctgaaatcgacaaaaaagattggttgaaatttgttcaaagtcgcctaactactcctaaattttaggtaataattatatttgtactaagttatattttaaatacaagtattggtagctaatatattttcttttgcattgaaggaattcagtaaagtacaaagggaatggtcgacaaaaaaccaatcgagacatcaaagtgatcggagtggaatggtgaacgtaagagaagatgtggtaagtgattaatataatgaatttctagcaatgtgcatcaaaatgtaatagtactcatttaatttttgtaaaataatgcaaaaaatagaaccttgaggttcaagatcccccacacaaccgtgtttaggtaaaaccgaactaaaaaaacaaaacttgtcaaaggaaattactaataagatagtaagtatatattagtagttgattaagtattaatgagttaatgtatgtaaatcatatactaattgcttaaatatgcttattaggctcaactagaggagcaagttagtcagggacaagttcaggtccatggtaaaaatgacattctgacgcaggcgcttgcaaaagcagagtatccttgacgtgttaggactattgggtatgctagtacttgaaaaatgttacttcattagttatacaaaataaattatagctaattttatttattaacttgttggttccttaccaaggcatccaactatttggcaggaagaaaaggaaagtacttgatgttgtggtttagaaacagaaggagattgagaaattaaaagccaaaatcaaatatcccttaaatagaagaaaaatattgctgaaaaagagcataataaggatgagaagaaggacagatggctcttcaagcgtatgttccacaaaaacatgcttagtaggatgagggtccacaaaattatgcttaggagcttgttccccgaaatgagccatctgtcatgtacaattttgttgaaccgagggcagctaatcaaacaatatttttttgctcaaacaatatcggtcacatagtggcctgagcttatctatatgagcatgaaggtcaaatcacagttctcactaagccttctcatgatccatatgcctgtgttcttattttagaaatgctgcaagaggatgctaaaattccaatcttaattgaggggtgtagatatgcttaggaagtagcaaatatgttcattccttggcctaaatacctaattttaacacttgaggtaacttttgttattaattaattatcaatgattagttaagtttgaatatcttaaatttttaaccatagtgatgtaggttctgcgaatacatgtactgcggtcggatggatggataatcaattattttatctgttttgtttgttattagatttgtttaaaaatttcggggatgttcaattatagccattatgatgccaaaaaattggtgaatttggatcaattttgatatattatatggtgttttgtatagggtccattagcataattaccatcaagatgtgatgtgtcgaaaggaaaaggtctcatgccttgtcgaaaaggtggtggtaatcaagcagatctattatttgcacaaaagatcatggcactaatctccagggtactcaaatggatggtttgaataatttttaagagttaatgataaaactaagataattccaatccaggtaccacgtggattcatagcacgtcgtacccatatcacaatatctggaaaagatttgcaacaggtggcaatgtgtgacttcatcgacaactaggtaatattgtttagaatgatgtatattcttctttaatctaattaaccttatatatcaaattctactgaaattattataaaacactaatatttaacaatttaatgcacacacatctgggagagcttaaatgtaaaatattagtgtttgcattaaaccctaaaccttatgtaaaatattagtgtttgcatcaaatgatttgagacaatttaatctaatttaacaattttatgtgaataaaccctaaagcttatgtttattcaggtcctctgaaatttttctcaaatgtaaaattaagatgcgcataaatatgag

SEQ ID NO: 122450 - DNA, 1046 bp, Cannabis sativa
tatatatatatatatatacaacaacaaaaaacaacatattattgttgcattataggtttcacatcaaagaacgtgacataaagctatatgaatggtcattatttacatttaaattgcttttacattcatatttcttttttcatatatgtacaattagatatatataaaaggtagggcaatttaggtcatttaattttttttgttttaccataatataattcattacaatttgatctattacaataactttattgtttgattggttttgaaaatattttaatgtttttacaattaatttaatcatcatattactattacatacattacaattagatacttatataattatgggatattcacggtataaacacgtatattgttcactttcttattgcacttaaatttttatgtaatttttttggtggcaagaatttatatattgctcattatatttcacttaaatatctatataattttttttggcaacagaaatatctatgtagttcatcttttagcaacaaatatcactatatataatcattttgttaaattcaattttcttaccttttaagtgctcaaataaataatatagaggtttgattattggattgaaagtctcaataaagtaaaaccacattgttgatgaaactttttggcaatcaactcagctttatacctattaagagaaagttgctgtaaatatctccaaaaaatttattttgatgcagataagtcttcaacatcgaaaaataacagtaatagtgtgtatatatggtgatgtgaatgccacattataatgctagtttgtcaaaactacatcctatctttgtggtaattaatgaaatattaattacttgattgttaattattatgtttccttatttagtaagatattatcttttgtctgatattctagggagtcaatccctaatcttatgtgattaggtagaaaatatgaaactatattggactccgtgtacacgttgaaggcttcttctagctatgccagggccggcctaagtattttgggggccttgtgcaaaatt

SEQ ID NO: 122451 - DNA, 1554 bp, Cannabis sativa
attgaaatgagttttatttacagcataaaacccaacataaatgtatgataaaaaaagtttacaattcaaacttggcaccacatgagtcgtgtcattagatcagtcaattggcacgcaaatatttgtggtgcctgttgcttgttttaggcacgaaagctgcattagtaggcactaatttggtcgtgcctatattccttttttcttgtagtgatataattcatcattgtattgcctacagttgtatgatggctggttgtttatctataaaaccaatttctaaacatttgtgttttgggttattgcttcatcgtatgatggttggttggtaatccataaaaccaatttttgaacatttatgttttgtgatactgcttcattcttagatatttgttgagcaatcatttagaatcttgtctcatctatagttgtgatgcaaagtggagactcgctaactgcattctgtttccttctgagttcaaagtagaacaacagtaagttgtcatttattattttgattgatggtgacctcgagtataactggtaatgtatttctattagagtgttgcatttgatttcatttttcactaattctaacaacatgttagactacaattggttggtattgatagttcagtcattatatagtctttatattttgtctccttttttcacgacgctccatattgaactacacacacattattgagtatattcctgtaaaatattatagataaattgttaaaaattttgatttattaggaaattgatttttttttgttttattgtaaattatatatttttttcattagatatgtaagaaatcagtttttatgtatttgtttattttgtaataagtctttattttgtttatttttaatagatatattatagtatattatagtagggattgtctactgtgccgcttattcttttttcccaattttttccaccaattatcaagtataattttgagtttcactttaatacaatgcactttattgtaggtaattatttaatttattttattattttaataatttttgttgcttattcttttgttctttttcaataaataaatttttagatattaaaaaaaaatacaatttttaaatgtgtgctaatattttcttttttcatattttgtttttaaatttaaacatttaaatctaaaaagcatgttattaattttttttggaaattaaaaaagggattattttataaacactcaaaaataataaaaaatttacatttttatggatctacaattatttttacatttttacgaattttaattttcttttttaaatacggagtgttattttcatattatttcaacaagaaaacaacgtgaaaacaatatttctttctagaaaaaaaaaacaaagaaaaatctgtaaaaaaataaaattcataaaatgttaacatatatatatataaaatctgatcttaagtgtatttataaatttttcaaataaaaatgtgtttataacttttatttttacgttttagtttttatttaagtaaaaatagtaaaaataatgtgatagaaaatga

SEQ ID NO: 122452 - DNA, 574 bp, Cannabis sativa
  modified_base (543)..(548): a, c, t, g, unknown or other
atatgactagaatttcaaaaatcaactaatgtataactgagattcattcagctgagattttcatcaacacttttgttttctttaaaattataattaccatgaaaaaattacattaattagagtaatgaaaaatcaccaaaaattccaacatggtgtgacaatggaaaccccatagtgtctagtttcctcaacatgtacgtttctccttttaagacactatactctccccaattaatcattccaacaaccaagtcatccttctcaaactcaggattcccagatgccacaactttagccaccccataagcatcaatgacctgttcaattaaattcattatatgtgtatatatattttctctattatataaatgtttatctaacattttttgttatatttcttaacgattttgttgcgtcttaacataattttatgtatttttttaacaaaaaatgtttttaatagaaatataacatttatatcctctcacaaaagaggtagtcattaaaaaaaaaagcatccatttatatctttatatattaaannnnnntatctaacggcatttcttggtttaac

SEQ ID NO: 122453 - DNA, 2417 bp, Cannabis sativa
ttggaaagcaaacctacaaaaggttgttgctttgtcctccactgaagccgagtatatggctgcaacagaggctgtgaaagaagccatctggctaaaaggtttaacatctgaaatagggataaaatctgataacttgttcatacattgtgacaaccaaagtgccattcatctcatgaaaaatcccatgtaaaacatattgacatcaaactacacttcattagagacattattgctagcaaattggtcaaagtgaagaagataaacactcatgaaatccctactgatatgttcaccaaagcagtcactggaaagaagttcaggctctgcgtgaagccgctaaatattggagattgctgatccttcactcttgaaagaaaattttattgatggaacagttttgcctatattaatctgctcagagttcttacttgcacaagtaaataaaccaggtggaatttgtggggtttatatactggtgcaagtgtcggtttggttagttataacagttgtaattaggtagtaatttctgttattggtgtcaggtcttgtactccctatttcggcctatatataaaggccattttgtaattctttgagagagcattgaggtgtgagctgagtgtgtacaagtgatgtaaaagagcatgagaatttataactcatggctctcgagtgatctgttttgatctgtttgtttgaggagcaagactccatttagttctgtggtgttcaccattgttccatctctgagcttcattctaaagtaataaaggcaaagcctcaaggcggttcctcccaaggattagatccaattgtttttcacttgtgattgaaccttgtaactctgtgtgcaattttgtttttaatcttgctgatattgttgttatctggtttatgatttctggtttcatttgactggtttatttgatcttgttaatatttgttatgttcttggatggtgttaattcaccacaatgtggttaatagaatgaattaattaccaagaatgtaagactcttattttcgttttattggcaaagattgtgtatattctctaaaattaactggaattaaagatattattattttataatctagatatatatcaatcattgtgagaaaaaaatcaatgtaatcttgataatttcattacaggtcagtggttgaaaggccaattatttccaccatattagttgaaaatgaccttcttggggattgtatgttgcatgtccagtgaaaatgaatcggatatctttttatgctaatctgaagcattagtgtcgccttgttgtcattgtttatattgtaatgatgttgaaggtaatcttcatttattttgagtatttttttcctgaaggtaaaccttttgctaggttgtatggtctgtatttatttatctattttcgttcctgatgttgttactgcttttgtatatatttaatttttttttaaaattttgtcttgtctcgttcgataatcaacctaataactttttttcttctgagatattccatgcagaaaactattggagacctaaacttaagaggcaacattataaaattatgtttgcaactgttcgatattcctttttgtttcaacaagtgttccactttttctttgaaaataaatattttataatgttggaagtcttttaacacgatatattttctttctttgtttgtggttttaagatcaaagtgaagattggatcttagagaacacattaaaatttcacaatgagatatttctttctttttagttacttgcacatttacttattcattatatttcactgttttttagatactaatgtgtctttccttagattggatttgtgattttacttctctagtcggccaatggaagaaagatgtaagttcatactctactgtgttgtttattaagtatgttttaaaattatctttaatagtttgcagtacttaaatgttaatgctaatgaaattcaatcgttggaggttgttaagactaaggatgatgaatttaatatcagaccactttctgttctgatgatgagtgtcaaaaacaacacccaagtaataatgctctcttatgattactataaaaattgcttaattttaatttggaattagcagataatcaggattaaattatgaaactagattattaattaggatttatgattttatggaaatttatttgaattcagggtgtattatttatgccatatatgaaattttacgattttcatgttttgtgccttacaacatttgaacacggcatttagccaataaaatcacattttaatattttgtagtagcaggacaaattagatagacattaagaatgtcgggaatattcggagtttagaaatgaccaaattacccctaagtagcaaatatgctttttggcttaggcaagagaaaaagggtcttttg

SEQ ID NO: 122454 - DNA, 1534 bp, Cannabis sativa
gtaatgggttttatttagggcacaaaaacccaacacttcagacttatttttcatgggataaatccaagtaaatttggagaagtcatcaatgaaattgacataatatttgaatccttccattgaactataaaacgatggtccccatgcatcagtatgcacaagctgaaagcaagaagtagttttgggaatataactactaaaatgcatactatgtaatttgccatattgacatgcttgaaaaaatgaaagagtgttacatttggttgatgaatgtatactacagaggacatttttaactattcttgaggaggcatggcccaaccgatgatgccaaatttgagcttctgaaaaggcagtagcagtagagttgtcttgactgtaattataagcaccaggggaaggaagaatgcccttgtaatgttgattgaatttagcatctggttgatggagatttaactgataaaggccatgcttaagatggccccgcagaagtacttggcccaatatcttgtccttgattatacatgcattagaatcaaaaagaaaaatgatgttattatctgttctaagctttgagatggttaacagattcttggtaatggtaggagcaagaagtacatccttgagaactaattttttgtttttatcaaagagtagtaaatttagtttggcctatatgagaaattgagagtttagagccattgccgacagtgatcttggctttgccattgtaatcttgagttgtattgagattctgagcatcctgtgtcatgtggtgggtggctccactatccacataccagccattgtcctctgctgggaaatttgaatcagaaataagcgcctgtggattatgattttgagactgaggaatattggaactggtttgaggatcattgtcataacgatgataacacttgtaagcaagatgaccaatcttgccacatatttgacaaacaggcctagaaccacggccacaaccattagaagcaccacgagtgttggactgagagcccctgctggacatatgaccacgaccctgtggttgtcctctaccagaattgttattgtgattagggccttgattatttttgttgtattgagcatagtttgcttgtactggatcgacattgggcatagttgtttgttcgatcctcatttcttgaatctgcaacatgtattggacttcttgtagagtaagtgcgtcagttctagcagtcatgagaacaaccacggtttcatactcgggaccaactcctccaagaatataatcgccagttcttgatctgaaagtttgtgtccagctgctgcaagagaatcagcaagattcttcatcttcaagatgtattcatcaacattcattgaccctttcttggtggtctgaatggaaaggcgaagttgtagttgtctggctttagattgagtggcaaagatactttcaaaaaccctccaaacttcagcagcagattcacaatgaaggacatggccaagcattgcctcggagagagaaatcatgagccaactcattagaaga

SEQ ID NO: 122455 - DNA, 2441 bp, Cannabis sativa
  modified_base (2140)..(2147): a, c, t, g, unknown or other
  modified_base (2248)..(2257): a, c, t, g, unknown or other
  modified_base (2377)..(2399): a, c, t, g, unknown or other
taaccacagaccttttaatcacaacataagaatgataatttataattaatcacatttttttttacttatagtcacaagttttgttgtgacttaaaataaaattctttgtagtgtcttgatgggagaagatgagaatagaattcactcttgttttgggactactgccaatatataaactcattgctaggttaataatttaagtatttctaatttagcccttcaattacaaattagaaatatcccttaaggtatctacacatttagcctatgccactttaattgtcatgacccacaattactttatttgtgtcaaacttgaaatagcaatataccaatacattgagcccatattaagaattttaatccaacaatatctcccacctgagctacatattttcttattgtgtgcaaccttataagcgcataactttgctatcataattataaatttctatcttagattttatccatctgacatagcatgtccacgtaattagtcaagattgaggacacgtggaatacaaccttctcaatatatagcaggacaaagccatcttacaaggcatgaaaaaatcgtcaagaaacaagtgaaaggagttaagcaagtcgtcaagaagctatacaacaatgtttggccggttaaaggagagtacataggccagccatggtttaagcacaagctgcccgaccaaaggtgactgcaacaccaagaagggacctattcgaccaaggaagcctgacctttgtaaggaaagttgtacaaaggttggctaacacctactaaggcttacaaacacgtgcaaagattggccaacacttaccaaagcttaagtaggaacatgacttgccagaccttggcaggaacatagatggccagaccctggcaggaacatggatggctagaccctggcaggcacatggccagccaaaccccaatttgaacccaataggcacttggtgtgcagccttcatttgggatagcaagttaacctacaatttgggcttcaataacccatgaaaataggggagaaatatcagtcatttccctattcttgtgggataattaccttatttactatttattgttttattatgtaaataatactttatagttcatattttttagggatattaagttattatcttcatgtaagctctcttatataaataacgttagcctagcactaatttctctaagtctctagctccccaaaagctcttaagctataaatctgaaaccctaactctctctttccttctccttccacaagcctaaggcttttccctcacttgggattttcctacttgattctcatattgtaatcttaagagagccacttcaaattcccaacccttgtgatctgagtggtattacctttagtattaatacagcctaaataagagtaggtcattacccgctaactaagagggcaaaacctttataaaaatattatgtcttttttatagttccactcttattatgtacacgtggtaagtatcgaaaataaatatgactctgctggttgctggccaagtctaaggtcaacagttttatgctttcattgagagtgagttgtcaatttatctgatcaaacactatggttaacactaggagaaccccaactacaactcctgcgtcattgggtcttccttaagaccccatgacagttgatcctaatgtctgtattctagccacaactagaattttcatgaacccaatagatgtggccaacactgccatctcagcaggcatcataaacttggctaccacagttggtcaggtggacactaccaaccttgttggtcttaatggccaacctttgctgcccagggaggaccttccgctggtgcctcgtaatgaaggaatgtccaatgtggagcaacccccaagcaccatgactcgatctggtccccagtattatgctggagacatggagcccaagataagggatcaaaccattggtgagccccatgtagacatgggagaagatcccgagttagccagacttagagaggccatctattaagtagggcaaactgaagaaccacgtgttgttggctgcgatctatttccacaagagagatgcaaatttctgagattgatggatgacctagagtgatggaatttattttaccaggnnnnnnnntctactcacaagtatgttattttaacaccctaaacatgaacttctaaatcgatacgaaataaacacatataaagtaaaagaaaccttacagtggttgcagnnnnnnnnnntgtctccttccactaagatctctaacccttgtaccctttctgtcgcagagtatcaccaatgtctgagcccaatgtccttctcttcagtttggattcttcacaatcttccaaactatgatnnnnnnnnnnnnnnnnnnnnnnnggcactactctatcacttaaggtaaatcgaaattggaagagg

SEQ ID NO: 122456 - DNA, 1977 bp, Cannabis sativa
ttaacatccaatccaatccaattgtaattggatatccaactttttgtaattggattggattggatcggttcagttcaattggattggattggatgatgcccacccctaattccaagttccaaaacccatgaagtacgatcgagccaagagagatgccttaagatattatcaataccataaggacattgaacacacaaccaatgagtgccgaaacctcaaagatgaaaatgagactctagtccttaatgggacacttacccattgcacaacacaattttcaaggaagacatgtcaactaactaaaactccaccaatggagtgagaaggcatttaacatttcttaagtttttataccttgttttttttgcaaagacaccttttgtgtaatttttagttattagactaccacctttattttctagaatgtaagtagctaaactcacatttataagagtgctacaataactagatcttttactctatgccaaacccaccaaagagtaaaataggaaaaatacttaacctatgaacacttggggcaaaaaagtgtagatataatagcgctcgcaacaaaaaatatatatctcaaagtcattattgatacatcactttaagtgcgtggaatttcaaagttttttgctatgaatatttttttttaatatttcacctcggacaaggggaaaagttggtaacaagtgagggcgctccaaggagccataactcataaaattttgcttaataaagacatcttgaatgacctacagtttagactttgacaagtgggtcgtgtgctaaaatcgagtacccaaagagttaaggcccataccgacaacttgctcgaactagaaaaaatgcaagccaccattggcaataattaatgttatctttaaaatcccatgttacaaagataataagcatcagaatgaaataagcgcaataaaatattaaacttaagttccaaagttgccaagatatgaaataaactaagttatatatgcttaaaaagttttaaagatgtgaaaaaaagcttgttagttttaactagcgagcactccacaccaagtggacgcatacaaatccacacatgtgggtcccaatgtcaatgcacaattaaaagtgcataagaagaataagagaatttaactctgttcgtggtagaccttacttaccaaccaacttgagcaagagatttaactccactcaaggatgagtttgagaaaaggatataactctactcaacgctcaaaacttaagcaagagatttcaaaactccataaaagtttcaaatttaaaaaagagatataactttactctaagttaaaaaacttaagcaaaaagttttaaaccttgcagaagtctaaaaatcgagcaagaaatataactctacttgactaccacatgagatatgagatataacttggctcacattctaaaaagaagccacgtgctttaagaactccacacatacaagtacaaggacattggtcgtgccatgcacacctattcacaataattactgacattaagtcgcggcccatgcacaacatctcttgaagagaagtaacattcatgcactctacaaagaagtattttttttttttttggcgcaagccttcagaaaagtgcaaaagcattacttgaaggcttacaagcaaataattttggaggaaaatataatacccaatttttacaaaaaaataaaatagcttctcttgcacaagagcccacatgccaagagtaccttgaagacactaaagtcaaccttgcaattctgaccaagacttataaatgtaaaatgagttaagacatccttcttgagggcctcatggcacttctagcggactcaagaacattaaccaactatttggtgttgggactctcacacccaagtgtgcccaaactagggttcataggcccgcgcgagtgttttcaccctagggacctcaatccgctaaggaaaccaataaggacttgact

SEQ ID NO: 122457 - DNA, 585 bp, Cannabis sativa
  modified_base (556)..(559): a, c, t, g, unknown or other
ttccgaaaacctctccatctcaatgccagttttaacctttttttttattgctacaatttttttccaataccaactactccctatcgaagtcttataggcccacaccaatcaacattctcaagatacacacaaaatttatcatttcactcagagattatctttcttatatattcaattaccctattgtggtagcattgattcaatttcaccacatttttaaagaaagctctacaaaaaatggcattaatttcacaaaatcttctttagaaaattcattatttgagctcatgaagaatagaaagaaaaaagcacatatagttaatcaatgtggctccctgcaaaagataaattttttgtaatgtattttctgattctttgcaacattttttccaaaagacaatcataatcataatataactatacttatgttcaatatgaagaatttgatacattttgatgcaaacttgatgaaaccctaccctacagttttgataaagtatgcacttagggctcgtttggaacgtcgtactagatcgtattgtattgtattgtattnnnntatattgaattggattatatatcata

SEQ ID NO: 122458 - DNA, 1503 bp, Cannabis sativa
  modified_base (1464)..(1466): a, c, t, g, unknown or other
aggtggtagaatagtggttagttggaatccgcttatgtttcacgtggatataaaattttattgaagtcaattaattcatttggaggtaaaggtgagaaaggagatttttcaggtttcctttgtgtatggaatgaatgatgaagagactaggaaaaacctttggcaagagcttatagatctagctcaagggtttcatgttccttgggtgatcatgggatactttaatgaagtattaagtgtggatgaaagagttggggagagggtgaagcttcacaaaattaagcagctctaaagttgtatggaggtctgtaaaattgaggatattaaatattcatgtaatttttttaacctagaataataaacaagagaaagaggggagaatttactcaaagatagacagaattatgggtgaccagttgtggttccaaaaattcagttcgggtgaggtgattttcctaccagaaggtagttttgatcatagcccaagaattttacttgtccatcctgagataagagtggggaaattccattcaagtattttaatatgtggaataatgcaccgggatttcatgagaagatcaagcgtagctgggatgctcccattgaaggaactgcgatgtatcggctggtgcataagctgaaaagactaaagcctgtgcttaaagagatcaataaagaacgattttctggcattcaacagagggatgagcatgcttatcaaattttaactgattgtcagaaagaactacagcgatttccattgtgtggggagcagattaaaaaagagaggcaagctagaacaaactatcaaactatacacaaggcaatgctttcctttcttcatcaaaaagccaaggtgagttggcttaaaaaaggggacaaaaatactgttgtttttcatgcatttatccgagcacgaaaggctgcaaatagaatctactcgatcatagatatgaaaggaaaatggacagatcagccagaggaggtaagtaatgtatttctccattattatcatgagttattgggaactaaaatagagaatcggggggcagtctcatctagtatcataaagcaggggtcaattatcatagatcaacataaacagattctccaaacaagcttcactcaggaagaaataaaacaagcagtatttgttattccaggagcaaaagcgtgaggtcccgatggttttggtagctcttttatccaagacaattgggatttggtaggaaaggaagttagtgttgcgatgatggattttttgccgacagggaaacttttttttttaatcaagaagaaaacttcattaatcaactgagcaaatacactcttaaaactctctcaaacaagcaaaagagcaaacaacaactaattaattacatcgaagcttgtttacaaataatctctcttgtctagacatttttctattctttacaagatgtaattgttggaattattttaccnnnatctatttactatcatgtatgttttattaacatccta

SEQ ID NO: 122459 - DNA, 1956 bp, Cannabis sativa
tctctctctctctctctcaatttgccttaatttgtttaaaaaaaaaaaattctccctctctttatgtgttcttcattgttggccacctgtcattaccaccaataaaagataatttaagttttatatatatgtgtatatgtatatttatgtttctatttttttttatgtatatgtgtgtatttatttaaatttgtatttattgtagtgagttttgtttttatatttttattttttgtgtatatatgtgtgtaataatatatatatatgcaaatgtttatgtgttagagtgttaatttgtatatatgtatatgtggtttaagttttttattttgttatatatatatgtatttttattttatgtgaattttgatgtgtgtgtatatatgtattttattatatatgtatatatatttatgtgtgtatttatatataattttagtgtatgtatatggttgtatatttttgtgtatatatatgtattttagtgtatgtgtttgtataatattagtgtcctaatattaatatataatttttttggttaataagttataggtgtcgttggtgtatcgcttgaacttttatgtcggttgattattgctcctcatcgtatttgaagattagtatgattttatcatatattattttagttttgaaaatagaaatgcatattataagagtttgaatatattagatattcatctgtagtgaagtaggttttgtgaataaatgtactatagtcggataggtagatattatttgatatataaggtttgaaaaaattgagaaatatttaatttaagttgttatgctgctaaaaatttggtaaaaataaaatagaaaaaaataagttaaaacaataaaatttaacataaattaatagctttttttttaacataaatgataaaattgaagttaattattcatagttcacaagtctattttattcaagaattgataaattgtatacagaggacaataaaaatgttttacaaaatacattatagatataattttttctcaaattggtcgtcccttgttccctgggttctgtctctatttattggagtctatgatgacaactatttccttgagatcctatcatttgtaaccatttattaaacgtgaataattcccatatttcatatttacatacacataagataattacaagtatcttctcataactactcttttaattttatctgtaggcagttatgcttactatgcttcattcttcttgaaatattacatttctcctttcgatgctttatcataacaattagtgtctaagtatacgtcaagtaatatttctcgtgttcttccattagtgttgaataaggcatacacaagacgcttatctcagtgtgataattacgaggtgaatcaggatggggaagttttcctttgtctttcaacatactcatgagtatgtggtttaatgaactgcgagctctttaaataattcaaaatctatcatttccaaatattgtcactgttgtgtattctgtttatcccaaaattgccacaccccactaatttaggtgtgttattgtgattttatattaattgtgcctaatcaacaagatcaacaagtttaacaagtttattgaaaatcgtgaataattaaaattttgtttaaatacttataaataacaaaataaataacatatatatatgactgggatctcgagtataagatatttacatatttacaactttacaactattacaaagacaaagtaccaaagtacgtaatacaaaagttgttgcctagcgactatataaaatacaaccagctcttccaaagatcgtacgctaaggcctaatcaccccgacatgtacaatcttcatccgcttgctctcatgattgctcaaccttagtcttgcccttaccattacccgacaaagtataatctttagcttgaccagttaaaacctcttcttggatcttcacca

SEQ ID NO: 122460 - DNA, 1014 bp, Cannabis sativa
tttttttttttttttttgaaagccccagccgctactatgatgcatgtatatgcacaatagtcctttttttgaattcatacacagtgggcttcggatatatatattattttatactatgattatatatatatatttaatcacttttaattttaacttgcaaaaaggcttcaaattattaatttttgaaaagtgaattcagctatatcaattgatcaactttttttttaaaggtatttcatctcttaccgaaatttattatcctgacatcattatttttgttttagtcaaaatatgataatatttgacaatttgaatttttttaagatttaatatatcttctatagctatatttgattttagaagactttttgtggcttaaaaaaacctagatcaaagtggatcatgcaaaaaatataaaaaattttaaattaatttgagtagcataacggtattaattttttaaatttcatatattttccatggctatatctcacttttaatgatctttttgtggctaaataaattaagtctaaatcaaaatagaccatgacaaatataagaaaaatattgaattacttttagcaatatagcagtgtgtaaaagtgagattttccccttgatctcttggctatatctcacttttggagaccttgtatggcttagatagcttaggtcaaagcggacataaagggagaaaatccattagaacaaaaaaaaaaaagatttagagtgatgagcaaaaaatagagatttttatatgtcacttactatgtaaaaatctttgtaaaaattcttgaagatgaaaattttgtgcacaaagccttctcgctttcttattttctctcctattttactcttatgtttgattctaaaactacaaaaaaattcttctgttattctgctcccttccctttttatagagactttttttttattacttttattttttaataaatacccacttaatgtagaagtggtgagagtggaaagaatatctcttacatttactctcat

SEQ ID NO: 122461 - DNA, 615 bp, Cannabis sativa
tgtacaaatttttgagttaatgcggttaaaatataatacgactataataaaattataaagtaaaatatttttgtcattacttttttaattaggatcattttaataataataataggtgtaattaaagtggttgtcatgaagttaaattacgtgtctgctttatgttctgttggtcattttaaaaaaaatatatataaaagtataaaaaaaataagtatggtggattaattaatatgtcgtatatcatataataacccaagaaaagaaaaatttattagtacacgctcgtggaaaaacttcactttttcaatacttgtgtacttcttgttcttttctgttcctttttttatttctaaaaataaaataaaaattaatataagagatggcgtttacacaattctgtttggttataaatttgttccaacacgtaaacgtaataaaatattatgatcataggttaataatataaaaataacaataatacagtaataaagttcaattcaagtagtgtaagttatgggaactttttaactatatataataaatttgaatattcaatttagagctaatatagtttactactgcctatgcaacaagtatatatatatatatata

SEQ ID NO: 122462 - DNA, 1429 bp, Cannabis sativa
caataacaaaaaagagaatcattcactacaatttgatctatacatatatataggacataaacattaattaaatgacaagtaattaaatctaagcattggagctcaagagtcaagagttagagataagagctcgtgactctccaagattggcagtggagcactctgcaacaaaacagaattatgtttgggaaggagcttgtaaatgacaattaattaaatccaggcatcatgtttcaacaaaacaaataaatgaggaaatgtgtctacacttgaaagttaagctagaataatttccttttaatttatgatccaaacacatcctttgtatagcattaggaagtcagaatatgctttaaaacagttagaatttctctgaagactctactcccatcaatcattttacaatttccaaattaaaactaattcatgagaattattattgaaaaataaaatactacttggcctagctgaaacctagatcattagccatacccataagcaatttaatatttttaagtcaaccaataaatcatatgatgatgccatttaaacatagccaagatattagctagttgaggtaatggaatagaaaaactcaaatgataattccgaacataactcaattacaaagtataggatgatagctcaaagttcaagctgatgtgaataaaaattaaatacaaaaccaaccactataagattattttcctactgtaaacaaataactaaagttaaagttgtattcttcgaattcaaacgatttagtgttgttaaccagaatatgttaacaattaataaacattataaataaaaataccacactcaattattcttcttggaatcatgtaataactgagattacatagctaaaattaaatcaaaattaccactattgagcatattctggttaacataatacccaattactcaaagcttcaagtgaacccatttaattctttagaaaaagcatgatttagtgttgtaaaatctatacataatgttagagtactttgccactagacaatcaattaagcatggtggaacaacaaaaaaaaatggcaagaataatttcaatgggctcttgggttgtggaagtaattggtgtaaagagcaattttcgttcaactatagagggagtaccatggaacaatttggaaatctgtttcataaactaacccttttatgaattgggttttcatgaaagttacctaaactggaaaattgtccatgaaagatgaaaataaacaatcagtaggtttcttcatttaaaatccataaaccaaaacacaaaaaaatcagaaatgaacacaaatagatgaacaaagaaagagaaggaaccttcatctttatataaataatccaaaattagcgcccgattatctatcaccaccacctgtagtagaaatccattttctttgagcttgaactc

SEQ ID NO: 122463 - DNA, 772 bp, Cannabis sativa
attatctgctaatttctaaatttaagctaagcggtctttacactgtagaaactaaaagtgtaaaaataagagttaccactctatacacaagcggaaaaacctttactttgctagttgtcaccagccgctgacgtaaatcagaaatagttgttaacactgtattttaggaagatttcgctcatgatcaaaatgttcaaattgcaaccttagatgtatcatctcatattttgtaaaaaaatttgggtaaattttttgtactagctagaaaatgtcatcaattctgaataatgcatgcatctctctcgaatctaaagttgaactaagaatgagtaactctattgtgttatcattgaatttttatttaattcttgctgttgaaagtttaccactgcataaaagtataaactccataataattctccattgtaagggcatcttgttgatcatgagctcttattcttcttgaagtataatgagcattaaaatatgacacaagtatattaatagagtcacaaaaaaatttcaccttattaactaattcattccatccatcttattgtattttttgaatcagaatcttagtagataaaacaagatactttgcatttgaaatatcttgagactaaagttgcaaggcttgacagagtatagtagaaatctctccaattttttaaatgagatgtaaaatgaaaacaaattcaaaagaagttattgcctcataagctgtatctacatctcctcgttgagcaaaagtagtggcatcttcaataaa

SEQ ID NO: 122464 - DNA, 887 bp, Cannabis sativa
  modified_base (453)..(454): a, c, t, g, unknown or other
ttgacatttatagagttagaattaaaatatggcatttgtgaaaagaaagatgagtttaaataaaatggtaaattgaaacccaataggcccactatagggttcgaccaaggagattaataaagtcattatttttatattttttaattctaaacctaaccctaaaaactaccctataaataaaaaagtatatatctcttattttcatatgaggatcagactcctttgtcagacaaaatagaaaatagagaagagccaccatctatttcgaaatcctcttcttcttcctctgttattttcaaagccttggtaaattgagagtatacccacacatgtcaaagcaatacctaacatattgagaaatattgtgttgaagcaaatcgaaggagagaagatccagattcagatcttgataatgctctgctatagacaagaattaagggctagagatctgannggaatgagtcattatatttcgttgccatcaatgtaaggattcttaatgtcttatgtgtttattttattgttttaggaaattcatatttactagaccgagtacttcaccttggggtgcaccgattttgtttctaaagaagaagaacagaaccttacggatgtgtattgactactggaagttaaataaattgacggtaaagaataagtatcatttgccaagggtagatgatatgtttgatcaattgtagggaaagatcttcttctctaagatcaatctttgatctaattatcaccagttgaggattcgataggaggatattcccaagacaagtttttgttctcgggtatgaacactatgaattcttggtgatgtccttcattatcgagatatggaatataaatgattaaacaaaatacatattttaaataatgag

SEQ ID NO: 122465 - DNA, 3094 bp, Cannabis sativa
tctagatcctggtaaaatatatattctaacaaataattgattaccaacctttgtcttcctctagtttgctctgccctattgttgacataaaaggcatggcacgcccatggtgagttagtgtcctcgatcagtccttgtgattcaagttgttggcattctttgctcgccatcttcattttgtttgaatgggagagagatgtagaattcttcatttttccataatgggtgattgcatttggctgagaatttttagtgagactttacacatgacttttgaatcagcttttctttgattggtaagaatacgtctggtgccatgtgaaaataattcaggatttgctcccatttggtgaagaaattcttgtaggccaatccttgtgggagtattctaagccctttcttttttgtgtaaaggtcgaatcctattatgaggtcctttcctggaagttttgatccaatgactgtggacacagaacatgcggggaagaattgcagctttattggctagctgactagttctgtgtggaggacttgattatttgcgacatggaaatactgcttctttttcttccatagttcgggggtagaatgtccggatttatgattgtgtatgatgctcccgtgtaaaaaatgcagctactttgattggtcttgagtattttgttgggatgacatgcatttttgcaatcaggatcagttaaccagcagtgaacgcaggcatgttgaagagtccaccatatctgtcttcgtcaaaatcagttgtcagttgtaatgcgcacatagtatttggggagatttcatcttcgactgagaagacggactcgacatcattattagagagagacactccagtggtgtcttctatgtgtgttatcatattggcaattttgcctttcggacattgtttttgcaaagtggcccttttttccagacaagaaacaccgatttgatgattttcctggatttttctttctcgaaggaatttccaaggatttttattctttgaggatctatacttgaagcttttcttcttttcgcccttccactttgagcatgagcatgtgtttttggtagaacatttgattgtaagacctttttggttgcatgctctgtcgagttattttgtttgcttcatgtactcttgtaagaacttgttttgagagcacatcttttccaaggctctcatcaccatttgaaatagttctccaaaagttgcgttttacagcgtcttgttgtttgcggaaaggagtttgaatgtttcttctctgagtggttctggaatagacaccaagaatgtttgtttgaggtttagatcgtctacaccaccgattatataaaatcgcttggtcattctttgaaagtgcaattctaaatattttttttactgaacaacacctcgttttaaaaaattcggccctgaaacattcgactacttgggactcttgaccacagaattcaacgtacaagtgatttagtgctgcttcaatggaatctgcgtgtaaaaattgaagttgtctatattctccaaggctttgccactgttaagcaaaaaatttacatttagaatattaaaaataaatgcaaaacacaatttcacctatgccaaaattatagcattagattttattaattcaagctcgacccattcaagattataaaaataatctcttaattacagtcctttcgtttaaaggaaataccctttgattccaattacgatgatattaaatgatttgaaataattttgggaatttagggtgaatatggaattgcagctgaactcagtcaatttaattaaccaagctgcctacataccttctttgtgaaggatcaagccacttgtagttcagaatacggtaatttagaatttagatatagggattccgatagatgaccattttcaagaatcctttgctatttaaaaatttaaaaaaattcctaggtggatgaccttttatgaaattttaagatttgtttttttataccattttgcggtatcggcgactacactcagtcttagcaactaagttgcctacgtatcttttgtaggaatcaagtcaaacgtagttccaaaaatgttgaaagattttctatcttcaataactttgtggagaattgactcactttgatattttgaggtaaatgatctcactttggatttttgaggtgtatgacctcatttagaatttttatagaggttaatgaccttatttgaattttactaaggtgaatgacctctttatgaattttaaaaattgtgattgtgcctaatcttagcaattggttgcctacgtatccttttaaaaggaatcaaatcgaacgttgttcatatgtttggtgtttgcttaagatccaacgagtggtacacaaaaggtattaggtagaaagtatatgtatatgtataaatagagtgtgtcttctctacttcatatacattatgtaggcacacgtatatattatatatttatacaataattttatacatatatgtatacatatgaattagaagatgatggtatatattcaagtcaggttccactcttaaagacaccaaggaaatacaatattatatatatgtgtataatttataaagatagataataatattaataaaatacattgtcttgtttgacttttcaaaggtaccacaagaattaataggttctttatctctatgtatgcacatatataaattttgaaacaacttgcaccatgaaccttagtcatcaacttatacgattattttttgttcgtatacgcacatatttgtttcaaccttgagattaatttgatctctttcgaattttacttcagtagaattcattttactataatcaagttttgacttggccaaattgaggtattttattttttttttttttttattaattgcaataatttacaattggttaaaatttatattttgggaaaattttgacagcataacatttaaaaaatttattttcttctttgatcatgcaccccatattgacttattttctaaagtctaggaaatcaaagagaaacataaaaaatctgtaatgaaattcggcaacataacaattattttttcttttgttaagatttctatctt

SEQ ID NO: 122466 - DNA, 3433 bp, Cannabis sativa
acagctgtacatttctgttacagcattggttagtctcaactaaccatttcttgattgtattgagctatataaagttctttttccattctgtaaaatcagttcagcaataataataccaaaagctctaattttcttctgttttctctctaatttttctcatactgctcatacgacttattaactgttaattggtaaacctcacttacaaaattcaaaattatgtaatctaatattcctgaaccataaacaattaaaataagacaagaaaatgtcaaaatttaagaaagcgaataaggagaccagcttatatacaactccacaatactccaaccatatgagtgcgtctgttttctagtctcctaatttatattagtcctcgacttcaaacccaaaaccatatgtatacacattataattaaataagaagattgaggtcaatatttctacttaaattatatagtacataatgaataaagaaaatttgaatattgacttaacactaacaaaatttctattgcagcaggtttgattccaaaaatatttaatattgacctaatataattttatctcctaaaatcaatcctgtatcctttaatgactcactaatttttgacaaacttgataacacgaagccttactattaagacttgaagccattccaatatgttatctcccatcggcatatgctctctgaaccattcgactaacagtgttccatacaataccagtgtttccataaacacaaaacacacccataacatgcctcaaactagctcagtcttgatctcagcctacacccatgcataatacctatatacagcttgcagcaatcatgcaagtcttcgcactgaacaacccatctgttgtagtgtttccctctagattcacacaccaaaaatgagcaagtatcttgattcttcaaacatatgaattagtgggctcccccacttcagcttaggaagaacttctctcttagaggaatacctctcgaggtatagctcataagctaaccgcatactcacatgtgatccttccattctaaatgtcactttgatgaagatgttgaactaatgcctcagtcattctgactcttcgccccttgatatttctatgttgccttagtaccatagttgttgactttcaccttaggccaacattgtcatgttgttatcttagtacttgagtcctgctgactttcaccctagataactagcatttcctgtgtcctgagtcttcttggctttacattctggaacaacaaaccatctccatgatactcatctcgatgcttgtattgaatatctagtctgctgagtgaactgtgagggtctctcccccacttcatctgtgggcatcctcgacaacaagcccacacgcaaatgtctgactgcctaacttttcatgcacaccacgccatctaaaagtgcatcccgcaggttgtgactctcgagtcaactatcacatatagcacccctgttgatttttatatgcatgccttgtccactcaaccatccaactgattcacactagcatcacgcccttctaggctccctcgatgtactaagttccaatgatgcaaccctctagccttcatgaaaactctagcacccttcttgaccttcgtaggctcacatgactactaagtctcactggcacagccctctagcctctacttaaactctagcgccatattgtgcttagtcttcttagccctgctggcttctttgatgtattcattcaacaactccacatctctatcaatgcctttgtgtgacttacgcccactggcgcttttacaagccaacacatcccactcgactgtgttggctcttcccatatggatcaaataaaagtcacatgcaaatgcctccaactacgatcatcctctgacgattgcggcatccgcctcttggtctccatgtgtgtccctcttgacacacacacacacgtagcaactgaatcattccatgtctatccaaatttaaaccatctcagtcatcaactcttgaccactgtcgtgactaacaagaatctaacggcccttgcaatacttctacacccatgccaataagtttctttttcaacaaaagcgcctcttgcggcttacgatgtcacttaggtaaactcgacctagtgtaccaagcatacagtatggactacctaatcaaatcttctactatgccaacgagtttcaagcatttttttgtgcctctctaaaatttcacatggtagttttctttctagcatccctaaacttaatttaaaccaaccatcactgtctcctttctaggatgtccagcattcccacaaagaaaagcaactcaatctcaactccatatccgtctattgatccactttaggagactaactagctcaatgacatcttgttccatcattcaaattatctcgatcatccacacgcctacatcccctctaggataggccaaccaggttcacctcccagtgagatgaacttagctctgataccaactgtcacgatctcactttttcaggcaatggaatacccatttggcactttgacttctctaagccaaggttagccttccagccattcgagtaataatgggctcatttattgcacgaccgtgtgcctctcgcacactttcgtctctcaaacaactctcgttgagtcatgctcggaagcatctatgagtgcatccatgcatcgaggctctctagccaagatactcacactgtctataggttcccactatgataaagaaaattccaacaccatcgctcacctcgtcactcgtgaccaaggtagcatgtgtggcaagatgccaacactaagttggcgtgccaacgcttctaatcatgccccatttgataccatccgaacagtctctctcatcgcccaaggactcccatacgtccatggtctaattctcaaggcaccatgcctctacacatgttggcaagctcttgagacaattcaccaaactagtagcatacgttagacctctgtctctttccaacatggtgcatccatctcatgcgcatatgcaaactagcctgcgaatgactacctgtgtcatctcgtgttgagactcatcaccaaggcgcaccacaatgtctcttggaggtttagaccatgtcccgtgcaagtagaatatcgacaagccaatagaaacatacctgctaacctctggcaacattcttagacgcactatcaggttagcccgatagtatccatgaatattctaactcatggagacatatgattcccctcatggtcctcatatgcccaccatactagtctcactgaccagtagtagctcgcctagcattaaggtgtcaggggtggtggagagttgacaccaggtactcccccttaaagagaattctaagcttttagccttctaccaggaacatatatgatttttgctttgtagatattgttgggttttat

SEQ ID NO: 122467 - DNA, 885 bp, Cannabis sativa
tgacattgtagtatgaagcattttaaaatgctaaatagcaatgctcaaacaaaatatgaacaaaatgacagattgctacaaataattataaaagttgcatgcttctacaaacgtacaaaatttcgtatatgaaggaatcaaaagtataatgatgatatggccacgaaatgagtagaagtcccccacaagaaaagtagtagatcgagtatgatctagctaagttaacacttttataggtgttaccttttaatattttttagttgaaaagaagtgttgccaagtataatttttctagtagtggggtattttaagtagtgatcatttgaaacgtgcatgcatgatatgggcagtggattgtagttgtatgaaagagtcagccacttaaaccaaaccactcattaaataatatcaagggcatcaaacggaatgctaggtattccaattcaattgtaataatatgctcaaatcaaggccaaaccatttgcggagatgaaaatgtgtgcccgtattgatagaacctgttggctgagcagttttgcagctgtctatgtaagtgtcaaacataatattgtaataatataaatatataaaattaatggattccattctttagaaaaaaaaaatacatatatatatatatataggggtgcacataaatagatccaatccaatgataactgacttattcaattacaatcaaccgcgaaacattagatattcaattgtgatcagatcgaattggatgttattttttaatatccaattggatcggatcggatgttggatgggttgtccaaaaattcaatacatccaacatctaatcaaactaattagtattttcatagtttggatgagtaattaaaattttatattattatacgtaaa

SEQ ID NO: 122468 - DNA, 1459 bp, Cannabis sativa
ccggacccaaataaggatcggaacccggacatgaactgggaccaaacctagaccctgacccaaactcagaacaagaccttaacgcggacctaaacctagaaccagacctgaacccaaacccgaatccagacggggatcggatcctgggaatcgaactcgaaacaaaaccgtaacccaaattgagatcgaaacccgagacttggacgggaaccaaaacccgaaccaatagtcgaacccagactgggatccgaacccggacccgaactcagacaagtacttgaaccccgacctggacctagacccgaaccccaacccagaattgcaacgggaaccacaactggaccaggaccaggaccaagaccaggaacaagacccgaacccaatcccaaactaaaaattggactgggatccaaacccagacaaaaactgggaccagaacctggaactgtgagagacttgggccccagaactgggaatgggacataggattcagacctagatcggagacccagacccggaacttgggccccgaacccgaacctggaccaatactgggaccaacggtctgcacctagatgggggacctggacccgagaatttggcccaagaaccaggaccaagacccaaaacgtgctcctggacccatcacctaggacttgactactgggaccggacaccggacccgaacctagaccaggacctaagacccggcccgagacccgagacccgaactggaacaaggacgggacccgagaccaagatctagatttagagctggggcttggacctgacccatagtcagtgtatggatctaagacaaagactcggatatgtacccgaacccagacatggaccgggatccaaactcgaaccgaaaccagaatcagattcgaactgagacctgaactccgacctgaacccaaacccaaactcgtatacggaattagaatcgaaccaggaacgagactaggaactagacctgtgatcgaaagaggagcctaacccaaacctcaacccaaacttggaccagaactcataccgggacttggaggcatcttgggactcgaatcacgggaccaggcctgggacctagactaggaccgccacctggacccatacccgtactaggatcgggacctggactcgaatccaaacccagggcagggcctgggaccccaaccctaacttggaccctgaccgagacctaggacccaaacatagataggggaccgggacctaagacttgggcccccaaaccaatctgttatcccaatttttgccctctcacgtggcatcacgagaatggtgacacatggagtccacttggaacatctgctcgggaagataggccgagcaggatgccttgcttgcatatccagagcaagatattcagcgatccgcgtagagcaaccaacacttagcggattcagcttccgcatcatgagtcatcagcacaatc

SEQ ID NO: 122469 - DNA, 793 bp, Cannabis sativa
  modified_base (743)..(768): a, c, t, g, unknown or other
tagttgtaataggagtttctatgtagaattttgtaaaaatgcaaaaaaaaaattattttaaagtatataaaaaaaaaccctaaaaaaatagtgatttaatattatttctccccacatatttcttaatgaaaaaaaaatcacacaaattgaattaagtatgtagcatgtttgaggaaaattttgattaattttttaaaaaatttgtgtgcttggtgagattgcatttttaattaacttcaattttgtgctttaatgaacataaaattataattggtaaatttctagcaattgaagtggtttatgcatgctaaatgtggattgtagaaagttggttgagaagaaaattatagaacttgtttgtttactatttgaggtgaaatgatagatgatgcatgactagaaaagtgattgagacaatttttagattgtgtctttcaagctaaccttgtttaaatttctctttaattactcttttttagcctaaagttatactttttattgtcaattacttgttttgagcttaactgaatactttattatttttcagtcctaaatggatatcatgagcatataaagatgtaaaagagagaaatgaattgtattaagtgttatcctttgtagagtggtattgacaatagaaaagttcaagtgaatgttgaggacaaaaaaaagagtacaaatttgaaaaaaataaataaaagaaaaataaaacaaacaaacaactgttataaaataatataaannnnnnnnnnnnnnnnnnnnnnnnnnaagaagaagatgaagagagaaagag

SEQ ID NO: 122470 - DNA, 1202 bp, Cannabis sativa
caaaaatacaatcttgagttttcttaagtaaaaaatacaaaaagaaattcagagctaggaatggagactcttgtccaaagtaggccgcaaagtgttattaaaaactgttgctcaagctcttcctagttatgcaatgtctgtttttatttttcccttggagacatgttctaaactggagggcatgatgtcaaagtactggcagagcacttcctctaataccactcgttgaattagttggatgagttggaagtgtcttactcaacataaagatgctggtggaatgggttttcgtactctcatgactataacctgtcgcttcttggtaagcaaggatggtaccttctcttaaatgagaactttcttgttgggtgtgtttataaggctcggtactatccttgagaaaactttctatcggcttcccttgtgggtaatcctagatttatatggaaaagtatttttgattcccaagacctggttaaggcagtttctagaatttgtattggttcgagtataaatacgaacattctcaatatgcctttgctcccatctgatgataatccttatgtcacttctactgacgtgatgttacaacatagcaaagtttatcaacatatgaagaccaacactagagaatgagatactaatgtcgtccatgatgtttttagtttaagagatattcagcatataatgagtattcctcttagcgagcttactaatagtgatacctgctactagagcaaggaagcaactgggttctatttagtaaaaagcgcttaccaacacattcaagtggtgaaaggcagttggtccatggatgtgacatttgatatgtggaagcacttttagaagttaaaagtacccccaaaagtccttcactttgattagatagctctgtcaggtagtttggcgactcgtgttcaactgtaaagcaagcatgtctcggtcaatcttcactacctattctgcaatggagctgttgaaactgtttaccatcttcttattgagtgttccttctccaaatcatgctggaacatgtctgctgtagctttacctccattgatatcagctgacttccacaactgatttactgaagtttggtcacgacacaagggtgatgctgtttgtaataccctaagattaaggaatcagattagtgttacgaaaattatgtttattacgcaagtgtacgcaatcaagtagta

SEQ ID NO: 122471 - DNA, 1320 bp, Cannabis sativa
ttgttgcgatttaagttgcagcgctagttccaataagagtttctatgtagaattccgtaaaaatacacacaaaaaaaatattcaaaagtgtaaaaatgaaaaaagctcttatttttatttgttggtggacatattacaaaaatatttcttactatttgtattatttaaaagatttgtatatacttagtttatcttctatattaataacaatagatacctcactattaaatggtagtttaaaatgttttaagagaataaatacaaaacaaagattatataaattaaaagtgtctaccatattataataacattttaatgaggtttgccataaaaaatttaaaatttttttaatagtcaatataaataatagaaagattatgaatgaatttatgcgagtacatggattaaaaatgtttaatatgtagaataacacatcataaggtattgtattgtattgtattgtctattagtaatatatattttaaaaaatttggatcattatgaaaatttaaaaaactttaaacaattattctaataaattaattttaattcctattctttattcttttttaaaaaaataattacttacaacaataggccatcttaattttatttttgatttttttaataaaataatcattacttctttaaatatacttttacctattgattaaaaaaaataagaacaattttatatatatatatatatatatatatatatttaacttttatctactatactttatttctttcaatatactctaaataagcttgttttattaatgcttaattaatcagttgttttgtatttctttatgcatgtattgtgtttaaatacctagtgttttcaaaaaagcttgtttttttaggaaaaatacttgttattattaaacaaataattattcgtttacaataacagaagggaaatttacactccatactatattttccccatttatttcaattatactgtgatacggccgtaatttcttttttactgtacatttttatactatctttctattttgtgtattctaatactatttgattaaaaaaaaaaaattattctttgtgtcagcctagagttttgcatgtgtttacatattattttttttttgtattttaagtgataaaaagttgatgtgactgggtattgtcacatttgtggcagctttttttttttcttttcttttaattcaatttaatcatcatttcaatacaattactcactctttcccaccacgttttggtactttatagttatacctactatcccatttaattattcatcttcttcttcttatgttctttttttttttt

SEQ ID NO: 122472 - DNA, 933 bp, Cannabis sativa
atatttatatatatgggaaaaagaagttagtcaacatttttatggacataaaatttattatacaaactatagtaactttagaaagaaaaaaataggaaccataaaatatcataaataaagttaacaagatttttaagaacaaatatcacccgagtactcattgttgccagaaaagtcgttgaaatttgctatcgtcgtcgaaaagtcactgatatttatcatcattgtcgaaaaagcggccaaaattattgtcatcactggaaaaatcactggaattgtcatcaccgtagaaaaagtcatcgaaagtgttgttttcacaggaaagtcaacggaattggactttagaatttaacagaattactttgttacgttcatcaactagttagaaatctaatacacttaaattagttctgtaaaacaaccaaaataaaaattaatacaccaaaatcaattatctaaataacaaaattaaaatctgaaacttaaaaccaacttacctaaagaaaacaaaacaaatagtaaaacacagaaattagttacttagtacaataaactaaaaaaattaaaataaaaaaataggatgcataagcaatgaaaaaataaattgaaacaaaaaatcagttaataaaaaaatttcatagaaatcatatacatctattagctaattgaaaaatatgacttggaaaaaccggctgcataaaataactaaacacaaaaaccaattacataaaataactgaattaaaaattggtttcttgtattaaataaatcaaaaatcagtttctaaaaaaatggttactatcatgcacttataaatattgaaaaattggtttttagaggtgaaaaaaactaaacatgtgagaaaaatctcataaaaatgtaaaaattaaaaaaaaaaaaaattataatataaattttaggctaattaggatt

SEQ ID NO: 122473 - DNA, 720 bp, Cannabis sativa
  modified_base (675)..(694): a, c, t, g, unknown or other
ttctaggtcgaatactcgcacttgtcgtttctctgaaaattctcttttgtattaatcaaataatataatttggtgttgcgaaattcactcgacaacaaataatgtttgtttctacatgaaaaatgtaatttatacatatttataatacaaggggatataaatatcacttggttagacatgtttaacactggaatataatgctataccctttcaagccgtttacattcataaaagaataaagaaattataatgtatgctaatttgaatacaacagtactggaatcattcttcaagcgtaatggtattttacaatcagttaatagcttaatagcttcaaggtcctaggtttgaacccacgacctctccttttttcccatccctccctcaccaagctagccttagtggcttattgtccaaataatttgagaacgcactgttgacactgcacacccatgtcgtaaataaaattttctaataatcaaaattcatgtaaacactaagttgaaaattaatgccacataagtatgtatagtgttttggtgtaacaatgtgtgcatatatcattagtttaactcattactgatgatttgttacaattgagagcattttttccaacgcaaatcgtataattgtaaaaaaacaattaggattgattaggggtgttcatccgatccnnnnnnnnnnnnnnnnnnnnaacaacatccaatccgcactaagtgc

SEQ ID NO: 122474 - DNA, 597 bp, Cannabis sativa
ctagtggctcatgaatatatttaatctttgttccacttacatatatggggtcctcactctaatcaagcaagttgataagagcatttatcacatggctcaggcatgacgattattgagattaccctatagttaattcacttttagttgagacaagcttttagtctctttttattattattagttaatttgttcactattaaacttattataatatttttctttttttgctataggtgatcgagataatgacgggatggagagatgatggagagatatgagtcggtgcaaataataaattgatgataaatgttacaaaatagacttttaacacattagacatgagctttaaccctattattttgtacttggaatacatgtattagatattttgataatatacaaaatatattagattttattaaattgtaattacgttatttggaggcattataaaatttaataattttattataaaaaaataacattaataaagtgttattattaaaagattataacaatattaaaatgtaatattttttaatatataacataataataatgtaattaaaaattatatgattacatttttaaaatgtt

SEQ ID NO: 122475 - DNA, 1132 bp, Cannabis sativa
atattctgttaaaccaagaatgttaaaccaagaaataccgttaaatagacacttttaatatataaagatatatataaattaataattattataatttataggatagagttatgatatttattaaattcttttgagacttcttgtagtgtttttattcttttttaaaaaattaatataatcactactctatattgcatgtaatcttacacagaatatgtaatggaccaatggttatatataggttatatttgatattttttttttttttttaaaaaaaaaaagaagtatatgtatatatcattttatataattaatgatattttggagtgattttagctcataaaaataaaaataaaaaaaatagagaatttaagagataataaattaaggtatatattttagataattatacaatatatctcttaaaataatgcactaataaattccttatatttttaagaaaattttcaagtagtcatgtatgttatagttattaagatattctgtaaaatttgtaaaatttagaaagatttaacaccctcaaaaatattgttcaaactgtgtgttgcacacgtgactatttaattctatatgcatgtgaattagactttttgaactctgctttctataattttttaaaatgttgcaggatgtcttaaataactataacgtacacaaatatgaaaaaaaaaattaaaatattcttctacgctgaaacatgtagagagtgcatcgatacatctcttttaagggagtttattgtagaagaactttatattttatatcaatcaatattatgaacttaataaaaaaatttaaaaatgagaattaaagagaacatatagtgctatttagaaagattttaaagtgatatgatatcacctcatatctctagttatattatatatataaatgcatagattgattatctctcaattctaatgcaattcgctcaacatgattattttcaactttgtgttgttactgattggaatatttattttgttaaatgataaaatagactctatatttttcaaaatagtataaacaagaccttaagccttgagctcaattttcgataatattttttttagactaattaagatttttgcctcctgaactttgacatgta

SEQ ID NO: 122476 - DNA, 2524 bp, Cannabis sativa
aataatttccaacagttatttgtaattgcccaaacgtatttacacatagctgctttgttccactcttcaactcttttgatacctaaaccgccatctgattttagagtgcaaacagtgtcccaattaattgctccaccccctgaaacaaagactgccctttccaaagaaaagctctgcaaattgcttcaatgcctctaattattttctttggaaggaggagtatttggctccaataagcttgaatcgccattaaaaccgagttgatcaaaactattctacctgcaaaaggacaagttcctcgaactccaacacctaattctggcagtcatcttctctatcagtatctcactgtctcttccagattttttctttgcattgataggtattcccaagtaagtaaaaggaaaattttgatttgaaaaactcgaaatttttagcagtctttcaactacagctggttccatattgctgcagtatattgcagtctttgaggggtttggctgtagtctaaaggtgacagaaacaagcttcagagcttgtagtaagtacctgacacttctctcatcccctttgctgaataatattacatcatctgcaatagcaaggtggttccatttcagctcaatacatatatcatgaaagtcatccttgtccccaatttttctcatcagtctagatagatactccatttctattacaaacagtaatggagatataggatcgccttgtcttaggcctctcttagatttaaagaaaccatggagagttccattgaacatcagagagaacctaggagttgtgatacactgcatgatcagattgacaaattgatatggaaactgaagtccacgaagcatttcctttataaattgccattccactgtatcatatgccttttagatatccaacttaatcacacatcctggtttgttggatttcctcccataatgtctgattagatcttggcagatcacaatattgtgcccaataaatctgcctttaatgaagcctccttgtgaatgagaaataatattaggtaaaaccaatttgattctagaactcaaaagcttagttgcaattttataaatgacattgcaacaagcaataggtctaaaatctttaatagttttgggacagtttaccttgggaaccagtgtaatcacaactgagttgatttccttaagaatcttgccattctcaaggaaagaagctacagcttggaaaatagagtccccaatggtttcctagttatcctggaaaaaataactagagtaaccatctggcccaagagactttgatccagggatgtcaaaaacacccttcttcacctcctctattgtaattttcctcacaagcagctctgagtgttcttgtgataccatagggcccctcctcaaaatgcctttgaccactgacttcctactctccattttagttcccaaaaaacttttataataatctaaaaaaagactcttgcaccagaattgggtcattaactctttctccattttgttgctctatggaaaagatcctatttttcctcaatctttgttttatgctagcatgaaacaaggttgtgttgttatctccatcatgtatccataccatttttgctttttatctcagaaaagaaacataatcttgctgaacctttacatatctttcccaagccaccttctcttcattatgcagctcaaaatccaaaggattttgctgtaatctagtctgaatgttgtctaagttagctttagccatagctgtaaaagcctgtaagtccatatatccctccttgttaatgtccttcagaaccgctttgaataatttcattctcgagaccacctggaacatttttgaaccccctatagattgcttccatatctcttccaacctcctatcatatttagaatgagatttccacattctaaagtatttaaagggtttgattccaccattcaaatggggatacaaagtaagaaccttaggagaatggtcaaataattcttcattaagaaatgtagcctcggcattctcataagcatttagccatgactggttagctaagatcctatcaatcttaaagtagattcgatcttccccatgctgtttatttgaccatgtaaagaagttcccactaaatttcacatcctccaactagcactgattcacacaattgagaaaatgatcattcggattgcttttaaccctgtgtccaattctctcttccttggagagaatctcattaaagtctcccattagacaccacttcccaattggagccaactcacacacatctctccacagttctcttctctcaattcggctatttgaagcataaactacagtcaaatagctatcaaaaataccatcagcagtcacaattcttagatgcataacttgacttgtgcatctaataatatccactatgaatctcaaaagattccaagctataacaatctttcttcccgcatgccaagcaatgttggaagagaaacaccatcctgcaaacacattagagtacaagttc

SEQ ID NO: 122477 - DNA, 725 bp, Cannabis sativa
cactgatgaaacagggactttgtctttcgaagcatataattacaatcacatttcactatattgacattactgtaattgtgtatgactatatgttctggatttaacagattttgtgtctatatataaattaaaccataaacatgaatataacatgtaagcataaaatctcaacaaatcattctaaaggagctccttaacgattgtaccacaggcaaataatcagtttcaataaagacccgctgccaaaaatttgagtattgttttacccagctaagagcctctctgaagctcatggcttctgaaacttcagcaaccacattcccttgaaaaagcttggtccttccttcaataagaaaccccttgtcatcccgcgcaaccaagctaaggccgaacccgttgcgatctgcaaagatagccccatctacatttaaaatgattttttttttatatatatttttaaatatttatattatatggatcaatataaatgtgtcacatgtatatatgagtgtacacgtggacaatctactttggcatataataacaaaagatagatgaaaaagttaatttagagtttgagaagttttattggcaaaaaataaatttgaggggttttagatgcaattatagtgaaattttaagagattcatccgtaatttattcaatttataattataacaaactattatattatttttttattatttttatattttaaaacagtt

SEQ ID NO: 122478 - DNA, 1042 bp, Cannabis sativa
aatcagtgtagtctactaattttgagcaataataactttattttagttcaagtatatattggttaaataaaacttacaacataatattttattatactatttttgatggatttatcatttgaatatgaaattgagtagtaaaagtactaaatcaatattgatagtcaatcaaaaattttaaaccaatctatattataatacattacaagtacaacacaagaataaccttttttatagatataagtttcgtttttctttttatttgtttaaagatctacttttgcataagttatatatacatttctctgttttcttttaaagtttagttttcgatccttttaataagtaacgaattttattttaaaacataaaaaaaatatacttttgtattgttaaccccaaaaatcggaagagttaattttcgagattagtcaacaatcagccccaacagtcgagagatatctactgtaagattcggttaaagaatgactgagtcaatgcatacgtcctaaggatcattaatattggaaatccatgattacaagtcttggggcatatccatgcaacttggaggtcaaccccgtaacaactcacgagtagagttagtaagatcaactcactaggttacaattattggaggattttcgcagtgatatattcataaatagatcttaccacaagcataagattcaaagatctctttctcttatcttttcaatgcatcttgaatcgtccaattttgatatatatcgagaaagttatggcccaaatactaagagtgccgaattatgacaacttggtatgcgagttgacagctcccatgagagtcggtaggctgttgagtgactccctagctattgagcgactccatcgggggttgtgcgagtccatgggccattgggtgagtcaggggcattttggtgagtcatggaaccttcatataagtggtggagcatccgttcgacctatgggtgaaagagggagaagctatacatgtgtggatagactgtagggttttgtgccctaaataaaacttatttca

SEQ ID NO: 122479 - DNA, 722 bp, Cannabis sativa
taactaaaattaagcaaacaaacacattttcactactcttctcacaatacttttagtttaaaagcatagaaaataactctataccatagagttatcagcttaatataaagctaattcaagcctaggggtaaaatagtcaaaaaccataatctcactcaaactcggtattctattttttccaacattaaacccattaagataaaagttctagacttacccatgtgattaaaatatgtatccattacattttctgttgtcgcctagtaaaaattgtaaaaaagaaaaacataattcttatataatacaaataatactcttagagtttaataaaatttttggaattgagaaattataactctaatgctcatttttaataatgggacccaaaattaaacaaattcataaataactataaaaataccaataatcaatgttaattgtctttactagttcatattctaaagtgcggttattacaaacatgttgttctgaagataataattcttttgctatttctttttacattttttttaatagatcttttgtttaaatttttaatactgaaaaataattaaattaaagagattaattttgtcatatcacttaatctatttgattacaatatttattacatacctaacctcataatatccctcctatataattttgggtgattctacaatccactctcttaaaattgatgtactgatgcacccttaact

SEQ ID NO: 122480 - DNA, 1367 bp, Cannabis sativa
agccatcgatgatcgaacaagacaggccaccgtattgatacggaaagcttatcaagttgctaattagcaaccagctgctacgttcagcatcccactgggcggcacagaagaaattcttgctgagcatacaacccaaacttataatggtcagtcgtccaatccccgatcacaggttccatctgtgggccaagtggtaggcggccagaccttatcagacaattccttaggtggagttacacctaataattctatccaaactgacagttttggccaacaaactggtcaaaccaatcaatcactgaggcaatttcatgtttcagtattcaacagattaggtacagcccatgatctcaggaacgatttgaatagaaggagaggtctggacaaacaatatgttcaactagtcgctcagcccggtatccgtattcaggaccaaactctgagagatcctgatgtgacacaggtcggccaagaggctgaactagttcacccatctttgcaagcatagttggatgaattaaaaaatatgttctaaggcctggccggccaaaaactcactgatcttgagttggactgagcacgcggatcacccttcactccgagatcaatgtcttggagctacccctcaagttcaaaatgccgacctagaagatttacacagggaaggaggatcccttgtcacatcttaaatattttgaaatgaaatggatttacaaggggtatgaggtgatgtgcagtgtagagtattccatgctacaatttcagaagccacacaacagttattttaagttaccgccaagaagctttaattcatggaaagctttcttctcagagttccatgcacagttctcttcttctcgccaactctcattacatttagaagacttggtcgaagtgaaacaaagaccaggagagcctcttagagcttatataagcagattcatgatagaagctacaaaagtagcaaggttaactgaagaagggaggctggccgcaatacaagggggcattgaagtacttggagaactattgaaggacatcaagaatagtggccttgttggatctatgacagagtttttagaccgagcagatgggtttatcaagctcgaagagcagatgtcgaacctaggtcgggcaaactgcaggtccctttggcaggagcatctgcttagaacccacaatatcctagcagttcaactccgagcggcaaaaggtccaataacaacggtcggtaaggcaatggaaaaaagggaaagttcgcagccaaggccgaacaaacccctggagaaaattgttaggttttatgcgctaaataaaactccatttcaatgttatctcttttattaaacatcaataaagaaacagaa

SEQ ID NO: 122481 - DNA, 662 bp, Cannabis sativa
ttttctcaatcttttgttctacataatattttataggtgcacatactcttgggaggctgtacaacttcaccggtaacggagacacagaccctgccttggacccagactatgcaaccatgcttaaagctacatgcccaccaccagcaaaccctaggacagctgtggagatggaccctgggagctctttgatcttcgacagccattactatgatggtgttactagaaatcaaggagctttctcatctgacgccgcgcttctcactaacccactggctgcccgtcttgtcgaaagctttcgcgactttgatacttttaagtcggcatttgctcgttctatggtccatatgggcgccattgatattcttacgggtgatgagggcgagatcagaactaattgtcgattaattaatcaataaattaataattaagtttgttatttttttttatgtgaaaaacaataatactcaataagtcgagtggtggttgaattaaaaaccatgcataacatttattattattggccggatacaaattttattaatcataagccatgttaaaatatgtccacaaataatgtgtaatatttataatttgagtgatcaaaaattacggtgccgtttggtaacacttttgttttctaattttttaatcagaaaatgaaa

SEQ ID NO: 122482 - DNA, 624 bp, Cannabis sativa
  modified_base (598)..(598): a, c, t, g, unknown or other
taaaataatttccaacattatagtattcctatctagttgattttttttttgtgttgatttatactaactattgtagaagctttagattaatttttggttttgaaatttgttgtattgggacattttatgaagtaggcattgatgacagataaaactttctattaggttagttaccctagtttggtatttttgtaaggatgatgtgttgtattcaatttagttttgagttgtaaatttttctgacaagtcaagtttggattgtaaacttaatttgctttgttgattgagtttttattgaccaatttcttgtcatgtttttactgtttcttgttcaaaggttgttcttgtataataaattaatatcaatttctattaattaagaatacataataacttttttgaaaaatgcaggttgaaacatcaaatctaatgatatacctagtccataacgtgaacaaatcttatatagttgacatggagaaaaaaacattcacatgtcaacgtttccaatttgatgaaatgccttgtgcacatgaaatggctgtaataacaaagaggtgtgcttcttgctatgactatgttgggttttatgccctanataaaactctttacaatctgattagt

SEQ ID NO: 122483 - DNA, 1471 bp, Cannabis sativa
aagcgctttgagattctgaaatgaaatgataacacctttcaaccgattttctaacaccttcgagactattttgtaaatcacattacaaagagcaataggccgaagttcattcatagattcaggcttagaatttttagggataaggacaatatgggtgtcatataggttgttcgaaaactcaccaaacataaaaaagttttgcaccagcttcactatatccgaaccaactatgtcccagaacttctgatagaaccccgggttaaaaccgtcaggacctggggatttatccggatgcatttggaacaaagctcttttcacttcttcactgtcaataggagtcacaagatcatgattcatctcgggagtaacacttccttgaacacaatcagtaacccaatcccatcttgtatctgaagcagaaaaaagaactttatagtagtcaatcatcaccgtagccaactcactatcccaatcaacccacacaccattgtcattattgagtgaaaaaatctggttatttttcttccttgtgttggcacaggcatggaaatatttcgtgttttggtcccctgcttgtaaccaaagttgctttgatcgttgtctcaaaagacctccttctgtgtaagaatttcaaaaatttgtgaatgagtatccttatatttctgtaccgaagtattgtctctacgcccttcaattttttcagctccttattacatcgggcaatacgatccttaaaatttcctgttatatcttttccccattcagcaagggaggtgctacaacacttaattttctggtgtaaaggatcatcattaaacatttcccaactatcatggacaatctgcctacacataggctctctactccaagcattctcaaaccgaaatcttttaagaaacacctccggtcttcgaaaagcaagatcaagccatagaggggagtgatccgaagccgagatttccatgttaaaaagcttagcagccgaaaaaagagaattccaagcattagaaattagagcacgatcaagtctaacctcaatccaatttggcgtacctttccccttctcccaagtaaaaggatgcccaactagctccatatccaacaactcgcactcgtcaacaacttcgtgaaatccatcaacaagccacaatggataaggccgccccccacgtttatccccttgagacaaaacattattaagatcccccataagacaccaaggcaaagtagattccctagaaagttgacgtatttttctccaagtattcggtcttaagcttctttgtggctctccatagaaaccggtaaggcgaaactccggatgtccatccgaattaaaaaccatatcgatatgattagtgctatagctgagaagtctaccttcattttgggacttccaaatcattgccaaacccccactatgaccgacagcatctgttgggttttgcaccctaaataaaacccatttcaa

SEQ ID NO: 122484 - DNA, 547 bp, Cannabis sativa
tacataaatttgagcatgttttactaattttcatctttttatggtaatagcttttgggaaaccacaggcaatcatatccgaagatgataccaataaggaagctaaccaagtgaagtctcaaatgagtaagaaaaaaatactataaacctttagggaaaaaaattatgaacttaaaatgaagtgaataaattattgtcatatgataatctttcagaagaaatgcaactcctagatgggaaaagaggaatggttcttccatttaaaccattatcaatgtcatttgacagcataaactactatgtggatatgcccccagtaagactctagtctcatcaatacattactatccttttctactcgttgtttgacaacaactataggagatgagaagtaatatacatgaattttcttttcattataggaaatgaaggaacatggtgtgacagagaacaagctacagttgttgagagaagtcactggaacatttaggcctggagtcttgactgctttaatgggagttagtggagcagggaagacaacactcatg

SEQ ID NO: 122485 - DNA, 3640 bp, Cannabis sativa
  modified_base (588)..(589): a, c, t, g, unknown or other
  modified_base (3583)..(3607): a, c, t, g, unknown or other
ggtaaaataatttccaataaggacaactttgtactttgaaaatgtctcattctcaccacatagtcattgcacaatcataactcttacatacttgagtttgaaacatattggtcattgatggtgtctataagcttgccccgtgctttaaaatttcaacttcaaatgataattttattttagtttgcgttgctctaaaatcagcttgcaactcttcatagcgaaaactctcaagcaatcattcaaagttctcaaaaaatcgtaaaagatcatgtttgtagcttacataaacataaccttttattgcattgttcatactctcatttctctggctagttgtcatatccgcacaaaatgtctatctaccatacaccaaagctcatttttctcttaaaattgtacatctttttcaaccatttattttcttcaagactatatttctttagcatcttattccaagcctcaagaaattcactttcttcatcataattatatttgcagttactaaattctttaaaaaattctcgaaattgttcaaatacaatactaagattctttgctgaatgcacaagcgatgatatgtttgtggcnnttgagaacctagtgcttcagccatcgcaggatcttgatcagtaagaattgtctttggtttctttcttgatattgttgtagcaaagtatcaaacaacaactcaaatgtttgagtgatttcatcataaaggagagcaacaccaaattagttgtttgttttgattattaactccaagaaacattacaaaaggtctcccatcttggtttttttatatgtagtatcaaagcttacaacgtcaccaaaatcagagtttgattgtatcatctttgtatccgtccaaaaaatagtcgtgatcaaatcatccacatctacttgtatagcataaaaaaaatttggatcttgtatctgcattcattaaagatactttagaacaccacctgtatctctaatttttatttgggtcattctttttgttcgaagataattcttgtaattaattggaatcataccaagattttctcaaacgctggctctccttaccattaattcacaactttctttaggagaaattcctaagcgataaaccatatctatttcagctgcttgagctgtagtcactcgtcgatgtgatctatgtaaatgactcttattaaggctagttgtaacatgagtatgctcaacaataaatttaacaacacgatattgattagtttgtcaagagcaaattttcatcatttctaaactatcaaatcttgtttttgctctatgacgtattacttccacatcgcgcttattttttttgaggtaatcttggcatgaacaacaaaagattctatctatcattctactattcttgttatctttttgttctttacttttacgaatactaaatccaactttataaacgtaagtattgtaaaaatcatatgtgttctcttcagtttaaaactccatactcacttttggtattacctcatctaaaattttagaaagaatcaactttattcttgtttttccatccaaatcgctactacaatgtattctccaataaaaacttaatttgcactatgacaagtaaacttatttttttttttcacaattcatatttaataaattaatgatacaaataacgtcaaattaaaaataaacaaaaacaatattatatatactggaaaattcatgttctataacataactcttttctttttcttctttcaactcaaaagattatcaaaattgtgaaataagacttcttagtgcccatatatgtagccactcctttaaaaaaaaaaaacaaaaaaaaaattgatttgttgacatagaagaataaaatgaacagtgacatttagtatttaaaaatagattggttctgaagtatattgaataatattgataaggaaaaaaagattaaaaagttgatttaaaattaaaaaatgtatagaatgggtttttacaaaaatattagattttgggtaaaatttttcaattttaatgccacacggcagaaattacatttatactctcctcttttttttttatactgtaaagacaaaaaaaaaatacgaggactccatcttccacacccgtggacggaaacactacaacaacaccaggacaattggaaaacaaccattaattccggcgagaatgaaaaaaatagtaaaattgacgtcaaataaataatcatggcaaaacaactgtaaaaaatactaaaacaaatcaaacaaatgaaaaagaaaaaagattaaaaaaactaataatcttctgcacaacctcaacaccagatgcaatagcagctatatttgcaagcacaatcctagaaagtcagaataaaaaaagcacttaaacaaaactaaaacaacacaaaaacaaatgtaaaccaataagtaaataaaaccactaagaaaaatataaaagaaccacacaccttaaaaccctttttctagtgagctcgtcaaatatatttataggagaaccagaatcgaaaacctcaaaacaaccatatataaatgcactttatagccaccatcttccacacctataaatagaaccaccacagcaacacgagaacacccagaaaataaccattaattctggcgagatggggcaagaacaacaaaatcgacattaaaaaaaataaatcatggaaaaacaaccgtaacacaacactaaaacaaataaaaaataaaagaataaaaaatgattaaaaaaactaaccatcttctgcacagcctcaacaccagatgcaataaaggctatatttgcaagctcaattttgaaaaatcagaataaaaaaaagcacactaactcttatcttttccaaaaacatgactaagaacttcaaaagctaaataaaagatgaaaagaagatagagaagaagaactgaacaagaaaaaaattaaaaattttatatattaatagagaagatagagagaacttgaagaagcaaaaagtgaaaaaaaaaggaataagataatgaataggaagagagaacataagaaatctttcatatacaacaactaaactatcttggtgtggaggattcacgagagcaatccacaagattgggatcactctcgcttccaagaacaccatctcaaattataatgcccaatagcaatcaattttaattaaagaaaaatatatgtatgtatataaaaaattgtcactaaatcacatcacaattttatattagttaaaatataatgtaattttaatttaaaaaaaagatgtcactaaagtgacaacacaaagtcacattatatatttataacacttaaaaaaaatgaaaaatgattaataagtgctcatgacattacacagtacacgacaatatacaaaaaataataaaaataagacagtataaaagtaaatattaccgtgtgatagtaaaaaaaaaaaagaaacaaaacagtatggagtataaattttccgatattaaaaaggatttgtttttttttttctcataggtataataaataatgggtctcattattaatgggatctttgaaaaagtctctttttttgagggaattacttcatatattatttttnnnnnnnnnnnnnnnnnnnnnnnnnttgggtttttaaagtggttgtagcgctagttgc

SEQ ID NO: 122486 - DNA, 2050 bp, Cannabis sativa
  modified_base (26)..(32): a, c, t, g, unknown or other
  modified_base (797)..(810): a, c, t, g, unknown or other
  modified_base (963)..(963): a, c, t, g, unknown or other
  modified_base (1901)..(1904): a, c, t, g, unknown or other
  modified_base (2010)..(2022): a, c, t, g, unknown or other
tataaataaaaaatcacccatgaatnnnnnnnaaaccaaaaattctgttatataggcacattttatatagaatagatattatattttttaaattattttttactcccttcttaatgatctcattttcttaattttttaatcataactaaatttacaaatcacttttctaaataatgaaacaaataaatataatagtatactttaaagtatcacaaatttaatactcaatttattttttctttattttttaaaataaaactaaaatatccatcaaatacgtgatctttctttctattataaatatttattttttttaaaataaattataatataatatatatctacttttttttaagaattaattatcctaaattatatattctaaaccatttaagcatatttacgagctcttctttctcttaatctctctctattactattttttttctttcttttttccaatagtaatctataacataacaagtagaggtgtttatcaaaccgctcgcaccacattacaccgtaaaaaaaaatgcagtttgaaattctttgtggtgcagtcgcaatttgaaattttcctaaactgtgtagtgcggtgcggtttgcagttttcagttaatatgcggttcaaaccgcaccgcaccacatattaaaaaaatactaatttttatatgggataagttgataaatacctcttttttgtatccattaatcaaaaataccctcatattgtttttttattaaaatatacccacttttttgagtggattgcttaatataccctcactctctacttnnnnnnnnnnnnnnatttacataacctaaagggtctaacgggaacatcatccataaaagtgggtatatctaaaaaaataaaaaagatagaggtaaaaattaaaacaagttaagtaaagtgggtatacaatgtaattgcatctttataagttgaggaatacctctttnttgtatccattaatcaaaaataccctcatattatatttcattaaaatgtacccacttttgtgagggtgttgcctaatatatcctcacccttcacttaagtctagcacctaatttttattaacttaaggggtataatggggacatcatctataaaagtggctatatctcaaagagtataaaaataaagataaaaattaaaacatgtaaagtaaagtgggtatagaatgtaattttctctttttatatttatttaggtccaatatatgaaggcccaacctaagcccactaattattgtattgttgaaacttgaaatttttttcatatttattttcaagccttagggcatttttgacaagtgttgctcaaactttgttgtatttgtgatagtttaattatttagtaatagtccaaaccgcaaaaaccgcataaaccgcaccacaccattttttgtggtgtgatttttacgttttttaatttcgcggtgcaggtgcggtttgggaaattgaaaaaaccgtatgtgcgggttggtttgaaaaaatagtcaaaaaccgcaccgcgaacacccctaatagcaagttgattattatttgaaataatcaacaataaaactaggggtgttcataaaatagccaatctaatccgccaaagtgcggatatccgcacttgtgcagattagaaaattcaaaatccgcacttgtgcggattgaatgttgattgacatataaaagtaaccgatctaatccaatccatacatatttataaaaaaaaaaataaaaaattacatatacaaataatattttaatgtaaaaaatagtaatttaaaagtataatacatataatacaattatatttcaaaacttaataaatcaaatatatattctaatttatatataatttttttatatacaatttaaaatagggttaatttcacaaatgnnnnaaaacaacaaaaatacggtttcatagaattttaaatatttttacgatttttttgattttattaacataaaaaagggtcttttatgttgaaattttgttcatttgtnnnnnnnnnnnnnttatatgtatgttattttttgttttttt

SEQ ID NO: 122487 - DNA, 1565 bp, Cannabis sativa
cattacgtgggttggagtcgaacccttcttcttttgctttgctatgggaggtttcgaaatctctaggtaaaaggcaagatagagaggctaatcaattctctttgagctcaacttcggaggccttaacattaacctaagttttggacaaccaattattccatttaaaaagaaaaaaaaaactattccaatgtaacaaaaaaaaaaattaataatttttttttatcaatttcttttatacattttaaattttattgcatattcctattttcattctaattacagacttcaaagactcaaactaaactacttatattactatctcaggtgcctaatgccagaaggttcataagaaatagggaacaacatatgagtatataaaggtagaaacaacgaaagaacatacatccatcggtgtaaaagatacccagcataatatagaaaactactttgcacagcatttacatcgaatccatctttccaagattgaattcattaagtatgtcattacacaatgaacagagacggataaaaaggttacaaagtcattgaatcgttctttcaaagtttcagcatataagcaaaaactaggaaattctaatagaaatacatacacaagaagaggaggaaaagaaggtgtctcaaactaaattggaagtggttgagaacgatagcgattaagccttcttgggggatttggtagctttagatggagacttgggctctttgccagccttttcgttcttctttggtaatagaaccgggttgatattaggcaagacaccaccatgagcaatggttacacccgaaagcaatttcccaagctccacatcgttccttacagccaacaacaaatgccttgggataacccgattcttcttgttatctctagccgcatttccagctagctcaagaacctgaagatttcaccacaaaaatcaaaacattaacccatcagttaaagaaatataaatattggagattagcccacaaatctaagttcaataatgatttggacggataacataatcagaacacttaaccctaaaagttgagacgaaattaacaaaatgaaagaattacctcagcagctagatactcaagaacagcggccaagtagaccggagctccacttccaacacgtttggagtaccttcccttcttcaagtatcggccaattctcccgactgggaattgaagaccggctttcacagaccgagagacggacttcttcttgggaccactacttccccttcctcctgcagatcccttcttgttctttccgccagtgtccatggctaaaacccttgtttgtcaggtaaagaaagagatcgaattgaaatggatgagtgcactgagggaaagtaggaaattttgtgcaagagtgaatactgtatagattggatatgtaaaacaggaacgaagagtagaagaaagaacttgggtgcgtatctaccgttggatcaggttcatatctatggatataaagtttgtgtctttgcgatccgtgtatttggttatggaccaatagaatttgagcttacatgttttcaatttttttttttttt

SEQ ID NO: 122488 - DNA, 2623 bp, Cannabis sativa
  modified_base (1680)..(1689): a, c, t, g, unknown or other
tactaaaatggaaataattcaatttattttaatcaccatctagaaaatttgagagtgtttggatgcattggatatgtgcatgtcaaataggagaaattacagcctagagcaatcaagtacatgtttctagggtatcctgatggagttaaaggatacaagatgtggtgtctagaagaaggtttcaagaaaggcataatgagcagggatgtggtttacaatgagaaggtaatggccatgaaactaaaaaacaaagcagagatcagaattgaggctagacaggtacaagttgaagtcagatcaaaagtaaagacaagtgagaatgctgaacaagagcttgtagaagaaacagattagacccaagatgactctcttgacacctatcaacttgccagagataggatcagaagaaaatcaaaggcaccagctagatttggttttgcaaattacatagcttatgccttgaccattacaagtgagattgagaattctgaaccagccacttatgaagaagccatcaattgcaagaacagagacaagtgactgcatgctattaatgaagaaaaacaatctctgttgaagaatgaaacatggactattgtgagaaaaccagaagggtgcaaattgatcagttgtaaatggatcttcagagaaaaggaggggctatcaagtgttgatagcaagagatacaaggtcagacttatggccaaagggttcactcaaagagaaggtgtcgatttcaatgaaatcttctcacctgttgttaatcaggtctcagttagagcaatacggccaaggcagcctctgaggatctagaaattaagcaaatggatgtgaagattgtctttctccatggaaaactaaatgagatcatttacatgaagatgccagaaggttttgatgaagatagatacaaggcatgcttactgcagaaatctttatatggattgaaacaagctcctaggcaatggaatctcagattcgatgacttcatgttgagaagtggcttcaccaaaagtgcctatgatccctgtgtatacttcaatggtacactctttcttctcttctatgttgatgacatcctgttgatagggaaaagcaagagtgaattggagaaatgaaggctcttctaaacacaaaatttgagatgaaagatctaggtaaagccaagaaatcctaggaattaaaataagaagaaatacatctaagtttctgaccttgacacaaggaaactaccttagaaaggtactacagaagttcaagatggacagctcaaaacctgtgtcaactcccttagcttcacacttcaaactgtttaaggatcaagcacccaaaacagaacaagataaagagctaatggactcagttccctatgctagtggggttggaagtttgatgtatgttatggtctgtacaaggatagacatagcatatgcaatgagcattgttagcagattcattgtagaccctggagagaagcattgggatgctcttaagtggattatgagatacatcaaagacacttttgatataggcctcacctacaacaaaagctataaaatagaagtcgatgtctcaggctatgttgactcagactatgcaggttgaatagacacaagaagatccattacaagttatgtattcacaatgcaaggaggatgtgtgagttggaaggcaaacctnnnnnnnnnngtagcattatcctcaacagaagctaaatacatggaaactaatgaggaaatcaaagaagttgtatggctaaaaggtctagcaaagaagatggggttcaagacagaaaatatcacagtattttgtgataaccagagtgctcttcacctaatgaagaaccctatgtttcatgagaggtccaagcatatagacatcaagatgcacttcattagggatgtaatctcaagcaaggaagtctaagttcagaaaattcacaccaatcacaatcctgttgattacatccctaacaggatgtgactaactctccctctcgagctacttggtgtctcaacaatctgttgattcacatgattgacatgaaatagatcaaggaggatttgttgtaatatgatctatctcatgctaatacaagtgcacacgtgcaaaattaggagttagttgttttgtcttgactgttaattcggttaactgtcaattagttatttttatttttatttttttgtattcttttctattggttcgagttgtataaatagttggagttaaattttttatatagtgattagccttgcacatctctctctctctctctctctctctctaaattctccaagattaataaacaacacagttcattcaatttgttctttactggttcattactgcttgttaccagtttgttgattcattgttgcagcattcttgttgttgttgttgctcacgtgccctagtctttgagcgctcgatcttgattgttacaggtgtgatcgatcataacagttattatgtcaaacatgtttgaaagcaatgaccaactatcttttctaataccttttaacgatgaattcattttaaaaagggcattttacaattttgtatacattattttaattaattacaaaatatgtgcaaaaaaacttattatcattttctcata

SEQ ID NO: 122489 - DNA, 789 bp, Cannabis sativa
ttgtttgatacaaaaataatgtgttatggtggacactttatttttatgattatgaatatatttttattttaagcaattaatatatctgtttttgaaaatttggctaaaaattattaaatttcatgattatttaatcactaaatttcatatgctgtaaaaaatattattttgtttgactctatatgtaattacttgcctaaaggtagtagttatatatattagttcacattctatgaaatgggttaatattaaatatgtatattttaattatttacccaaaggtaataatttaaatatgcatatttactattatattttggcttgaattaatatatattctttaataaatttattatgcattttttatttatggttaacttcatgaaggtagatcatgtgtgtgttatattctcaccccaaagaggatttatatgaccaattgactctacaatattttctaaatgtattgctcataacttgatcaagttttaattttttgaatttttggtctcctttctgtgaaaaataataatgcttccatctaaattatgaatgcatgtgtcgaactttaaggcatggaaacgagatgtgaaaattactttagacataatgggttcggacttatgcccgcgagaagaaaaatctaatgatcttactaatatcatcactgttgcctagattactcctcatgcacaatgagaaaattcaaatcatcttagtctcattgctatgaaaatttcaattcctaaacatttatttagtggctttccagacactacaaatgccaaa

SEQ ID NO: 122490 - DNA, 4298 bp, Cannabis sativa
  modified_base (52)..(68): a, c, t, g, unknown or other
  modified_base (4243)..(4251): a, c, t, g, unknown or other
agaaaatacggtctttttatgttatatttttgttaatttattgttgattttnnnnnnnnnnnnnnnnnttttttgttgttgttttgatgttacttagatgttatttttatgtagtctccttgttattttcgtgttatttttataaaaaatcgtaaaaatgtaaaacaaattcttaaaacgtaaaaatgtaattttttttacaaaaaaatagtaccttatgtaattatccctattatatttgcagtttaatcttctctccactttaaaaattttaatgtatttcttagaagatccaatgcacaagatgtataaataagtaaaaaaaaaaaataattatgttgatagtcagtttgattttttattgagaatatataaaaattattattattatttatttttatattgtttaaataatggtaatatagtaaaaaagaatgtaaaatttagtacaagccaatgaatcataataattagtaatattacagtaaatagaaaaattgcatttattgtaagataaatttagtacaatgcttcacaatttttagcatgtgtcaaattaacacacattttaatacactattgaagtaatagtttttgttaaatatgctaaaatataattataccctaattttttaacactgcattagagatgctcttagtacgtaactagagtctaaaaatagcgcagcgcagtatataaatacaacataaacacatagataattgaactacacattatttatttcaatttataatgaaataataataataataataatattgcttggaaattatatttctggggaaactatataaaatgctcattctaatatatatatatatagaaaatttttatagtaggtactcttattttgtccttatagcatagtgatatttttttaaccattgataaatatgatttttgaaagtacaaggtaattattgtacagctcaatgcattaaatcaaatatcttgatgctaaattttttttacaaatataaaaaattacggaactcaataaaatcacaataatttacgtcttcaaaatttaattattgacaccaagttaagaaatatagaaaaaaatgttcttgtatttttttttcttattttatttaattttattagaaagttttatatatagaaatttcactaaaaaataattacttacatattttacttatatttttattattatgttaaaagaatttaactaattaattaatttatttattattacataagcaatgttttttttaacatacataaacaaaattcttccattgaaacatgatttttcttctctaagttttcttttcataattaataacataagtatcttacttaaaaaagaaagttttcaaaaagaatcatactattaattatataaacaaattatttttcctaattatgtcttttttttttacgtaattatgtcttttctttcttataaaaaaagactatagaaaaaataaaaagcaaaaaatgacaatattcatatttttttctaattaaacataaatattataataaaatataattatttgaaaaaaaatgtagtgtctacaattttttagtttgttttctagtttccaataaatcaaaacaagtatataaatatcatcaaattttatgtcaaatataacaaatacattaaataactaaataaaaaaaatttatttttatgaggtgccttacaaatatttagcgatatttcataatcatttgaaaagatatcttgttagactcacaatctatttcggtatccaatagagttgtttaatctatttgtttttatgattgtgtacgttgtatatacttaggactatctgtaaattttcaaaaaaatttgagtagtttatcatgccgaaaataagatttaaatatattattgcacgcacgattattcgttcttacagacatattaactaactatttgatctttatttttgacattgtaaattatttagaattttctaataatttacaggtaatcctacatagatataacatacacgatcatgataaaaaatttgactaaaaatctttctggatgtcaaaacagatatatgttctaccagaatacccttttgggagtgtactacaaaagatttcaatagaattcatcataacaaattaatgtagaaaaagaaaaatattttgaaaataattgtaccccttaaagggttgtttcgataggccctcttctatgttttgacatttatgagagtttttagatgatttttttttcttgattgtgtacattgtagttacttaagattacctgtaaattttcataaaattctgattagtttacaatctcgaaaataaattttaaatagttgattaccacgtctataagaaaaaatagtcgcgcgtgcaataaaatatttaaatcttattttcaacattgtaaattatttagaattttaaatcaaattggcctttcatgtacaacaaacaaatctctaatttcaaatcatactccaatggatcaacctccaactcttcatacaaaatgttgcgcattttctgcagggttatgtcaatttcaactattaacgtcaaacttcctttgcttttatacacccaattaaatccatcaacactccaagcaccatcatacaatacaaccagaaacacaagcaatcttgcaattcaatacaaaatacaaacaccttaataagcataacaaaaataacaaaaattacattaataggaaacagtgttgataaataattgagaaccaatagagaacctgtagaaaaacaatcaataattgtttcaaataataatcaatcaatcatcgataaacagtcgagaacacgtcgacaaatcatcgataatatatggggcaagaaagtttgaaaatacaactttacacaccattgacaaacaatcgagagaacaaagataacatgtcaagagtggttagaaatacaaaatcattccccatttcgacaaacaatcgagagcctatcaaaagtcttcgagaaaggtcttctctaacctttggacatcttctttgagaacctttcaagaacttaccgagaaccagtcgagaaaaatacgaacacaaaatactttaaaaaatgagatctcacgattttgacaaaaattatacgaacaaccacatagatctaccgaaatacactatacttttacaattatttaacaaatattttaaaaaaatacttacccattaatctacaataaaagggagatagaggaggtgcgataattgagttgtgagtgaaggctagtcgacgtccttcacggcggttgggctagtgagagatctcggcagacgtcctcaggggctgtaggcggcgaagctagagaggaggaaggagggctttatttttttatttattttttattttttgcaaaaaatggggaggagtcggttgatatggatgggaaagggggatgagtttgttgaaggggatgtagaaagagagattttatttttataggatttgaaaaaaaaaatagtaagggtattttgggtaaagtgagaagttaataggatggcattgtataaaatatttaagacagtattttttgaaattaagattttttttaattatattaaataaaatttcccaaaaaaaatgtataagatgataaccaacttgtaattgaggatatattattataggggatgttataaatatactcatttttttttgttatttttatattttcactattatatttttttcttttacatttttactgtaccaagttttaaaaaatactgtgttaaagtttcaaaattataaaaatattgtgtttcaataaaataataaaaaagactaaaaacaactctaaaacaacttacaaacaatatagaaacaactataaaataacaaaaagataactacaaagcaacgaaaaataacaaaacaatgacgtaattgcaatatgcaaaattatatcaacccctcaatatatatttgtattacgaatatttgtttacttacatttgacaacttcatttatctttttgcacaactacattattttttcatggaatttgttgttacaatttcatattttcaagtttttttgttctctctttttttattgagttagtagcagttaaaatgataatttaatttttaaaagttagatcaataattacattaataatagaaataataaaatcttatgatttcaaaatgcaatataatataatatgtaatgtataactaatatgttgtaaagtccttttttggnnnnnnnnntgacaaaataatttttccttttatggtaagattgttgtgcattcata

SEQ ID NO: 122491 - DNA, 874 bp, Cannabis sativa
agaatagaatcactacctttgagaagaatgggatgattgttgatgattataaccaagtagtagagcattttcttaaccatttcagaaattttatgggaaagaaaagttctgctactaaaaggctggataaacattgtattaaacaggggccggttctttccttggagcaacaggttagacttataagaccttttaaagagaaagatgtgaagaaggctatgtttggaattcattcaaccaagagccctggcctagacggattcggctctagattttttaaaagtctttggaaagatattggacatgatgtgtctacagctattctcaagttctttgaggagggtactatgccagcctccttgaaggatgcagtcattacccttatcccgaagacccaagagccaaaggatgctagtgactttcggcctattgcttgttgcaacacagtttataagtgtatttccaagatgatttgctctagattgacagaagttcttcctagtctcgtgagtgaaaaccagggagcctttatcaaaaatcgtcttcttgcccacaacattatgatcttccaagatctccttaaaggttacacgaggaaaaatgtttctgctcgttgcatattaaagattgacttaagcaaggcctacgatacagtcgactggaaatttgtggaagaccttctaaacagcttgtgctttccctcgagattcattcactggttgtttgtttgcctcaaaggtacaacctacttccttttacttaatggtagaatccaagggtcctttaaaggtgagaaaggtctccgccaaggggaccctttgtctcccctggtgtttgtcttgattatggaatacttgtctaggttgttatctca

SEQ ID NO: 122492 - DNA, 543 bp, Cannabis sativa
tttgtaaacttcatatttcatttctcggctctctctcttccgcgaccatgagccacgccgtccctctcctccgcgaccatgagccactccgtccctctcctccactctcttgtggaagcacaaaggtaagcacaacattctcttatttgttgtttaaatttttattagtcatgatttggtttgttgatcttgatccgtgtatggactgatacttgtcctagattcttaagtactactgtaacagttgatttgatttaatatataaatgtttttctaaaaaaaaaaggtgtttcaaactgcttttttgggtgggctatcaaattttcttcaaaaatgtatttaaaaatttgagtgagaaccgttgctagttatatgtagctccatctctatatgtcctctaacatattttatatgaacattattattagacaatgttgcctagtattattttgagaagtcacattagttaataatattctataaaatttattatattaaattatatgagatttaatattgaattattttaataataatattaca

SEQ ID NO: 122493 - DNA, 4013 bp, Cannabis sativa
tccatgattagaacaaataagagaggagaaagcgggtcaccttgtctcaaccccttcttgccttggaaactcccttggactcgcccattcaacaaaatagagtaggatgtcgattttaagcaagtcataatccaagatatgaacctgcccgagagtttgaattcattcaaaagattctccaagaattcccaattgacagtatcatatgccttactgatgtccaccttcatagtgcatctcggagatatgtttttccttttgtaattcttcaggaggtcatgaagaataatgacgttatgagctatagatctcccttgcacaaacgccccttggttctgattcacaatacccagaagcacttgacaaagccttgaacaaagcagcttagaaatacacttgtagatggtggagcagcaggcaataggtctaaactccacagccctggtcggattttcactcttggggatgaaggtaatcatggtagcatgaagttcccgcagcatgaaacctgtcatgaagaagttctcaatagctttagtgaattcagttccaatctctggccacattttcttgaaaaatccagctccataaccatctggaccagaagacttggaattcggaatactaaatagagccttttttatttccttgctagtgaatggcttgatcaagttcagtttttgctccctgttaagattgttccccatctccatacaatcttttcttaagccttgactaggtcttgagctagatcccatgtagctctggaagtgctttatgaaatgttcaacaacctctctgaaattgtctacaacctcaccttggtcattggtataagaaacaatgttgttttccattcttctttttttcaggaaagcatggaaaaaggcattgttctcatcccctttacataaccaggtgattttgcttctctatctcaaaaaactgtgatacatcttctcttgagtgttaaaagtcattgctgcctctgtttcggttttttgataggtaatatcatgcgggtgttcctgagcttgatttctagcttgaatatagaggtccttagctatttgatagttcctcccaacatccccaattctctctctattaaacttcttgattgtgtgcttcaatctcataagtttcaagtataaacttgtcatgccctctcttcctattggcttgtgccaattatcaagaacctcttttttaaaatttgggtgatctgcccaaaaattataataccagaacggtttgaacccaatatccacattggttgtcattgaaaccacacacaagcagtgatttgaggtagtctcccaactatagtgagcttttgtcaagggaaagctatcattccaatcttcattcacaaaggtgtgatcaattttggaatagatcctcttatccccttcttggttattcgtccaagtaaaccccgaaccagttctaagaggtcgatccatgtgactttgtgcaagccaattggtagagtcccttatatcatttagattgacttccttgccacccttcctatcttccaattcaaaaagagagttaaagtcccctgtaattagccatggtttagcatagaccttgagattgatcaatccctcccacaactccttcctttcctcacctgtgctaaagccatacacaaaagtgacattcatagcttctgaataacccgccaatttcacatagcaatgaataaattgagggtcttccctaacgacaatgactcgagtgaaatttttccgccaaactaccagaattctgttctcaactatcggactagtataccaattccaattagagaatttcctagccatcatctcacttattttatcattcttgagtttggtttccaacaacccacaaactccaattttattcaagcaacataaatcaaaaacagtattttgcttttccattttattcagccccctcacattccaacaccctatgttattattatccataggcagtagtagtaataacagaatcaatgtgttcagtagatacctgcatctctaccctgccttcattctgatcttgtaacagagtaaacgagttactgctactctcaaccttcttcttcagacttccaggttgactggttgttgcaactggtactattttcttcggaaccacccattactgttgaaccttgtttgctgcctttgcctttgattctttcttctgtggttgtttgttcatctcttgcttgtgttgctgttttttctgccttctgtttaacaatctcctcatgcctacagttggcttttgtgtgaccgaacttagaacattgggcacactttgcaggaagccattcatactccacattctggtcttggagctgcccaaactcattaaaataaggaatgaatcggggtggagcacccgtgatctccatctcaactagcactcttgcatattgcagccgtgttctatcttttgtgtgttgatccaccatgattggcctcccgattgtgctaaccagcgcacttaagcttttggtaccccagtattgaagccccaaatcgtgaagcctgatccataatggaatagtgcgcaccaggttcatagcatttagatccgcaaaccagggtcgaacaatcactggttttcaatcgaactgcacaactcctgcctccacaacctgatcacgagttgcttcatcattaaatttcaccattattagtcccatagataatttgcttacctgagttacacccaaatggccccagatccttttcacgaacccttcaaaaatagtcacaggtgggttagctcccagaactttgcaaataactgctgaattccagcttttttcctcttcctgcacttcttccaaatcgacttgagcgattttgatgccatccctaattaatggttctgtgaacaagagctttctcctttgtgaatgtctcccagatttgtttagctgatcttggaatttgctgattatccaagctcaatttcaattcatcttcaacctcctctgcccaactctgagctcgattacttccagacctgttgaactttgtatccagtgtttcttgagatcgagccatcaccgcaattaaattcagtccatcagtttggtgagaatcatcagcaacgacctcttcgacttcatccattccagcttttcctgcatcaatctcatcgtcaattgatcaaatgactggtttccttccaattttttcttcctcgccatggagggagaaagcagagagaacgaaactgtatgttgtgagagtctagttttattagagaagaactttgtaatcccattattgaactttggtgatagtggatgatttgagcggactacggtctcgtggtttttcccgcattaggtttccatgtaaaaatcttggtgtctcacttttatgcttgatttgtgtattttatattgtttgtggtgctttggttgatatttgatattgtttattgtggtgtttgataagtatcccatttttgacatataaagagggaaaatattgtgattagttgcaataagtttttccaacaagtggtatcagagccaaagttgattggtgttgaattcttgtgtgttgaaaaatagatgagttagatggaatgatgaaattgaacttatcaaactattcctcttggaagcaattgatggaagatttgctctattgtaaagatccgtacaaaccgattaaaggtagtgagaagctatctaagttagatgatgaggaatggtaatttcaacataggaaagccattgcctatattatatgatagatgtatataaatcttcatgagcatatctctaatgaaaccaaaaagttgatgtcgcttggaaaaagctaaaaatctctttgccaaaagaacggttggtagtaaaatttctctactctagaaggcttgtaaatatgaagtacaaggacggtggtagtatggttgagcatacaagtcaattttagagtcttgcaaaccagttagttgccatgaagatgaataaggatgatgagatg

SEQ ID NO: 122494 - DNA, 923 bp, Cannabis sativa
  modified_base (814)..(825): a, c, t, g, unknown or other
aaatttgggttgtgggggtttaatgaaaccaaaacgaaagtattgggggttttgccgccatttaccctaatataaaagggacattattttgtctctaccaataaagacatgcatataagttatttatatgacggcctacattatagttacattatagttacggtaggtgtcttatttatttttgaaaaattctaaataatttataacaatgaaaacgaaaacaaagttcaaaaatttaattgccctcgtgtttgtttctttacaactagatgtttgaattttgtttctgacattataaattattttattttatttttttgaaaatagttgaaatatctactatatacattcatataaaaaattataatcctaatttctctaagctcaaaaaaatagagacatctctaccaatagcgataaaagtaatgtacgtatcatagaattattctatatatatttttatgtatgaagatagcactgattaggcccgacactgggcataagtgtgctaggctttgcctaaagcccacctaacctaagagcctatttttttttttacattatttttgtctaaataaaggctcaattttttttttctttttacgttcccttagtgttattatgctctcatgtagttgataccactagcaaccatctcatgtagttgataccactagcaagtagcaacaatctttattatgacctttatactacttgtaccacacccatatatgacttttttaaaaaaaaaacattaatagtccaaaaataaacaaatcaaaagaagcctaattggggtaagttgaaaaatacnnnnnnnnnnnntcaattaatcaaatttacctctacttttatatttatttgaaacatacctctttttatgtgtattgtacctaaaataccctgacataagagagtcacat

SEQ ID NO: 122495 - DNA, 1921 bp, Cannabis sativa
tttttttttttttatgaagatcagattttgttccctacgtccaagcatggtagtgcacacacctccacattctttttaatagacggatatttcaaacctctgctttcaaaggagaaagctttagtggcctctacttttaaaggttaaatatttggataaaacatgtctatatagtacaaaatggtccccattgtccaactgcagtacgcatgtgcacaatggttttcacgtggcccaacggttagctctgattttgcatgtaatttatcccattagtgggcttttagaagaaatcctaggcgggccatgggcatgtccataccttccacttagcctataaataccctcttatttctaaatagaggggggatcacatccaacatagctgaaactctaccaagtttactcttcgccttcttcaccagaaacttagagtacagagttagggtttcttacaaaaatattgtaaacacatcaaaaacgccctaagaggctaataaaatgacttgtggactaaggttaattaatacccaaaccacgtaaaaagtctttatctctttatttttgagttttattatttcattagttctcaaatatttagtttctaaaaatctcgataaatattgtggtactttcatttagagttaaagaaagacgtaaagcctatagtgttactacagccatggttttcacaagaaagatgcttcctaagaaaactcttcaaggtggccttgagacggtcatggaggagatagaccccctcttgctagagcatgcatagttaggcgatgcgagaggtggggatacgtctaacatgaacaattgagaggatgacccaaaaaactagcatcgttgattatgatagagaagttgagaacgataaagaggaggaagacgatggagagtacgtcaaagatgggtacaataaagatggctatcattatgagcaagaccttgaagtagtttgagtgtctaatgagttgctcgagacaagacaaaagtttgcccatcaagagaggttttcttgaaatatgaagaaaatgatggctcaacttcgagctaagtttggagatctagatgagggggattctgacgatgatccctcagtggaatgtgtcagaggaaacactagggaaaacccaacgaatgttagaacctctgctcctgtgcaggacaaggggaaggcgaaggttggtgatcctaagaaccttaatgctcccataccttcttggaaaaaatgaatccaacgcacaggccttctcagatgtatgaggaaacggatgccttttggctcggatgcccttcaacccagaaaggtcatgtagcgccaaaagggactagtacaaaagtaataaagcctaagggaaggaaaaaccaccctagtgattcggtaaaccatgacggtgggacaggaggatagtactctgacgatagttggtccatggtggatctcagaaggcatttagacataaagtacgagaaagcaaaaagtgagaaggcaagaccatgtggtaatgaccttagaaaccacttgaatgacaaagttcgtggaagagatctctcggacagtgacaccaaaaggttagaagaacaaattgttgcattgacaaaattggtccaaaaataaagtagggccctcactaactctgaggatgaggacccaaagctctgcctaaaaaggatcacggaagctccgctaccagagaaaattaagatgccctcaattgagttgtacgatgggcacactaatcctagaactcacttagccaagtataacaagatgatgcatgtggcaagagtcaatgaggatgccaagtgtttgtacttctccctgacccataccaaatatgctaaggactagtggaagagattggctcccgaatcaattctgtaacgccctaatgctaaggcacgctacagt

SEQ ID NO: 122496 - DNA, 2192 bp, Cannabis sativa
gagagagagagagagagtttgtcagacacttagagtttagaagcatattttaggctcagaggccacttagatttctgcctatattaaggcttttatacaggaggcctaaaaccctaggttatagtttaaatcccttaatacttgcatagtttgttagatacttacaaaagaccaaagtgcccttaattctagacattatttagccattctgttgggcttttagcgtccaatttgcagcccatatattgttgtccacatgtagaagtgcctaggaaagcgtgctgagcacctcatggtcggccaggccccctatggaggccaggcttcctagccatggtgctgtcccaaggctggccggctatagggtcggccaagggtggccagctagctcctgtgagggagctggtctttcacttgatgcccgtttgagtgccagggtctctatttgttcaattgctgacttggcctacttattggtgagttgttctgctaggtggcactaattttgtccatgtaagcatgccatgtcatcaggataaaattcaggataatatttgccccccaagttcctgtgctgacgtctgtacggatagggactttaccagctatattaatgttgtcggaactgttgtagtctttgttgaataaaagttgatgtgtttcttagccttttgaaacacttttcttggattgtcggatctcattgcagtagagaaataacttctttagttgcctttatgatgtgttggtgaggaaagtaaagaaaagaggcccacatgtactacataagtgacttttaggcgaaaaaccctttttccacttctcatttttaaattttcactttctctcactagaaacttgctatagaaaaagctcctccttctctctagatggccgaacccacaagcatcatttttcccaggatttttgtaccgtttcaacgatccaagcttcccaccttcttcttcaacgacttattgtagtgggcaagctttcaattcccgctgtaaagaccgcttaactttaatttggaaattaatagataattagggtttaattatgaaacttgtttataagtcttgaattattaatttatgatgatatatttaaatacagaatgcattcaatatgtcatatatggaattttataattttgcatgttttgtgcccgacaacattggaacacggtgtttggctattagaatcacatgctagtatttttagtatagcgggacaatttagttagacattaagaaatgttgggaatagtcgagattttagaatttgccaaaatacccctaggtgattttgtgattagttagctttggaaaggaaaaaatagtcattttgcctaagttaacctttttgtctttagtgagtttaatggggtttttattctgaatattaaattaagtaagtttaataaaactaattaatatcttcattatataaaaaataagaaaattagacaaaagatttttctctcaattctctctctttttttaaccctcctataaccagctagggttgggttgttcttcaacatttcaagcagattaaagcaggttttaagtgagtccaagctaaggtaagtctctatgcaactccctctttagtttcttgagttttaagttatagtttttgcatgattttgagagattgagttctgtagctactgttgttgtttgtggttgttttctgaaccttgattgtgtttagatatgttgaattaagcttgttttggtggctgttagtaggtttgagcaagctttaagtttttagaactcaagcttggctctttgatggtgaaatttgattctgagcttgggtagctgttttgttgcttggaatatgtctattgggctataatatgcaggtttggaaggtttggtaaggattggaatcgatttggttgagttttggattattttggttttctagtgtaaaccggctaaccggttttgcaggtcctgtaaaaccggttacccagatttgttgttggattccccaaaaaatttgtgttgtcaattcgtgttagtttcagagctttggttggttaattccgtgatagtttagggtattgccatgttaagttgctgtagataggttttttggtttaaaacctaagtccccggttgtgatttagcgtgtcacttatccgtattttaatcgatgtgatttaggagcctgta

SEQ ID NO: 122497 - DNA, 9125 bp, Cannabis sativa
aaaaaggaaaataccttcggctagagttcaggcaagggaaaaaagtattgcccaataggaagtcacccaaggcggggccgaggacatcgatccccgactggggaaccaaacacaaatgtggggccggtggaagaattggaagaggttgaaatcaaacctaatatctcaaccaagaaactcaaaattggtaaaggtttgttactcaaaataaaattagctttaataatatttctaagagcaaatctagacattttttcctggttacatgaagatatggtcggtattgattcttctataatgtctcacgccctaaacattgacccaaactttcgccccgttccataaaaaagaagactactggataaagaacaggcgcaagcattgaaagaggaggtagaaagattgcgcaaaaatgagttaatcatcgaagctttctacccagcttgggtggctaaccctgtaatagtacccaagcctaataaaagtggtgagtatgtattaattttaccgacctcaacaaggcgtgccacaaggactatattccactcccaagaattgatcgactcgtggatgcaatagccgagaatgagatcttaatcttcatggacgtctatttggggtataatcaaattagaatgcatccattagaccaagaacatacaagttttttgaacatatatgggtttgtactgttacaaggtcatgccgttcagtttgaagatgctggagctacctatcagaagctagtaaataaaatgtttaaagactagatcagacgatatatggaggtatatgtggatgttatgctcatcaaatctaggaaggcttcggggcacatagaggatctagatgaatgcttcaaaatcctcaaaaaatacaacatgatactcaatcacttaaagtgctcctttggtgttagctcgggtaagtttcttggttttattgttaatgctcagggtataaaagccaaaccagagaaaatacaatccctcctagatatgaaatcaccaacaaaaactaatgaagtttaaagcttaattggtcaaatagccacactcagtagattcgtttcgaagtcaatagacaagtgtgttcctttcttcaacatacttcacggtaacaaaaaatttgaatggatggaggaatgtgagaacactttccaagagttaaaaagacaacatgaaaagcctctcgtactctcaaaacccctggacagagaaaagttaggaatatacttagccgttacatagtatgctataagtgtcattctgataaaagaagagaacaacatctagcatcaagtctactatatcagcaaaaggctcattgaagctaaaggatggtatcctctgatagagaagctcacttactgcctaatcttagaaccaaggaagttaaggccttatatcaaggctcatcctgtctgggtatacaccgaccaaccattgtgcaaattattgcaaaaattcgatgcctctggacagttacttaaatgggcaatagagttgggtcagtacgaaataatcttctaaccctgaacaacagtttaaggataggcttttgtagactttggggttgagtgcactggtaaataagaaagcagcatacgggataacttagagctagtacaagaaccactgctggataacaacaaagagagacctacctagaaattgtacatagatagtttggctacataccaactttttggtgtaggaattgtctttgtcatgcctgggggcaacatctgcatggagcagtcaaatatggatttgaagcttctaataacgaagtagagtatgaagccctcattgatggcttaaaacttgctcgggagctgcatgctgattacattgaggtctgtagtgattcaaagtttgtagtgaatcatgtttcaggagagtaagaggctcagggagagaaaatgatgacttatctaagcaagatacaagacctcctctcacaattcaagggttacaccctcaggcaaatttcaagagaaggaaacacaactgctacgctttagcccggcttgcgagcagcacagtaacagatagggccagtctacaccctatttaattcttagaagagcccaggatcaattgtgagaaagacgcgtaatactggatgacacccattgcaacctacctcagtactagcaaatatccaaatgctagaaacgaagctcaaaaaatgatgaggaaagttgcacgacatatcatagtagaaggtgtaatgtatagaagaggtttctcaatgccattgctaagacgcataataaaagaagaaattgtttggctcttgtccgaggtacatgatggattttgtggcaaccacccagcagggcaaagcctattaaagaaaatactaaggcaaggatatttctggccgacctgattgaagattcaaaggcctatttaaagaaatgtgacaaatccaagagatttccaaaaatatcccatccaccgcccaacgagccaactgaaatgaaaagtccttggccttctggtatttggggaatagatctgattggacaattgcccaaaggtaagggcgtggtcagtatgcagtggtcgaatttgactatttcacaaagtggacggaagctgaacccttggaaactattacatctaaaaaagtattgacattgtagtaagaacataatatgtcagttcagactcctgcacaaaatcgtttgagacaatggcaaacaatttgatagccaattatttacagatttctatgactcatggaatcataaagagtttctccatagtggcccaccctcaatcaagtggtcaggtcaaagcagtcaataagacactcaaagaaaccatgaaaaaagacccgaagaagctaaagggaactgggcagaggaactaccggaagtattttagtcataccaaacaatagaaaaaatagcaactggacaaacaccgtttgctatggcatatggttatgaagttatatttcccgtagaattagaacctccatcccatagaagattgacctacgatcaagaagctaatcatgctatcctagaagaatcacttgacaaagttgaagaaaaacgagcctcaacaaacctaaagttagtagcacatcaacaaaaggtggctcaatagttcaacaagaaagtgagggcaaggaaattctttgtgggagatgtggtccacagaagagtattcttgaacacaaaagacagcaggactggtgtgctcggacctaactgggaaggaccatatcaggtggtcaaagttataaaatcaggggcatataagcttgggtggtatgacaaaaatttggagctcgttctagtaccaaggtattggaatggggaacatttgagaaaatagtaccagtaagtgtacagggtcagatgaccactttaagtacacaatgcaagaacctttacttttaagtagatgtccttttgggcgaagcccactcaaaggttttgatgaaataactaagtacttaggtcgaatgaccactttcaaaagtacaattttttctttatgtgtaattttttatgtttaaatttagttaaagatcagttagatcatttaataggtctcataaatgtaagttaccacggtaacaaaactgttcagaccaataaatgaataaagatttaattatcattctaattgtgtcaattatgttagaaagttatgaatttaccattaaattgtacaaaaggtatgcttgacccaaagagaaaaacagacaaaaaccaaatttgtgaaatacaagtgacctagagtcataagtcttctcggtcacttggggggcaactatacccattcaaagcattggtaaagaacaaggtaaataacaagctcaaaaagaaaaaaataacagtttgcaggtgcaagtattgatacaagggaaaatattcattaaaaagatggtaaaagcacagtgtaaatccgagattaaaggctgcccagtaagctagtcctctcaaaataatatgaagtattaccaagttgaaagaccgcttggtcagtcatattatcttaataaagccccatgggctgaacaagaaaaagaaaagaaaagattcacactacaggggtccgtagttaaagtcaagagaagagtatggaggccctccctctcgtccttaagaacattaacctccttggttaaagcttcattgtcttccacaagttgggcggtggaggccatctgttgaagttccttggttagctcatcgatccgcttgttggcagctagaagtttcttgttcacctcacctagctcagctcttacctgcactaccttcatattggttgaatccacctccttctgcaaattggttgtggtggtgatattcttcaagttcgtagattttgctcgggagtaggtgtaggccatcttcagattgagttgcacaggaaaaagttaaaatctagactggcaaaaagacaggataaaaaaaaagaagaaaatacttatgcgagttgcctcctttaggagcccactaatcaaaagctccatgtacaactcattatcagcctcggccaattgatcactcatgtcggaaagtgaccgatcatggtagttattaagtatctccttgattttcttggctttagagctcaacactatgacagtgttggaggacttggtcggaccagatccatccaaactaccccccattggcactcttggatttagatgccctctaggctggaagctccacctcaagcaccacctcttcggagaggtcgataattggctggacccttctccttagatggtatctcatcgcctcttggttgattgggtggaggagtctaaccagagctatgactagatcttttcttcagggcctgaaactccttcttagacattgttgcatatgaacaaaacaagaaagttaaaggcagatatgatataaggcatgacagaggtgaataaataaaagttaaaataccctgcacgtaggcaggagcattctcccaaacaagcagagatggaggttcatcgtttgaagagtcttcttattcatgctttgtcaaaatagcctttccctttccctccactggggcggatggtggagcaggtctatcgggctcctcccttattttgatagaacgttcagctggtgcctaattacttagaggaacgttcctcctctttttgctctacctttctggttcgggtaccttctcctggtcaggctttgccttctttgccttcttaaccacccttggcacgtatttagctgggtagagtttatacttattgaaattggcctcagttgccaggagggtgatgtttcgtgcagcgtctgacagttgaagaattttttgtgccctcctcataagccctaatgtgaatggagggcggcagtaagatggcacctgctggaagcagttgtggacaatgtccattccttggacaaagtaatactcatccataatgttccctattttactgaactcggtatccgtggtgcctctcaacctcttctcttcgatctaagaaaaatagaagtttcttgatttgttctgcttgggacttgacatcagatcaaagagccagttggtctaacgtggggatggctcatcccatccttgcgaggcataactgatgaaaatggcagataagtatttgatgccctaaggagtaaactgggtcgggctaaggtgttagtaggctatgatcctcctaatgtatggaagtaagggtaacatagcaccctacttggtgtgagcgcccgaccaagcacagtaaacttccattggactagtcgccaactggttaggggagggaaggaagcattcgacatcccctaagtaaccacgattgagtagattcttcatctttgccttggttaccacaaatggaggagagacccaccaatctcctagtgcaccttgtctcttcagaggaaaaaccttggcgtattcctcagtgacaaaatcttcaccgacctccaggacttccccgacctcagacagaggttgtccctctttgttgaagccaccaaacggtagctttcgagctgcgccttcctcatcgttagcctcagaagaagtatcaggacggacctcaccctgatccttcatctcttagacttcaacgtccccagcagtatctgcctcttcagtagcaagcctagccttctcagtgtttggcaaagtagcgaggtaggcgatttgtggggaggacaaggaagacttgcgcaaagttgtcttggtttgtgccatcatcctaggcctaggcagacccttgttgatatgtctagcgatggtcacagtaaacgtagcaatgggtttacctgcaccaataggattttgacgacttacgggaaaggcattagtgatatctggacggacaatatatgacaagttggatggaagatagcatctcaccctgattctatgctccaaaatgaagtgtctgtagccttaaatctcgatctggccatgataaaagtggtgtttctcctaaagttctggggaaggtgtgtgttcactacttatctcccaatctttgaagctagaattggaaagattgtcactggatgaggacagaatggcacagaggcgagaatgatcctcctataagagttgaagtagatcctggttgatatgatgttcgcctccccaaaattcctcagggttcatctaaaaaaggtaggacagaggatgagaatttggtcaggataacaaatgaaaataggttgattatatcgaccaggtctgattggaagatcaaaaatagaaatttagcataataatgaagtttgcaaccaagaagttcaaaattttgaattaaggtctgattctcactaaactacaaatggctaagtgaaaataagtgtcgtcaggttgaaattaaaacgaaattacgatcgagcaacgtgattacgcataatcaagatttctttttctcaaacctaagtttttatggttctcctaaaacaagttcaagaacagtcaaatttttgcagaaagaaatccagaaaattaaacatgcaaacgaataaataggatgaaatagagaacttactgaatgattcaatgctttggatctgctcagatgatgctgatcggtgttttctgaggattcttcgaagaaattgaaagaaaaaagatttttgctctgattcttcaagagtaaaaatggctaaaagtggttaattaggattttcaaccctatatataagcagatgaaataagaggagtaatgatttcaaattttaaatgtctcgaattcgccccaaaagtgtatgttatgcatttgattacttttgtagaataacagtcatctcacgtgcaaattttgaggcatggttcgaggtaaaattatcaatcagcattaatgagctgaaactaaagagagtcctggtcagagttacataaagtaatcaatcgacaccacggccacgtgccacctattcggcaagaattcagaccgagtaaagtctacatgcgaccgagaaggtcctgcacagacttgagggggaaatgttatcaaaatttttgcacaatgacatggtagaatactcaagtgacacgtgtcctatatttcttatagatgggcagaaatgaatatcccgaatagactccatattgtatgtcaccatgtataacccttgattacttgagcatgatgaaagaaagatcatctaggcaggtataaatctggcttgccaaactacttgtcaagagttaattacttcaaaatgatcttgtgaagtctagacatgaaggcagtctctactatcattgtattgaattagagaaatatagcaacctgttatgatatcgtatttcgtaattatgtaataaatgtaatttcttattttatacattgtaaccaaaagaaaaaccttccctcatgcattaaggccttataaatagtgacctagcctcactatgaaagggatcaaaagatttgcttcagagagagatctaagaaaattacttagagattcattgaaagagcttttagagagaaaaacacttcgttctttctcttgagttaatacgattcaaggggactatgctattaccaccctcatggggccaaacctctttaaaatctggtgttctttattacttagttgtttttgctctattttaattgcattcttaatcgcttattaattgaatcactgtcattgactaaaagcgaggtcaacaagtaggttattgaaattgtgcattattttgttgcatccaagtagtagaagcaccaaagtattgagcaaatccatatgagaatgatcttaatcttgtggtactacaggaggatagtaagaagttagttgagcatattgattgatcccactatgggaattcttagaataatcttcccattgttgattggatgtgtaagtatcgtagtagggatcatattgatacacttgttgcaagatataatatggattatagtattgatgattgtacattgccatatttccaaagaaatatctaaaaattaaaaccacaactcgaagaacaaattattaacgagaaaaatagaaaaaaaaacaaagaataataaattgaatgaaatagtccgtggcaacggtgctaaaaatttgatgtgtgtcgtatgtcatatcaaatttactattaatttgattccacaacttccaataattttagtataaatgtaagtaatggtggatcccacgaggactatggttattcaataattttaaaataagtgtcaagatgtcaagaattagaaaaaaagggttttgatgatgagattaatataaatagagtaaaaaaacttaaatgtgatactaggatatgcgataaatagttaaatgttattctccaccctcaacaatcattcttaaatcctattaatgaatgtaatttcattattccattcaaattattaatcccgcagataaagctaaagtagacaaattatcacaatctctctattacatgtaattaaggtgaaacactcaataattatcctcttttatcaaatagtaaatctaacgaagcatgaaatttatttaacatggagatatgctaatataggaaataaattaatgaagcatataattcatttaacctaggttctattcttcatcacaattaaaatacttttgataatattaaaaattacaatttatcaca

SEQ ID NO: 122498 - DNA, 1120 bp, Cannabis sativa
gtcatatttagtcacaaaaaaattgagttgtgactaaaaagttgtcactaaaagtagcagtttttgtagtggtgtcgaactcagatcttgattatactctacgacacaaatgaataagggttagagatttgagatgttgaaggagtcatttaattccgctgcaaccaatgtaagattttttatattttatatgtgtttaagtttcattgttttagaatttcatatttagaatgttaaaaacatacttgttactaaatctaggtcctagtaaaatataatattccaacaatagcaactaatggagcaacttaaattgcaaccaaaatttgcatagcaatttacatagaaactactaaagaaaccaccggagcaacgcaaaccgtaaattagaaaaaaaaaataaaattacaaaatagtatatgtagtaatttctcttttatttatacatttaaaaaaaaaattgcacttatacggaaatacaaaaagcaatctaaatcacaactcacgcaacaattattagggcaacttacactgtaaaaatgaagaaaaaaattaaaaaataatatatgaaattacataaacataaattttaatatttataaagaggaattaccttaatttaatgagtgtttaatgtatatttttgtatgcttatgtatgtttaattaattttttcccatttttttaaaaaaaaaaattatgttattcccatttcttttcttgacaaaatatattattcacatcattatatatagggtgatatataataaggcaaataaagtggagattttattttatctttactcaataattaaacgatttgtattggatggttagtggttaattattatgttaatggtgtaataagagtgaattaatattttgagaagctaattcaataattgcaggataaaaataattttttattgttactaaaaagtaataattaaaaaaatgttgtgattgaaatagtattctaagggtaatttgttttttttagtagcattcgatcttacgaccaaataaattgagggtaaatatcattttagactttgtgttttgcaagagttattaattggaccctgtgttttgttaaatgacaaaatggaccatgtatttt

SEQ ID NO: 122499 - DNA, 1586 bp, Cannabis sativa
  modified_base (1559)..(1560): a, c, t, g, unknown or other
aacatacatggtagtaaatctgaattttggtaaaataatccccaacaactcccactacacgagtgcgcgtgtctttcctgaaaaactaaaaagtggcgcaagtcactcggtcattcccaacgactcccatgaaattcaaaattctttctataatagtgatccactgctcagccttcataacattcgaacctcgcaggatgactggaggtgcctgcttgcaaaatctctcatacagtggccccataagatttccaataacaggtttttctactggcactgctggaaccatagcgaccggtgctttctgcggaggcactgcaagaggaccctgctgcctcagcctctgaatctcttcgtcttggttgagaattcaatcttgcatttttgcaaacctttgctcctaatctggaggagcttgaggtagattttcatgtctaccaccctaaaaccttccacggcctctgctacatccacgaggcttcgggagatttcgacctccccgaccacctccggtctcaactatgttaccctggctcctcatatttcgctgggtatccatttaataggactaagcctacgaacccacatgtaggtcagacagcgatcacatatactctatgtacaacactttatggatttgaaggcaatgcatttaaacaattataaactattatgctctctaacatacttttctaatcacataaaatactaaacaaataaaggcttactgaactatgagtcgagttttctctaatgatgattgtacatgtcttgacgatcttcggtagacaaacctggctctgataccaaaattgtcacaccctgatacttaggcgcactatagtgattttttaatcaacgtgcacctttgctaatcaaagggtttttcatgacaattgtgccaaattaaatttttgattcaaacttttaaactttataatcatatatatatttacataagcggggatcctgtgtttaaacttttacaatcattattaaaatacttttacaaacttgtcgcacaatgactagaaaatgtagcccaagtcgtcttgagaccgaacactcgaggtcatgtcgtttcgacatgtacaatcatcacctaagctcggaattgactcctatttagcctttgcctttccttttattacacaccaaaatgacatttgtgagttaacaaacttagtaagaaaagcatatacataatataataccaacttgcatctaggcgcccatacacctatccacaaggcttataagataagtaagaatattctttactaaggtatgaccactataccacatacactacataccgttactgtacgagtattggtagggttttgtaggcccgtattaaaagtttactaaactcaaaagataattttaatatattataattatataaacatataggtcgagatcccgagtatcaaaatatgatttaaaagtatcttactagcatatacatatctatactattttatttttttacaaattcgtgaacagacaactcaaaacacagactcaaaatagtaaaagaccgaaaccctccaggnngcactgccgcgatatgtacaatctct

SEQ ID NO: 122500 - DNA, 734 bp, Cannabis sativa
  modified_base (673)..(680): a, c, t, g, unknown or other
attggatccaaaatatgaaatccgcacttagtgcagattggatgttgtttgaccaaaaaggtacggattggatcggatgaacacccctagtttaactttttcttcttggtaaaaaaactaataaataaataaataaaaaaaaaaaaggtttgaaactttcatggatatttaattaataaacacagtactttatcctcacatttagaactcagttgtcttatgacatcaaagattaaacaaaaaaaaaaagaaagaaagaacttacacataaaatccaaaagctaatctattagtcaaaaaacagacccagaaaaaaatgacctctagaattgacaatgttggacttgtaatggttctaataaatgtaaaatgggagaaagaaattaataattcactgagttctccaatgcaaagccattcctctccctctcctaatgaaagcactgcaccaccaaaaacagataagaaattttgttagcaaattaatgctactaacagttgctgacaactcaaatgcaacttactatttttattggctatgtatgagtaaatatttgaatatgaattcttatgtgtcgtattgaaattgtttttataaaacataataacaatattggcatcctattttccactttacacttgaaaacagtttttttgcatttttacagaattnnnnnnnnaaacccctattgcaactagggctgcaaactgaattgcaacaaaaaatcgtatag

SEQ ID NO: 122501 - DNA, 881 bp, Cannabis sativa
aattatacttgtttcaaattcaaattttctctttcaaatgttaaactttatcttattttgtacgaacataattctagcattgtggtcgtgatcgaaagagtctctctattgttttccaccactaatatttgaaggcttttggtaaatctaataacatagttgaacacacaattttttttttttaattttgatttggctatagtaatgtaatgatacagtaataattacatagaaggaatgaaagagtgaaaaaaatagatagagtgaattgcacaattcatattacattgatatataattacatatttttcaatacattttctcattattaacaacttaaattatattaattaatttgattctaatcaataatatttgttttgtttggctggtcctcttggaattttgttgagaacattgtgttcaaatttgatgtacaatttttgggagtctcgatagagttttgcagcaagattatccacttcatttcgatgtcgttcatacaaacctggaagtgtttcgaagcacaacaccacttcatagttccatccaaaccaataaaattaaacaaagttagttaaaattgaaattattaaatgtaatagctagctataaatttgtactttgtatgcaataactctaaatatcatgtattctttgtatgaaaagagttatttatatgtatacaatgtatacaatatacggttaattttattttggatattttggattatcatgtattttgtaaaaattatcgcttgaattttgttttataaaatgataaattagctcctgtaattttctaaatagtacaaaatggttacttgaactcaatttttgataattttttttataatctacttgaaaataattcttaacac

SEQ ID NO: 122502 - DNA, 1227 bp, Cannabis sativa
  modified_base (57)..(63): a, c, t, g, unknown or other
tcaataattaccctaagcaagatcgtaatcttacttcattaccaaaataattacatnnnnnnnaaaatatgtctatttaaatattatttattttccgggatattacaaatagtctaccttcaggactttgacataagtagcccttgtgtgaggatgagtatcctataaaaatgcattgttttgtcttgaattccattttgtgtagattgtatggccgaagataaggatagtaggcacagccaaatggcttgagaatattataatctggtatttgaccaaataaaacttctgttggagattgatgactcaagactggtgttggtagtctattaatgagaaatactgcagtgtcaaaggcatgccaccagtacgagaaatcaagactagattgagcaagaatcgtaagtcccatttcagttatgtgtatgtgttttcgttcggccatcccattttgctcactggttttgggacatggatgttgaaagtggatgccctgagcactgagaaattgagaaaatggcctgtattccccaccccaatcggcatgcactttcttgatggcaaggttaaattgtttttcaaccatggctttgaattttaggaacatgtcaagagcttgagatttttgagtgagaggataaatccatgtgtatctgctatagtcatcaagaaagtgaatgtagtaaatatagccatctttggatttgatgtgagatggtccccatagatcagtatggacaagttcaaggggctgtgtggctttggtatctatgctaggaaatggttgtttgtggcttttaccaagttgacacgcatgacaaaactcaagttgatgaattgtgccaatgtggggaacatgtggtaatattttggctaggacagtacgtgaagggtggtccaacttagtatgccaaatattaacatgattcttggtattggtttgcagaacagtagggttacagacatttataggaacaacattctctttattgatatgagtagtattacaaagatggtcatttattacattgtgtaatgaaaaatgactactacaacttaaagcagtaggactataaccactggactcacactgctgcacccttgcctttttcgattcttgagagaattgttctagcacatataagccatctttaagggtccccttgagcagtaccttccctgtttctttgtccttgacaaagcaacatgttttgtggaattcaagaa

SEQ ID NO: 122503 - DNA, 933 bp, Cannabis sativa
aaaaaaataaaaaaattactaaaaactaatacaaaaattgaatagtaactagtaagggagagacatagggcactttttgaatgagaaaggagcctaccactcggagataaaagttaaacatacacctatttccaactcctctttgtcccaaataatattcatattttacagaatacaataaagatattatatatgtttcccgacattcttcctactatcctcctattatttaaattctaagccacgcatgtgcttctattattttttaatctagcggccactttctctatgtcttatatatatttatattaaatatttgaccatataaaggcgaagatttgtaaataaaattaaaaaaataagaaactgttattataaacttataaacattaatcctcaaaataaagctaatacatcgacttgtgagttctataattaatggtttaatataggctttggttaatgaatagttttttttttattttttatgcatggttagttaatagttaatggcacttaactcttggtgaaggccaaaggattagtttatgtcccacttaagtattcaatagttgagtggtccgataactatatatatagcctagcttttaaggaaatacattataatctcacaaccatattgatgcccattatctacttctgtctacaaaatagcctacagaagtgtcgagatgcttcttctagactcctaattttaagagggaaaagaaaccttttttcgctatctaaaaataatggaaagagaactcttcctcatgtttgcatgattgtagtaaaataatcatatgcattgtttaggtatgttagctctctctcaaattaaaaaacatatagctagactttacgggtattattgattggtatatataaacataattatatatacatatatataaataaatattaaaagaa

SEQ ID NO: 122504 - DNA, 800 bp, Cannabis sativa
ctctctactgctttaatttttgggtgctgctatacattttcaactccaacattattacacttttgctttgcggcaccattacacaactttttcctatacattttcaaatcaatttatatcaataaaacattttcctttccttcctttactcacttttttttaaaaaaaaaataaaaaaaaaaattgttattattattagaaaatttaacttgtaaccgttcacattactaaagaatagtatacattttcatttcatatttttggccaagtcatatatattatatagtagttacgaaataaaaggcttaaattttcacacttgtgtgtgggtcccacttatttcaaaccaatcaaccggccacaaggaccgtaaattgcgctcttgctcgtgtgtgggacacaaaagaatgccacgctttcttacataaaaaataaataaataataataataaagaaaaatagaaaaataaattatacaattagacttaattaatatagatacactcttttaatccaaaaatgaaaaggtattacatggccaaagtctcttaacaaaactccactcaacagtcaaccattcttactactactactccctcataatataataaatattttaaaaaaaaaaaaactaaataatataataaagaaaagaaaaaacagaatttatttaatttaattttttttttattttattttaattttgttgttgcagcctgaacaaaatctgccgagaaatcggcaaggcaacggcggcaacactcggtccaatgactgtggctgccactgtgaacttctca

SEQ ID NO: 122505 - DNA, 1254 bp, Cannabis sativa
tagcttagcttagatggaatccattataaaaagattgaatagatttttttgttaatgtggtgtgagtgtgacctttgtcttttgtagttttgtgtgtaaacactacccacccatgtgcaaaaccacatgcttattttttacatattctttttcattcaaaagaatatgctcaaaaataaatagtacgacataggtcaagccatttgatttgtttgattcctttttccattatatattaaatgccatacaatcttctttctcctaaattattattattattattgttttggtaaatgtaattttaaatgtaaaaattattaccatctattttattaaatatataaaatagatcataaacttaaggtttggcaatttattttttaactaacctaaagccaacatctaacacaaacatataaaaaaatgcaactagtttgataataatatttttagatcatgttattattaaattttaatttaataaaaattaaatcaaggtatattttgtacaatttaaaaaaatacgaaatttaaattgtcatctaacaaaataaaaggttcaatcaataacttttgttaaatacaaaaatctaaaataatattaaaccattgttttatactttatttgcatttttcttaaagaaatgggtatgacaaaaattgaatgaccacactcatagggtcaaaatatggatggttcacctttaatcacaaataacactgcagaataatttttaaattgttacataatttttaaatggtttacataactaataacttggttaattaaaaaaaaaaaaaaaaacttggttaattactgcatatatatatatatatatatatacactttgacttgagtaaatatatattaaatcttcaaagaaactacctacaactctcttacattgcaaagttctaaaacttaatatttgtatgataaatatatatatatatattattttgaaaaatagcaaattttttatataatatatgtataattattttttttagaattatttcatataattaaaaataaaaaaaaaatatatatttttacggattattatatctttttcacaaaaatatcgatctttgttcattgtttttttattgttctgaaaaatatggtatttttcatattgcagaaacataataaggtattacagcaatgtagaaacaacattattttctttttgaaaaaacaaccgttcataaaaaataaaaaaaattcattaatttttatttaaaataaaa

SEQ ID NO: 122506 - DNA, 2627 bp, Cannabis sativa
  modified_base (1035)..(1058): a, c, t, g, unknown or other
gcttcccctaattttcaattgcagctttctatttatttctcatttttagggttcaacgaacgaaaatacccctgctcgtacggactctcgccgcgacgactggagcccccaaaaactacgtttctgttttccactttatggtcgcggccatggtgatctcgccgcggccaaaagtgcatcgagccttaatttggcggttttcttggctccacttgtcttttattgcacttttgcatcacggggcctccattactctgagaaacctgaaaacatagaaaacaagcataattccgtcctaaaatatcgaaaagcgaacataaaagtgatccaaaatataggctagaaatagcctaacacttgactttcttaacgggtcgaatgttggttccctttatgtgttaattctagtactgaaaagttgcgcgtaaatgcagatgggatcttgaattatacttccactagtgaattgatggaattaaaggataaagaagtaattagaaaggtaaaatggtaatttgaccaaaactaattacgaaccaacacttagagggctaatcactagaattgattataacaatggacactgcagttaaacttaataaatataattctataattactaagagttcaatttcatatttatagtggagtaataatggaattaataaataattgattatttggttaatgagactcaataaatagtctagtttattggagcttaaaattatatgtccatggtccccgaatcgccaccttaaaatactatcaagggaaaggataaagtgttgtataaagttgttcggaaaaaattattttgaactggaaaaatagtaattatgtatttttgtaataaataaataagttttttcaaattagttaaatagggaaaagacaaaattcgttaagaaaaaatttgtcgagacaagatttgttaagacaaaacctatagcattgtcctatcctcatggaatttgtatttttgggttaattgattagttcattaattcaattaggtaaatatctaatttgaannnnnnnnnnnnnnnnnnnnnnnntgttgagatattctatcaagtagttgagagattctctcataaatatcagttactgaattcgattataaatatttatttatttaaacaattaaataagatttaattaaagggatttaactattatacataggagccaaaattgagaaatctgattcactcttttatgttgctattttcgaaataaggagagaaaaagaaagaaaaaaagaaagatttttttttttctctcaattgttcttgctcatgtgttgagaactcaacaagaatagctttatacactttatcctaatagcccacactattcgagtataccctatgatttaatttaatgtacacacatctggagatccattggatatggaacgatgataatcagataatacgaaacttttttgcagcgtacctaatttagtaccataaaaccaatagacatattgtgttgggccaagcgcctaggtcaattcaagttatttccaatcattttttttagaagtcttctggcatattttccattttctcaaataactgagatacgagtattttttggaatcaaatggaaccatccagtggcaaaaagctagaccaagcgcccatgttgacactggtgctgggcctagcgcccaggttgacattttgtcaacctgggctatttctagtcatttttcccagaatgtcttcgttgtatttttttttttttttttgcttttaaaaaataataaagatacaagtgatcttgaggagcaaacaagatcatatgggggttgaccagggacccaacgtctaggttgacatgagcactgggccctacgcctaggttgacatgcaacatggttcgcatgtttccgctcctcaaacacaaattctgctccaaaaattcttcttattttggtcaaaaacggggtaggaaacctcgtttgcaatctcaaatgccttagaagcataaaaatgagccttaggaagccaccaggaagcacccgacgcccaagttgatgtgcattgggttctgcttattagaatctgatttcgcctcgagcatctggctattttttcgtagtaaacgagagctacaacttgtgactggtcaaattcacactttgatatttcactcttccagcaaggtggaatatcagcaaaatcgagaagtttagagtttacttgattttaccaaaaagagacatctctgagaactagtgaacaacttcaccaaatcaaataaattggctaagtgatgtcaacatatcacttaggcatcaaaaaatacaagtctgggatatttttttttcacttaccgagcgtccaagttaaggtcaaaatgtcaacttgcggactggatgtcaaccttagcgctaggttgtcaacctgggcactaggtgctgaacaatcttcagtaaaacggtcatagctccttcaatatttatccgattgcgcgattcaacttgcgttttaaagctctttgaagtcatgtctcacacctatatcacaattctgaagatttagggtgcgtttggaaagccacaatgtaattggatttgtgtgtaattgaacgtaattacacaatttggcatgttt

SEQ ID NO: 122507 - DNA, 1047 bp, Cannabis sativa
atcgattggctaggttggcctcgagaattatgccaaccgatttcagcaaaaaaaaaaaagtacctggatggatttaatctaaaaataaaacgtgatcttatgattattagtgacgacaacaccacctatactgacatggtgggaaaggcactacgagttaagggcgtagttgagtgcacccatgagtcccgagcgacttaggttgttggtggagcctctactcctcctacctcttgttatggtagaggtggtagcagcttaacgatagatcagaaaggaaaggcaccaattgcacctggtggctccggtcagaataagaagttttgagggaatcagggtcattcgtcatggtggttctgaaacccgatacactacttacttggagtttcccaatggtaagaaacatcatctgggtgagtgtaaagggagaggatgtttccagtgtgggtttccttgaaactataaaagagattgcccatagcttaagaaagaggaatagaggatagctgcaaaacccactccagcaagggtgtttgctttacctcaggctgatgcaaaagctagccccttagttgttacaggccagctctcaatcaacaactcttacttctctatattgattaactctggggccacttacttttatgtggcagaatttttttttaataaattggatagaccgcatgatagttatggtaaagggcttggaaccctactactaggtggagaattagttatctccaaaaggtggattgggtctatgccgatcagaattgaggatagggagttgagtgctgaattgatagaattaggtttagcgactttcgatgttatacttgggattgatttcttatctaagtactcagctagtattgactgtaaaggcaagatggtgatcttccaacatgagggtgaggaattgtttgtgattgtgtgatcagttgagggatctcatattccagtgatttcaatattaacagctagagatttttcacaagacggatgtatgagatttctggctgtggtattggataccacatggcctga

SEQ ID NO: 122508 - DNA, 1096 bp, Cannabis sativa
ttaaaaataattaaaaacttactaaattaattaaaaacttaagaactaagccaattttagttaaaaaaaatgtgaaaataactctaatgtctagagttatcaacaatttataattcatctatatacaatattggtcgaaattttgaaaagctgggcacacaatgatagagaataatatataaaagatcgatcagattgaggaggtttggccgccggcatcgtacgtgatttgataaatggattccgggaaccagacatggacggacgagaaacaccttgttatcgatcataaaattgattactaattataaaatatttatctaagttttataatcgttacttttaacatttttgaatttgtatttagttatagttagttttatagtcatcgattatatatacttttactgttatacaaaacgattctaaaatttaaaaatgtaggtcggaaaaattgtagggaaatttgtaattttctattacctacatctatgcttcattttataaccgacgcaataagtaaaaaaaaagtatttgcaacaagttatgtggcatttaagaatcgacggaacaagttttttgcgtcagttttgaaatggcacaacccattttgtgttactttaaaaccgacgcaaaatgttataaagaaaattttatattttgcgtcagtttcaaaatgacgaatatagttttcagtgtcgttttataaacgacacaaataatatatcatttatgtctatggtttatacgttaattttttagactgacgcaaaaattttatatgtcacttagtaactaacaaaaataccctattttatagtagtgttagtttgatcacttgagaacatataattaagtatgaagaagaaaattgatgttattactcctttcaaaatatattattgttgttactattattatgaaattaataatttctacattttgaaaaaaaagaaaaattatccattaaatcgaggcaagtgcaataccaagaaaaatagtagagctagtatataaatatagggcaatactattgtaggacctagcaaaagtttcctaccgataggaaactttttttttttttaccgttgatttt

SEQ ID NO: 122509 - DNA, 1070 bp, Cannabis sativa
ttttttttttttttttgttatggatgttttttgcaaaaattgattaaaagaaataacttttgtttttcttttcaaaataacgccacgttcattagaagtataaaaatatggaaatcacaaagggaattccgtgctcttaataggaaccaataaactggctagacaatctaacattttttgctaaaccatctactacagaattaaacttgcaatattgaaaaaaaaaataatatcgaaacttcttaattaaatctaaaaacatcaaggaaacgttcaaaagaaattaattcagaacacaactactcttctgaagagcttgcactacgtaccacttgagaatcagacaaaatagagacctccattcacttgttctgcaagagccactccaaagtgaaaagaatagcttttaattccgcttccaaggctgaaacaacagatgaatttgttaaacaataggcaaacgagtctttattaggaagagtgatcattacaacagtagctcccataatctcctcgctcgaggagacgtcaaataacaatgccattttcgaacctaatctgcacaaatcaaggccagggacagttccaaatttctgcttgcaccagaacctaagagattaaccatctcctcaaaagaattatgcacctttttcatccaaattgtcacatttaatcttatccccaaatatattcactctattcctcgcagatcatattttagagaaaatacatcccatggagataatggttttattctgtaattactaggaacagaggaaagtaagttttctggaaattgaattaaagaggttgatggtatggattcactcaaaatcggtaattcctcagaaaacttcaactcctttgccacactacaatctttgaacaaatgcatacaagtcttcccacttgagctacacaaataacaatctttttccattacaaaagacaatttactcttgatgggtatggcttcgttaagaattaattctccataataacactactacaaatattagaattcgtgacagttctaaaagatcggaagagcgtcgtgtagggaaagagtg

SEQ ID NO: 122510 - DNA, 805 bp, Cannabis sativa
  modified_base (772)..(776): a, c, t, g, unknown or other
tttattagtctttgcttattatcacaactttgattataatgacgagaaaaaaaaaaaacgcttcaatgttaagttatcttgttaatttgatcaaattgaatggtaattgattctgttgggtttgaaccaattaatattcttaaaacatattcatatacaaatcttacaaagcatgacacaaccagccactccaagggcacaaaccaacaataatttgtaaaaatatataattaagataaatccaaatatattaatatataaaatatatatatatatataatttttttcttatatgttcttactaaccaaacagatacaaagataaaaaaaatttgaaaaaactcaaaagattttaataatcaccgaatcacatccatggaaatcgcaacaagaagaagaagatgaaatttgaaaataggtagtgattatgctgatctagactgaaacaagagtgttcaaatatggagtaacacaagtaaagaaaaatttgcttctaacaccatataccatcttcttaagctgctttgtataaacattgtatgatgctattattctgtaattttcatctttataaagattgttataattattcattaagagctcaccatttttccaaaatgtaataggccaataaaaccgttgtagtggcccaattttaagaatcttaatccaattggtagtagactcaatcacccataactcgtacaaaatatacatatagtcagaagttgaaaaatgcctcttttattcatcaattaatcaaatttacctnnnnntttatatttatttgaaacatacctctttt

SEQ ID NO: 122511 - DNA, 3284 bp, Cannabis sativa
atgttaattatagacaaaatattatagatcgaatgttaaaatatgcaagatgatttaacatttacatataacatattattggaatctccatcagttttaggaaccaatatacgaacaccatatatctatcattatatatatatacatataaaaatactgatgattgggatatggcaatgaaggattaatagagaatgaatgggggaaattaaagggggtagaatctaatatatgaataattaaaaataaataaaaattaaaggcaattaatgcagtaggtattgggtaattaagaagaagaattaatcaagatcctccggtaatgctaccattgaaaatgtcaatagtatcaccatgggagacgtggtgccatcgaaaggacttatcttcgtccatgacagtttgcttgtaaatgaaaaagtaaccatctgagggaagaggaaaatgaacccctctctgtctaatcttgtccaactccttcctcagttccaccacatcatcacatgggctcatctccacgataaccttcctactctcgcacttggatcttactgtcagtttcaacttattattattctttgaacccgcccctaatactgtcgacgtcctcatcatcaaactcacctcgatctcagcgttctcacgaagttcacattcacttaaacaacggttctcttgcaactccacaagccccgaagaggaatatgagtaaagaaccacacgtttggccgaaaccacagagggctctatctcttgaatcttctctttcaatgacgaaacggtgtcgtttaagtccatctccacagggacaacgtggggtttcggagtaggaatctttaagttgagtctaataattttgttgaaaaataatggaggaggggagtcttgatcatcaacgtcgatcatgatggtgttggcgtcaatgtcggcatcggcgttagtggtggtgggcgtatcggaattatcggaggggataatgaggcggatgtgagagttttggaagatttcgtagtcgcccacgtagcgttcatcttggagaacttggcgattattattcaagacaagggtttgggttgaaatgggtatggcgtggtacttctctatcttttgcttgatttctaggattgtatcaaagaaacccacttcaatcgagaaggattttccatttgattgatcgaagatcacatccatttgtacacagaagccagggtgagttgttacagagaggttacttgtggtccaagtcaagatatgaacccattatttatttatttatttatttcgttttatttatatatatatgatagttaaaactgtattccgatattctctatggtgggagcgagatgagcgatataattttttttaattgttacaatttattttttatgtgctttctaatgtaacaatattacatatatcattcattttttttaattcttttgaaagaataatctcctgttattagtttagctttttgtcattgggatggcaaaaatttccgctgaaaatcgtctatatatatgataatggaaactattaagttaaggtgcacgtgcatcgtttatctctctttaacttgttatgctccagcaagtgtgaagaaaatcatcatggtttacttttgcgtatattaacacatagataaagatcaattattctgaaatcactagtttccgaattcaaattacaagaagaaatagaaatgtgaaatttcacgaatcttgattagaatgcagctgaattggtgggggccaaacttgaccatagacatccttataatatcgcagaataggtaaagttagagatgtgtgatcttttgaaaggaaagaaagaaatactacacaaaccaaaaagtccatcagatgaggaaactgtatttgagctcctctgccttttgtgctttagaattctcagatgattggcagttattctgaaatatatgtggtcaaattacaaaagttcaagactgcctgagagtatttacttacatatttaatataaaagactgtatgaaatagaaggtcgcaaaggtaagatacacctctacaatttatccagtagtagtacaagaaaatccagaactgtgccttttgaatggtaaaataagcacccaaagctgaaaacaaaccaagttgaatgaacaggcaactcctacgtgcatatcaagccacacttatcttaactcgaatccaaaacgtaatatatttaccatacagcttacctcataagatctgcagaggtccccaggcagctttactgagattagcggaagttaacagcaaccaactgttggggatttgtagtcaatcaacatagtcagcatgagttggaaatcctaattaaagatgaaacactgaaaaaaaaagaaaccgtgaccaaagaaacaaaatacatgagtttaaaaatactcacgcaaggtttctggtcattacaaggagtgtatgtgtttatatgtggcattgcacgactgaaatgaaaaagggcattagtagatattaattaaaggtagcgttccattctaattccattcaacaaacccaaaacactagaagtgactagttatcccatatgatcattgaaaatgtgacagaacagcaggaaggaagatatatcaaacacacaaaggataagtcaagtttcactgcccaaatatctgataaagagaagagacatttaccagcagccggtgtggcttgcgttcaacttggcccaatactttttcaagaatgctttctcgacatttttcagtggacttggaatggcatttccagctgcatccctatggaagagtggaaacaataatatcaaaagaataggaagaagacaaccgagcaattagacaggcacactgcacattacaaaggaattttaatttcaagttgcactaactaaatgaacttgtcaactagaatttttttcataaacagagggaaaaacacagattgcgggcccttatgtttgtcttgacattccccaacttactgaccccaacacctgataagtgaaactgttttatttatttatttatttttatttttaattaaccaagctagaaggttgttaaatgtcagtgaccaactcttataacattcaatgagttaaactgacttcagaatcagttatccacataaaattggattagatagaaaagaacaatatacaaataaaggtattggagaatattgtcctacatggattaaatgtgaaagtattgagccatatataagaaacatgggctactccactcattgccaattgttttgagttggaaccccataatt

SEQ ID NO: 122512 - DNA, 1938 bp, Cannabis sativa
aattcactctttggcacaataggttgggacatccttccgagaaggttgtccaaaatgtattgaaatcatgtaacatttctggcattaataaagaatctgaattttctgtttgctctgcttgctgtcttggtaaaatccataagtttcccttcccaaaggcatctcaatctattatttctgaaccccttcagttggtggtctctgatctttggggaccatcacacacaccatcctttaatggctataaatactacattcattttgttgatgcctattctaggtttacttggctttaccttctcaaaaacaaatctgatgcccttaaaacattccaacattttaaggctgaagctgaactacagcttggtaaatccatcaaaaccctccaaaccgattggggaggagagtttagatcctttaccaactttcttgctgaatgtggtattcatcataggcacccttgtcctactactcatcaacaaaatggtcttgctgaaagaaagcataggcacattgttgaaaatggcctagctcttcttgcacaagcctccttacctctaaaattctgggatgaagcctttagaactgctgtatatttacacaatagacttcctacacccttattgcagcagtctacacccttggaaactctatttcacactaagcccgactacacaaccttcaaaacctttggttgcaaatgttatcccaacattagaccttacaataaacacaagttagagtttaggtcttccccttgtacttttttgggatatagtttgaatcacaaggggtacaagtgtcttgactctaaaggtaggctatacatctcgagagatgttatctttgatgagttctcttttccacatgagcaaacttctcaatccactgctcccacagatgcatctgaaaaatcatttctcatatcagcattaattcctacatgttctcattacagacatccatacaccatccatgatcttactgcaccagttacttctgtacctactgctggtaatttttcaggtgttttaaatagcccaaatactattgaccaacatgctttgtgtgacaatacttctgtacctgatcctcctatagatatttgtccctctaacagtcaatttccagtgcttgtgcagcctgttgtaggagttactgctgtctgtaatgcaggtgcaactttagcaagtggtgatagtgttcatgaagaggctactgctagtccaactaattagggtactgaagctgttactgtcacaagaaccagcttacagccttgttcaacatctccaaattctggtactttaagttctgcaacatcagattctagacctcctcctatctgctcttctccagctgcattgcctcttgttgcctgctgtttgaatgcaccaggcagagttaacaagcatcacatgaccaccagatccaagttaggaattttcaaacctagggcatttttggcttctagagaaccctcctctctcaaagaagctcttcaacaagagcaatggaatagtgctatgagtgatgaaatccttgccttagctagaaacaaaacttggatcttggtgagacttcctgaaggaagacaagcaatagggtgtgggtgtataagatcaaagaaaaccccgatggaagtgttcttaaaaacaaggctcgtcttgtggctaaaggattccaccaacaagcaggtttgacttcacagagacttttagtccagtggttaagcctgttaccataagggttgttttgactctagccttgtctaatggttggaaaattagacaactagatgtcaacaatgcctttctaaatggtgatttgcaagaggaggtctatatgactcaaccacccggctttgaagtccctggacaagaacatttagtgtgcaagctgaacaaggctctttatggtctaaagcaagcacctaga

SEQ ID NO: 122513 - DNA, 2114 bp, Cannabis sativa
aaccaagaagacaagaagaatccaatttttaggcttgataatcaaaaagagattaaatagcacccccagaagtcaacctaagcatctagggttttcacccagcccccaagttaacattcttagctagggttcagtttttggttctttcttagtgcgaatttatcaaacttcttagttaaacatgaataaggcatgtcacaaacatgttagaggcatcaaaatcagaatcaaaacacttcccgttctgagcatccagtgcctgggccacctggtgattcacctagcgcccacattaacatactgtcaattcggaaagcttccaaccactatatttcataagtatccaaagaattttatttgtctccatccaaaatgaggaatcaagtgcttttagaaaagaaatggatcaacctggaggccaaaactgggacctggcgcccagggtgaactggtgctaggtctcagcgcccaagttgacatattatcaacttgggccatttccaatagcagtttagacaaagtcttatggtcatattctcccttttcatcaacaattaagatatgggtgctttcaggaaataaatagagccatctaagagtgggaactaggacccagtgcctaggttgatctagtgctaggtctcaatgcctaacttgacatattgtaaacctgggccatttccaaacatttcttttgagcagtctttcgggcatattctccatttccataaataattacaatacgactattactcggaatcaaatggaaacatttggtgggaaaactgggacccagcgcccaagttgacctagtgcatgggcccagtgcctaggttgacattttttcaacccggtccagttccacgtgttttctccaaaaagtgcatcggacatcttttccattttcaaaaataaagaagatacaagtgatctcagggagcaaatgagatcctttatgcaccaaaatagggctccaatgccaagtttacatgggtgttaggccatgcgcccaggttgacatgggtgctgagccctacgcccagattgaaattcaacctggttcacatgtttttgctcttcaaacagaaattcttctttgaacgttcttcttattttggttaataacgggctaggagacaatgttttcaatcttgaatgccttaaaagtaccaacacaagccccaaaaagttccccgaggagcacctagtgtccaggttgacatatagcctggtgcgttgggttttgcttatctaatttaggttttgtcttgaccatctaactatttttcatagtaaatgagagctaaagtttgtgacaagtcaaattcacacttttatatttcacctttttggcaaagtgaaatattgacatattaaccataaattgagaagttttaagtctacccgatttgttggaaaacaaaattggtgaacaacttcaccaaaaataacaaattgaccaagtgatgtgaacatatcacttaggcatcaaaaaatgcaagtctgggatattttttcactcacacatcgtccgggttaacgtcagtatgtcaacttgggtgttgggtgctcaacaaccttcagtaaaatggtcattgctccctcaatattgatctgattgacatgattcaacttgaattttaaagccctctcaaatttattaaaagtcatggctcacacctatatcgaaattttgatgatttcaagtccaaaattgatcccaagacaagtgccattttttcaaatctatttcaagtctgtccaatctgatgcaccacctccagtttgcccaataggcataaatgagctcgttgctaaggttgtttagccccgcaaaaaaggtggccaatgaagagcctttggtggactcgttggacaatgaatcacctagtatcatcctccatgaagatgcccctccacagattaagggtacaaatagtggggccttatcatacttgctttacccaatttttctcataattgactaagtcccttttttttgtgtgcatataggctgtttaaaatgcttctttgcatgatgaaaaggaaagaaaaaggtacctttgttaagctatttttagcctatgtttcgggtcacaattatgttcgctttt

SEQ ID NO: 122514 - DNA, 2620 bp, Cannabis sativa
accttgttaatataggtagtaccaatcaatccatttaagttctcttcaactatgtagtcctatacctacacaatctcagaatcatcacatacgaccttttatccaggtgatgtgggattgtatagttctctatcattcccttttggatcacggggctctgactatcacagtttgactcatgccccctttgatctcattttctcctttgtagtgaatagattaacccacataattgtcgccttcaattcacctaggattctaaacaatactcataaattgtcccacctttaataacactagatcactttgaaacaaaaagattcatttctctaaatcaattaggtggatgcctccattagttactcatgtcctatattctgcttgaaaataccaacaaatttaactcatattgttatttctctaatttatctgccatgtcagatgagttaccgctaaataacatacatgtacagtccattcagattattgatgtctctaattgaatgtacaatatataacatcaatatcaatcggaatagcaaatataatattgcccataaaattttaacctgattcgattgaaggaccgatactcgagtccacttgagtcatgaccggcacttgggtaggaaccataaactcttaattacgggtaggttcttttcagatggctcactactccatataaaaataagatttggctctacattggcccaaatggtgtcttctacatcttggacactcaagatatggttgttatttcttgttctcaccatgagcgctatcccggtcaccctggaactttttgttctatcccataattggtggtttatttagttttatttccttcctgattttcttgtaagtggttccatatgtttcaccatatccagtggcataacaagaagtgttagtggtacaggaatagacacaagacgagcatgttgttctttcaggtctcagatctgttcaccttgttgtctaatcgtatcttgcatagtagcaattacttgttcccagtgtttaggtggtagaggattctcttaccatccatcccgagcccaaacagctcgctagtcagactgttcgattgtcctggttgcataacttatcacacctgtagtccacatcttctaaccatttagaactcaaacaaacattaatatcaatatgcgtatgccatgcacatattcttattataatcatcactatgctacttttcccaacatactttataatagtctaggtaggtaatccaatagcaaataatataaacacttactataccatgagttgacttgttttcacagcaaatgtacatatttgacaagtcttcaggaccattaaaaccatagttgctctgataccatgttataacaccctaatctatagggacgctatgtgtgtaattttataaattaatttagtactaatagattaattaattatgaaaatttatgataatatttaaaacttcactaaaataaaacactaaaaaccagcatcattatgatactcaaattgtgttatggggatccctatcataaattttttataaaaagactatataaaatgataagtcaaaatacaaagcagattcagtccaaaacaactcatggcgactcaatacacaatccaataaggtcgatatgtatattactggaaaagattgtcacctcatggctgctctaatttttccttgcccttacctacaccgcaaagcaaccgtaagtcacaaagactcaacaagaaaagtaaccaaggagagtacatgaaataactaattatccatctcactattataaaataattaaacaataacattcaagagtggataatataaccaacaatatgcttggaaataaaattaattatttatcatgttgcctaatcaggcaaacctgtatcataatctggtatcacacatactgtcgctgcatcacctaattagatgagcctgtgccataacttggcaccaatgtatcgcatcgcctaaccagacgagcctgtgccctaactaggcactaatgtattgcattacctatctagacgagcccatgctaaagcctagcactaaggtagtgcatcgcctaattagacaagctagtgtcatagcctaacactcacatgtcattgcttcccatgcctaaacaagcatcgtcgataggaatgcatcgcctaaacaaacgagttcgtgccatggcctgacactcacatgtcactaccgcccgtccctaaagaagcatcgccaacatgaagaaacttaacaatggttttagtttagagtcatgcctttatcgtggattcctcacaggaataaccctaatatcagtatccacatatcacatttcctactcaggaaaattagtcccatatcctgacattcatatattgccttacctaatcatgcaagctcatgtcatagtctggcattcatatatcgcattgcctaatcaggcaagcctatggtctagcttggcatccatatgctgcattgcctaatcagggaagctcatcccatagtctggtattcctatatagcattgcctaatcaagcaagcttatgccataacctagcatccatattgttgggttttgtgccctaaataaaacccattac

SEQ ID NO: 122515 - DNA, 751 bp, Cannabis sativa
ttttaatttttacttttattttaatatttttttagatatacccacttttatggatgatatgcacattagaccccttaagttatgtaaattatatgctagagttaagcaaagagtgaggatatattagacaatccactcaaaaaaaataagcacattttaataaaaaaaataatataaaaatatttttaattaataaatacaaaaaattgatatttttcaacttatcccaactaagttgggttggtgggtggagttatggaatccacagagaaaaaggtaaaagcctgcggagtatttaaggatacccatgtttgtgatttgattattgattagaaaaaatagaaacatacaaatgaatagtagcctttttcttctttcacttacgtatgggataggattttgaatttaatattacaaaaatttgaaaaagagaggttaaaccaaataaaaaatagataaatgggtataaaatattgggtggtggttcactcattctataatgcatttcttaaataggatgtattcatgtattatttggtcaaaataattttttagtttaatattttttttcatatttgtacattttatagttactagaaaaatgtactcatctgatgtgtcagcagtaagaactgagtcactgacccatcattttcatttctctgtgtcttacataatagcctaatgcaaatgcaacaacaactaatttaaatagacaaaagtatattaattaattaatacaaaaatagta

SEQ ID NO: 122516 - DNA, 1090 bp, Cannabis sativa
  modified_base (171)..(178): a, c, t, g, unknown or other
aaccttccctcatgcattaagaccatataaatagtgatcaagcttcactgtaaaagggatcaaaagaattgctttagagagagatctaagagaaacactcagagattatattgttagagatttgagagaggaaacattgtattatttattctcaagttaatacaatctaannnnnnnnggctattaccgaactaaaggggtcaaacctctttaaaacttagtgttgtttattgcttattggtttttcctctatttttattatatctctaattgcttcaaaattgactcattatcgttcactaaaagcgaggtcaacaggagactttgacaaaatatatgcttttctaaaagagaattggaacattgccagatgggttgctctcgaggttgttgtttttgaggtaagcgtgaaatttttcttcttattttgttgataatttacattccatgcataccacctacatggaataattggtgcttactatgtgtgtctctctttctcctattcacacttttcaatgtgagattaataaactacaattccaacaatatttgtaatttatctatttctctcattttctaaatttgataaactacttttttattgtatttgactctcattgtactcataattaattatagttacaataattgtctttgtggatattttttaattttcgaaatactcaatttatttttatctgtaaaattattagaattcggaaagaacaataaattcacgtgtttttggttcacaattttatattcttattttaatgttgtaggctttagcttcgattgcttacagctcttcccagtaagcttttggtatccttccagttagacttaactatttggaggtaattttaacattgtgctctgttttagaattctttttattttctgtttcttttgtaaactttacttgctttcaaacatttattatagtacattatatatatttatgcagtggcggacctagaatttgattggagggtggcgtaaatttttttcatatataaaaatattctaaaaaaataagtaaatataaagaaaaatacaattcaatatttcaattcccaactaaaaa

SEQ ID NO: 122517 - DNA, 1038 bp, Cannabis sativa
  modified_base (27)..(41): a, c, t, g, unknown or other
taggatgttaatcaaacatacttggtnnnnnnnnnnnnnnntggtaaaatatttccaacatataaaccattagattcatgatgccaaatgcattgatcctgttgagaagacaatgttaaagaaatgctctaaatattttctacattggaatcaagaaataaagtctttagaagaggataattctattgccgggaatctgtaatcaagttagagactttcatattccgagcaatacccttaaagactaatggattaaaatgagagaggccaggcaaggatccgtagcacaaacaatattatgtccatccctaacattccatcttaaaccctttgataacaatttcttaccccaaatgatcccttgccaagttagtgacaggtaagagccatgtccagcatccaagaacgatgagtttttgaagtatctaggcctaatgattcggctcaagatcgatgaagggttggagtaaatcctccaagcctgtttggctaataaatcctggttgaattgaacaaagcttttcaatcccaaaccacattcaaccttagatctgaaaagggctttccaagtcttccaatttatacccaaacctgaagaattcaaaccccaccaaaatttattcatcattacctcaatttgatagataagagattttgagagacaaaaacagctcattgcataattaggaatagattgagccacaactttaaagataatttctttgccaccaatagagaataattgctcttgctaggctgaaagaagtttccatagtttttctttaatctctccaaataaaacttttttgtctcttcctgaataagatggaagacaaaggtaacgttcatgacaagggtagattggcataagcagaagctgttgctggctaacttgaatcgatggtaatgtgtttggtgagaaagacaaaatagacttctccaaattcaattttttaaggggagacaattattaaggcctgtccccgggccctttgtattatatattattttttttttacctgcccttagggccaggat

SEQ ID NO: 122518 - DNA, 935 bp, Cannabis sativa
gatgccattaagatggtaactgatggttacatgagatcagctatagattattttgaagtaacaagagcaaggccttcattggcatcaacactcttgatcacaacctggtctaggctctcatttcactccacagatttcgggtggggagagcctgttttatcaggtccagtggctctaccagagaaagaagtgatcttattcctttcacatgggaaagagaggaaaagcattaatgttcttttaggcctaccagctccagccatgaacacattccaagaactcatgctgttctagaaaaacaatataaatataatcctcactgcttttacttctgaattactatatatttatattctgggactgttgttgttgttgttgttttaggataataaaagataaaaggtttgcagaactcagtatgcttaaattaagaaaattggtcaaaatagtgtgtttggatttcaatgattctgtcttaatgtttaaactagaagaaactattcatttttatttaattgttattattattaattattatttttttgtctgagttctctgtgagaatgagtcttgttctgtgtaatacattgaaatagtatttgattcatttgaattaatgcagaaaggcatttgattgttgttttcttcttcttctttttaataattgtttattgctaatattcacaatgaaaacattaaaaagtgctctatttgatcatatttctcatttttaacaaaagaaaaagaattatagcatgaaaagctttgggttctcagtttacttttgagagctctaaacaacgtttcatgatatccataatccaaaatatcacatcctcaacatttccataaaaaaaaaagaagttaattaggatctttgcttttattttcacatgtattaaattatactctctgaattttttagtaagtttgaa

SEQ ID NO: 122519 - DNA, 760 bp, Cannabis sativa
tatatatatatatatgcacttgaaactaataaaattaaacaatactaaaatgttatatatgaggcatactttttttccttaataaatgtgtataatatttaactttttttttaaaaaactcaatataatatttaactagatcatattttatggacacaaatcattaaacttaaattaatttgaccttagtggcatatggcacatgggtttggatcgtaaattattaactagggttatgtgttattactagtttgcagtatagtacttgtgaatatgatgatactgatgaaagttaatggataaacaattgaaaaggacatacgtggcactcgagtacttatcatcatagcaaggcgccaagtgtatttggtacatgtgccgagcatctaatggtagcatttctaagactgttaaaaatctacttattattaaaaaatataatattttatttttcttcacatttttatttttaaaaatattttaatgtaaaaatattataattataatttcacattattatttaatataaatttaaatttttaactacaataattctttagtttcaattaatattaaaaaatataaatagtattaatgttactgcataatatagtaaatttttagaatagtttcattttctcttcaataatatcattttaatattttgaaatttttacacaaaaaattcaatttacacaatttattacaaaaaaacccctacacgcttacatcatcatttttatctttcttctttctttta

SEQ ID NO: 122520 - DNA, 1287 bp, Cannabis sativa
aaatggttttaaacggactagctagtgtgacgtctcgggaaatcggggtgttacatgttgttcccaatatcatatgctccaggcctaattgtcctgacatgtacaatctttatccgctcgctctcatgactgctcagctttagctttgccattacctatacatgcaaacaacatctgtgagtcgacaaatttagtaagaaaagcataatcataatcataaatataactcgagttataattaggcgcccacacacccaactgtaatcatatcctcacaccctaggtagtactgagtctagaacgttcatacgataatagtatcgaccataatattagtttatactcggtactctagtcatactctagtcgtactgatgtgacagtatcgattagtatttgagccaagcatacatctatctgtatccaatacaactctacgtatattgatactgctatcgatgtaatctaacaagcttaataaacatgtacggtaaacatgtaaacacatatgcatataattatactaatcttacctcgtttcttaattcaggtgtactgatcaacttgagtaaaaaagctactcgatgacttacaggcccccaaatcacaatatttgtaaaactgatgagtgacgcgctaaatcacttttcgaggacttaaaataaaagctaaaaatttccctatcgaagaataacatgaaaatactctaaaaatcccgaaaacatgaaaaattagggtgcccataaatgccccaaccgttagaccaattcctaatcgaaaaattggttatgtgagtgtctgcctggggatgaaccgtaagaccagttcctccaggtccaactaaactggtcgatcggttcagtgcaagaaacacaaaaacactcctaaacaaaataaatcgactccaaacgtatctaaactttccaaacctccttttatggccacaataaacctaaatcaagcaatagaactgaatacaacaacgacaaaccaaaatcaccatgagagagaaaattttgagctctaaagttcaaactttactcaaacataacaacattcaaattaactccaaactagctcaaataacttataattaacctcagaaatcatgaccaaacttaaattacacctacagtaacctaatctcgaaaattgcatgaaacacaagctttaaatccttaaaaactcaagagtaagagagaagagcttgcttaccttaaatgggaacatagagatgcaatcaaactttgctaaatcaccaagagaggatgtaacgccctaatgcta

SEQ ID NO: 122521 - DNA, 1308 bp, Cannabis sativa
  modified_base (43)..(64): a, c, t, g, unknown or other
ttggcaatgggaggagtagccctttcatcttatatatcacaannnnnnnnnnnnnnnnnnnnnngtgggactaactctaatatatatgaaaaaatatttgcaagtgttgaaaataaaaatatgttttaaccgataaataaaagtaaaagtgatgtcattcattgctttaagtacgtacgtaataagtgtggattctttgttcaacaccacaaacacaaatcatagctttttaataaaataaagcattttgaatggttaaggatcgactttgcaaaagtaaaataagatccaaattattaaacatatcaatggtacactttcaatttgtatgaaaaaaaaaaaaaatcatacgcgagaaatctaataaaaaaaaatgatttcttttttttttatttgagtaaataatttcttttttttttataacttaagagatgtgtgagatgaaagtcgcatgcacggtattgaaagagagaaagaaatgaaaaattctttaatttgactctaattctctcattttacttattatttttctttatgttactttaaaaataattattttagccatttgaaattttgatattctttttatttttcacaaacgaatgacaatttcttttgaaaagaaaaattgaattgaagacattgacttatacttattcaaaaactaagaatcattaattacattgaaatttgactccatgtagtagttggctaattaataataatatacttggcatggatatatttatagataagattggataaatataatattatattgtgtttggtgttatacacatgaaatgattttaaataataaatatttataatttaataattttgatttattttaatttttaaaatattaaaaatactaattaatattttttaaatgttacatttgtatatttaattttattttgataaatatacttaatattttcaaggtgttaaattatagaaaaaagttaaagtaattgattacccctctcgttaagggtacttggttacttttacttaatttttctaaaattttcatttttttttcaataaaatattttgttaagaaaaaaaccatatttttacatagaaaatattataaaacttataaaatttgtaattttctcaaataaattattttaaaatttcatttcacttttatattgaattttttcaaagaatgttagtcatgaacccaaaatttatgttggaggtatataataggggaattatctcatatactattttttaacttttttttttttaaatttacggtttgagtttcttcggtagtttctccggtgattt

SEQ ID NO: 122522 - DNA, 1575 bp, Cannabis sativa
  modified_base (170)..(170): a, c, t, g, unknown or other
ttattatttgttattattatattttgctcataaataaatgaaataattaataataattaagtgtattaaatgaggaggaagatagtgctttgtattttattcttgcaattggaaaaataaaataaattaaaaaaaatttaaatttatcaacttttatttatttatttatnatttttttaaaaaatatatgtaaaatattattcttattcaaaataaaaattaaagataacaattttaatttttaaaagtaataatgcgcccatcatgtgaaaaatatatgcaaaaacttattcttaaatttatataaaaaataattaatatatactaattttttttgaaagttatagaaagataaaacaaaagattggatacccaaatatataaataaaatatatttatataagaaacatttttttattttataattatttgtcatataattttattttgttatttacaagtcatcgcaatattagctattggtacatatatacaaatacaagcgtaaaaaatatcagaagttaactgttattgataaaaagataaattaattattttaatacttataaaatataaaatattatttatttcatttactaaatttaactaaaattatatacatgctttagtacaagaaaataaaatataagttacaatttttaaatcttatccatactttgaaaaaaacattaaatatgtacatcattaatatacatgttactaaagtacatgaccactttaaatataaagactatccatattaatggataattacctctacaacaaaaatagaaaaacttacaaaaaataaaaactaacaatctgagtacaaaataaacaattttaatgaattgaacccctacacatcttctaaagaaaaaagaggcaatttacttttaatatagtaataatatttatcctctatgcacattccttatttaattttaaaatattttaattttaaaaaaatcaaatatattaacgccgtcacaatacaagtgaaaccaccaaaagatgtaacaaaaacatatgaaataaaaagaatctaaaaaaatatatatgaattataagtggtaaaaaaaaataattaggtaaatcaaatttccacttctattaaaataaattaaagatccttaattaattatgttatcttaactaatcaaatatttctaaattttagtttcaagccaatttgtttaatcatgcggagtcgatttgttaatgaagaagcccaaaaagtatcttacatgatcgatgaaaaaccaatcataaaacaaatatatatgaaatcattcaaaagtaattactacaatacactacaccattaattttattaccaaatattttaaatagaaaaaataactaaaaaaactaaaacaaaaaaaacataaaacgtgccttgcacgtagttgccgcctagtattaataaaagaatgaatcattttttatgttgtgtagaaaaataatttcttagttacttctaagtttcactttcggtatcataacaactaaatagtgacttttaattatggtgacgatgagaaaatacacatttttcttacatgtcaaaatgac

SEQ ID NO: 122523 - DNA, 833 bp, Cannabis sativa
tcatcatcaaatttttaatagaatggaccttttgttaattttttataaaaagggacatttattaacttaattgttagattaagagtcattttgcatcttggcccatttaacaacctgccttcattagctaatctatttttttcctcagctacctatctaataaatatcctgtgattatcttattattacaatatttgtttctttacataactatatacatacaactcagaagaataaaatactattcaacttttcgagaatattaatttcataaacttaatatattattactatactcttaaaaatgatagctaagcatgccacttgacaatgaagaaaatagaaatgagcaaatttaactactaagaaatagcactcaaatctatcagaaaccaacaagaaaggaaataaatgaggaaaaacgaattgcatataagaaaaaactcaatgaaatagaggttgctggttacaaaattggtgcgataatatcctcgaatagtacaaattacacaataaatataaactaacataactcttagctgtctctgctaaattgatatcctcatttttagataagacaccaataactaataattgttactaaaatatgagtaacatatttgaaattggttaattatgtatactcttatctcttactcaatctttaggtatttataaaaattattagcctaataaataaatccttgtaggatctacttttttgcgacaagaatagagcagtccttttaatggaccccaaagacacatcagtatccttatacactcactcgagatgatataccaaatgaaccaacattattaccacaacattc

SEQ ID NO: 122524 - DNA, 864 bp, Cannabis sativa
aattaacatgcttgcttttctattcatcctttccttttaaaaaatttggcacccctgcctgcagcatgttttcaagtgaaacctgctaataacttatatatttttctactttagaaaattttgttacgtgtttgtttgttttatgtgctacattttcaaaagagttaatcagatcttatgactgtttcaggatatgtatgactttatggctttggaccgaccagcaacccctcttatagatcgtggaatagcattacacaaaatgattaggcttattactatgggattgggtggagaaggatacctaaatttcatggggaatgaatttggacatcctggtaatcttcggcctaatatgtgatataagtatatgtaatatatatttatataaatataatgttctattgctttgtcttcagtgtccttaattgtttgtactacctttcaaaacttacacaagaggctatggtattctttgttgtttcagagtggatagattttccaagggctgatcagcatcttcctgatggttcaatagttcctggaaatggttttagctatgacaaatgtcggcgtaggtttgatcttgtaagctcctatcttagcttattatggtattgttatctactaggagtgaagtgtgtgcaaacccgtgtactagttcttatattatgataagttgcaacagaaaacactataaatgttgctatcgcttattgtttcattgttgttatgcatacgtagggtgatgcagattatttgagatatcgaggaatgcaagaatttgatcgggcaatgcagcatcttgaagatgcctatggcgtaagttctacttgagcttgcctttctagctgaatttcagtt

SEQ ID NO: 122525 - DNA, 1215 bp, Cannabis sativa
  modified_base (1159)..(1181): a, c, t, g, unknown or other
aaataattaattaaaaattataaatagtctccgggaaaattagtcattaagtataaatagaaaaggaaaaatagttgtaccacacactaattagagtcttttaccaactaacattaccgagagctactatatatgagtttgatcgacaacgatctataaaccgattggatcgatttgatagtttaactcaacacacataatcttaattataatgcaattttcgacaaagacctcctccgcagccaaggcagctaagttgacaaagaaggcctcttctattgtgaatacaaccgaagggatgacgaagacctctatggttaagaccaaggaaataatagtgatcgcagctacagtcactccaagtttagcctaagacggggaagacatatcccatcttggatatattaatttaagagttggtcgcatcttcaatcgacagaataaggacctgcgactgctacaacactttgttaacaatcaccaagtagacctcttccactgtaaagctgaggagatgaagagggcctcctctattgtaaagtcgatgagttgataaagatcttctttgttgtaaagttgaggagatgatcaagacctcctacactgtaaagctaaggagttgacgagggcctcatccgttgtgaagctgaggagatgatccagactaccttcgctgtaagcacaacctaaagaatgctaaatatctctaaggatgcaacgtaagagggaacaaagactacatatatattacttaaacaaccagtgtaatgagagaaccaatgctaattaagaaaatagctaagaatcaaagttggcgtggacatgatttcacagtatctcaaattaaagagaatcactcagaaattttgaatttcctattcaaaagggaatggaattcgaaatcctagtcctatacttgaagaacagaacataatcacctaagattattaaaatttatgcccacctagtagtttcatatgaaacgagcttagttcatgtcatcaagtcaacctcactcaggtatgaagttgacttggggggggaggaggcaaatgttaacccaaaaactgatcccactgatgtgaacatcaatatttgacttgtggaaagaaggaaaataatcttggagagttgatcaaaattactattttacccttcnnnnnnnnnnnnnnnnnnnnnnntaccattaattcaatgtgaacagttaatttataa

SEQ ID NO: 122526 - DNA, 812 bp, Cannabis sativa
gaaaaaattactaattaatgaaaattttatttgagtactagtgtgagtagtgacttgtatgcaaatattgactattaattttgtaaacgacaatattatatataatgaatattaatgtcgtatatgtcttacattttcagagttttcagtaatcaaattttgtggtgggtctacttcactacaattcctcaacaacaaccatttattttctatctcatgcattaaataatatcatttattttctatctaaactttcagtttcagtgtctgtctacatatacaataatactaattaattatatatatatgtgaaaagtaatagtatatattttgaactacaaaaaatattacatacatggatattatttttaattataatatttaatgtcaatttagaaagatttaattggttagaaaaattatctttggtgctcatagaatattacatgctaaagcttcaatgttgtttaggaaaataagaaaaaaaatgtatataaatatgggttatttttcaaaattgaaaaaaagttaaaaaaaaaaagaagaaagaaaatatgaaaaatgtggattagtagagattttacttacaaaaattagttttgtaatatgtgttatatattttacatatctactttgaaattaaagaacaaaaaatgttggtactttttcttcaagttgtcttgtacagggccggcccaatcaattgaatcttgggcctttaaatttcaattagcaatttctaagaaaaacactattgttttaaatatatatattaggggtgttcattaaaccgcccaaactgctcaaaccgc

SEQ ID NO: 122527 - DNA, 1014 bp, Cannabis sativa
ttaaattaatattacgtacgtggaccactaaaaatttggcatgtgtacacacaatccaccgtgatatttaactgtactttttggacggatgggtaccgagcaaaatggaatgagagtttatatagttttaccccccaaaaattaatttttgtagttaaatgttacaaaacataaaattcaagtagtttagccgtcaatattcctactttaattaaagcacactcatcaactttatctcaataattattagtgttttgtgtagagaaacactatttaaaaaaagttttaacttaaattttgctcatttgatggaatattagttttactacatatttttttttctatatattaatttgaagaataagtttacctcaattgatgtgagtggtcttagttttatgtaagtactctctatatataatattcatgctgtagtagtctaattctatagttcaatattattatatatcattcattttttttataatgtctcttacttctccttatctcatatttccttatatcttcttattatttaaatgtattaccaattaatataaaaatgtaatatttaaataataaaagtttgaaatgtatatatatttttttttacatttactttaaaagataaagtaggaaatatacttcttataaatagttccctagacttatgatgccttgctacaataatttttttttttttttgaacaatgccttgctacaataatgagtggttagtttgttcaatatttagggtataaccatctacttggcttctccaaatacaacgagagatgatactacgttggcaagtgtcaatttgattaataaatataatttattgaaaacactaacatattactaaaaatatctaaaatcaatgtatataatatatatagaaaaagtatcatacggtgacaccgcattttaaaattactcaaaaattacttttttcttatttccttaattctctcaattttaatattttactaaagcataaatctacaaattgat

SEQ ID NO: 122528 - DNA, 3206 bp, Cannabis sativa
  modified_base (2923)..(2928): a, c, t, g, unknown or other
tttttgtaaaaagttacttaatttagtatattcctaaaaaaatccctttaatgaaatggtaaggcttttttgagttaaatcatttttccctattggcaattaacttatcgtttccaaattctttagggataaaatgaaaacggtatacgagaagaggctctcactagcatagggatcgacgactttgatgccttatctttcaatattaatttatcttttttctttgtaatatgttttgtgatataataaaggtgattatttcactatttattttaataaaattaataataatagtcttgtagttgttggactaagaaaacgtatagttctcataaatgttgtttatctacttcactaagccaaaagtactttatagaagataggtgtatagttattctactaatatatttataataaaattgaatgaaatgataatttattatttattatgattttaattaggatttttgcttttcaaactatgatatatgtattattttaccctaaacttttaatgttattttaaatggtccttgaactattcaaggtatcataaattagtcattctgtcaagttttgtcatacgtgacaaacaaaataatgacatgactacttaaccaatttctacatcagtaccacgtataaaattatgcacttttaaaaattgattaaactaaaaatcaataaataatttgtacaaaaaaatcaataaataattaagaaaattacgtaaacttaaattaaaaaataaattacgtttttaaattaattagagtaacgttatcatgatattgacataataattagctaaataatcattaatttatttatcatgtgtaataaagcttaaccaaaaaatcaatttacaaccctataaatattttaagtaccatttttaaccagcctactaataattatacatcataaactaactaactcatctaaagttaatgaaacgaatacatttttatttaaataactttttttttttgaaacaataacctttccatcagttttgttttgtttttattatttgatttcatggtttattattaaaaaaagaaaaagaaaaggaaacactcaaaacggtaacttggtttggagttatgcgatgagttgagttatatatatttaatgatatgatattgggttgagttgtaggggtgtgaggggcccatgtgtggacaatattggttcaagggctcgctggcagtcatgtggagctttcaccatactagaacgtttgcaacactttcttctttttttttccttcaatttcaacatattcaaaaaatttgtttttttttatagatatagaaaaaaattgtgagagattttctttttccttgtacattatagttatatattaagtattttaacaaattataaataatttattgtctcacaaaataaggtttaaattttcaattgcatgtttatttgttttattttacacacatgtaataattgatttaaattttattttcaacacaaagtattcataatttattgacaatagatatattatctattacaactccaatatacaatgtgatataagaaaatgagacataatttcttaaagtacgaaaaattaaataatttatatatagtaaaagcaaaagtctcaatcaaaaatgttaaaaggatccgttaaaatactaagaactataagatatgatatgttgctattggtgcaatttaatattggtgttacaaattttagtttaataaataatataaaaaattactaactcctttatatgaggagtgttaccatcaatctcttattacaacctcttagtcaacctccatacttcaaagcacatgttgaaatacttttattcaatttttttataaaggtgttcgttatagttacaatattattcctgtaaattttaaaattctttgaatagtttactgtgcccaaaataggtttgaagttttttgaacacacatggtagactgaaatatcagtaaccctgttttggtactataaactattcaaaatgtttcaaaaatttacaggaatgatattgtaactataacgaatatcaatatgaaaaaaaatattctgacatgtgatttacaagttgtaataggaggttgtaattagcactcctctacacgatattgatatagtattagacacctcaagacataactataaatatgtgtgggctgtgctatcccgacccatattttttaagccttttagagtacggtatgtgccatgccggaccataaaataatatgggttgtgtcgtgtcgtgccataaaaaaatatggacagtgccatgtcgtgtaataattttatagctagggtaggcccaacacaacctgaaagtccagtaatttcatgtcgtgtttggattcgtgtcgtgctttattcgaacaaactcatatttcttaaatagaccaacatattttcttatacgggttcaaattagtgctctatatatttgtaattctattataattaatgagctacatactaaaatatatgtgtattttataattttaattacttttatatattttttcaataataattacacacaatcatataaaaaaaataattataattattataatttgaatattatttttttttattttaattgataaataaacatttatcattgtcattattattaaattattgggctttttaatgtatcatgttttcgagctaatttattcgtgtttatgtgtcgtgttttcaaacttgtcgtaccgtgtcatgcttaagcttatatttttttgtatcgtattgtgtagtacctaaatacatattttttcgtgcctctcatattcgtgttagaatttggggataagatgaatgatgttccatctcaaaaccaattcgctatggaggagtaacacattcatcttatgtatcacaatttatttccacacattnnnnnngtgggactaactctaatacaccctactcatgtttgggcctggaaagtgtgggtataacgaatgacctttaagaaactacatgaccggacgtgacatttgaaagaatcccacaaggccaaatattgggaaatttgtgggtatacacgtcgggaaatttgtagattttgaaataggtcaaagaccccaatattgaaaactgtcacacattagccgaaatatcccaaattgaagttaacagggagacaacagaagtatttgtttggaccggcagcactttg

SEQ ID NO: 122529 - DNA, 1387 bp, Cannabis sativa
ctctctctctctctctctcaatgtcattgttaacccctaattatgtccccagatttttcatgtgtcatgtttgttattcttccagtttttagtctctctctttgtcactattaaccccctattcatacatgtaatttttttatatttagaatataactttaaattcttcattgtagtaaaattagttaaattaaagaatgtttcaaaatatgaaaatgaaattactaaattactagttagtaactaattattgtatactaaacataatttgtaactaactagtaaaaagacttactctaaattactaactatataataaccggcgctcctcacgcatccatgatttaaccatgacaaaaattaacaaaaaaaaatccaaacaaagaagtttaagaaaaacttaaatcatataatttttatcctaatcctacaaaagttttagtaacataacgactataattgaacattctcaaaaaaaattaaagctattaataacaacaacaaataatccaaaaataagataaaacaagtgatgatgacttagatgatttttaatgatcattccattttcgattaatgttttaatttgagttttgtgagtcaagtgtgttcttggataatagaattgagggctctaagtctaaaaacataattatctttacattagtttaagttttatgattctttggtatgtttgaattttatgtgatattttattcatccttaggtgttctaaaatattatttcaatttgtgagggttacacctcaaaggtctcgaggcttccgaaattaataactagtaactaattatagtatactaaattactaactatagtaactagtcataattctacaaaaaagtttggcagcataacgaatataattaaacatttttaaaaatttaaagctattaataatagtaaaacacaactgaaagttgtaacgtcaatttacaacctatgcctaaagttaccaacaaggcatggggtcgggtgcctaaggggagatcaacaatctacctgacactgttataacttttgctttgtctaaaaccatgaatgaaaaaatgcctaccaagagctctagaaaagagtatagccaagggtaatgaagtccagcccaaagtgtggaggcagatttagatccttactttggggatcctgtagaaagcttaggactgatagaggagttagaagaagtagaggtccatcctaccctttcgactaggaaactaaagatctggaaaggtttaggacctagaaaaaaatatgcattgataaaacttctaaggggaaatattgatatctttgcctagtcacatgaagacattgtggggatcgatccatcagtaatttctcatgccctaaactgttgggttttatgccc

SEQ ID NO: 122530 - DNA, 2114 bp, Cannabis sativa
caacaaccaatttgactgttgaacttaaagagcttcatgagttctgggatcaactcgtaaggaggctgccaaggctgcgagggatctttgctggctccaattacttgtaagcactgcgagaagcgctttgatgacggggtgttcatgtgctggaaggctaataattttgaaccccgtcttcctttttatcccaatcatgaggtttccttggctcgattttgggagaagaacaagaagttggatgttgttctggctgagcgcaggggtcccgtcttcctcctcgagttgattaattaaatccttctcttttctttttatattttactttttctcccctttttaagacaattttattttcgtacttattctattttttaggtaaggggatacttttatggcttggccctaagcctttatttattcatgttgtggacaacttatataagtttatgtactttattttcttcatattcggcctgtttttgcatgtatgttatgccttagtaccccctaagtgaaataaaaaaaaattttaggtcacttaggttaaacttgagtgggatatcacatatatttgtccgacacatgttatcttacagaatacaaactaacattactgaactcctaactattgatagtacttgcggaggtggtcagcattctaggctcgaggtactatggatccatccattctttttaacttataggtcgcggagcgtatttcatcttctatttcatatgggactttccaatatggcccaagtaaacccactcctggctcttgggtggctgggaagacccttcgtaggaccaggtccctaatggcgaacttcctatctttgacttttgaattgaagtattttgccacctttctttgataggctgtcatctgtatttaagattcctcccggagctcgtctatctgatccagcgcctcctgcaacaaggcttggtacgttgctggttcgtacgtggctcttctgtgggatggtatcagggtttctactggtaccatggcttcgcattcgtagactattgagaatggggagtgtccagttgtggttcttgtggtggtcttgtaggcccataatacccgtggcagttcctcaggccagttgttcttgtaggccaacaattttttctttagagtgacctttaatattttattaacgacttctgcctgcccatttgtttgtggccttgcaaccgcaaagaagcttttgatgactccgtgtcggtcacagaaatttgtgaattcgtcgcaatcaaattgccttccattggagccccatggagctcctgcatgatccgtctagcttcagggtccgacacacaccttaagtacgacatgctgagcccccttcgataaagatcattttccatcattaaatatcgatgagcctgatactgtagctttctggatatagccctttcttgggggagctctccttttgttatgtctttaatgatgaggtccgtccaattcgaattttggtcgttggtggccaccatctctttggttttgatgataggttctacatggtgcttgacatgtaccacccccagcttttctaattttctattcgaggccaacttggctaagcaatcaacctgagcgttcttttctcgcagaatttgctccactttatattctttaaactagtggagaaactccctaacaatttctacgtaagcggccattttctctccccgggtttggtactctcctgatacctggttgaccatcagctgtgagtcactgtaaacctctactttcttagctcctacaattttcgccaatctcagccctacgattaaggcttcatatttggcttcattgttggaggctgggaacgtgaaccgtagagcgactttgagttgtaacccatctagcaaaatcattgctattccggcaccaacttcattttcattggacaccccatcaaatatactttccatgctagtgttttttgagttagcatactgacattggcttccatctcgttacactctacgatgaagtccaccagtgcctggccttttatcgagatgtgtggaacatattgtatgtcaaattggcctaactccatggcccatttgaggagccttccgga

SEQ ID NO: 122531 - DNA, 1015 bp, Cannabis sativa
agatgtaaaatttgtgttaaatttcacataaaaaataaatttggactatatttgatccattatttataattcaatataaagtaaaacttcgaaaataatacaacaataattcaattaatatttaacaatgatatccaactaatattttacatttacgaaaaaaagtaaatattaaaggaattttgccactaaaaaataagagaattaaatgtataaaatcataatattaagagtttcgctgcaaataatcctaataaatttgcatcaccctcaactacaacaaagtacacataattaaatacataccaacactaaaacacacctaaattaatattataagccacccaattaaattattcttcatagcttgagatgctctagggcagagattccattgaggcctttcatatagtaatgtgtaacaaagtctttaacagatgtttctttgtaatgtggaggattttgttctgaaatcaactctttaagaggcccataaaccctagaactcatttcttgttgaccatatgttctgaaaaaacttgctattgatattcttggcccaacatttttggccaccactctatgagtcacacttatgaacttgtcattggaaatcagctgcataaattaatattatagctagggttaattaatatttgtttcaagggaataatatagcaaaggatttgattttataaatggaataaaattgtacaaaaaaacatgtattccatgcataaaaaatcaataaaaagactactcatcttaggtaaccagttaccttatattgtttttctaattttttaaaaaaattataaaaaaaatttccttaatttttttcaaaaaaatgatatttttgcaaaaaaaaaaaaagataaaaaccatacaaatgaaaattcctcacaaactagtttatattgactcaatcaatttgacctacatcacatttgtgtactcttagtaacaataatattaggctaattagtaattttttcccccgaactttgatatgtac

SEQ ID NO: 122532 - DNA, 1441 bp, Cannabis sativa
  modified_base (72)..(78): a, c, t, g, unknown or other
gaaaacagagttcctgatattctacgcgcattcaaaaaacttcaaacgtattttcggcactgtaaactattnnnnnnntttcaaaaatttacagggatgatgataagcataacgaacattcctgtgaaatttttttttaaaaaaaaaatatttcgccatatgtttttgggcgtagagattgagtaagaggttataacaggaaattgacagtagcactcttctattacaacctcttagtcaacctcctattaaatcatatataactatataaattactacctattacctattaatttttaatgaaatcttataattcttaacatgttatcaactaaacaataaaatatacttttcatttgtacaaaaaattactttatcaaaataaccaataatctcatgatgagtaagattattgaaagtttattatctttattatatattttgcattatgattatattattataaaatgaactttttgtttgatttatttattaataatatattttgtaaataaataaataaaattaaataagcttaaaagaaagagtaaaagaaatcacaaaatgcatgtatgcatataaatctaatactagctagttaggaaagaaaaatggttaagatcgaccgaatcaaattatttaaacatatatactccaataattaaattctcttataactattatattgtaattattattacaaatcaacttttatcgtatatgcaaggttttttttataaaaaaaaaaaacaaaattgtagatgcaagttaagtattagaacaaaaagattggttataagatcgaccagaatctagtctccaatatttatatgagtactcaaaacatcactatgatatataaggagcctaccagaatagcgttactgatcttttagtcacaatataagaataataatttataattaatcacaatttttttacaattaaattttgttgagactaaaaataattttttttttatagtatttggtggaacaatcaccaatcctttgccaattctttcacacttggcacaaccacattagggctttcaataacatgtccaatatgtcaacatttatatatagtcgtgatactaataaattattgtatttaaaatgtccccatagcactaagaatgcctttttaacccttgatattatttaatgtacgcccatgtgtactcaattaaaaatttgtacacctattaaaaattatataatagatatcctaaatcttttatctcactatattttattttaagaccaaaccattaaacatcgaaaaaaaaaaaaaaaattagcggctaaaccacttgaattttacgatttataacacttaatcacaacaaccgaatttttagcggctaaactacctaaaccctgattccgttttgctctgcacacttccgtctaaaaatcacagttaagtgccacagtgg

SEQ ID NO: 122533 - DNA, 873 bp, Cannabis sativa
  modified_base (368)..(368): a, c, t, g, unknown or other
ttttaaagattagttatgaaaacttgattgttaagcaaaaatgatgtttaacgatagcgttatgaaaacttaatatttcagccaaagataataatgatgctttgattttttaaaaaaaaattaaattaaattaaatagtaccatgaaaagttaaatttctaggcaattattatgatagtcccactaaaatataatttttgagacaaaaacgatgcaaaacgatagtttgcgatgaaatttaataaaaatttagtgaggcatattttttcatttggaccatacaagtattttttggaaaacttacaaaatattaaaatttaagttaacttttacaaaatacggtcacacggaatttttttcaaaaatantgtgtttttataaaacaatagtagaacacaaaacagaacaactaaaaacaacagtgaaataattaaaaaacaactgtagaacaatagtaaaaatttaatacagtatacagtatttttgtaaaaaacacattatatttgaaaaaaaaaattgcttcataataaaaaagtaaaaaattaaaaatttcaatatgtggtataaataatcttattttccttttttaaaaaaaaaattacacatttagaatgtgtagaaccttaatttagggtgtagaagaacaaatttatgagatttgtccatttgaggccataattaagatgttttttaatacttcattaatcaagatttaagggtttttttttgacttaaaactttaaggttttaagtactctagatttaaggttctacatagttgagacttacaatttgtattgtgtcaacattatgacgtgttatgattgagataaatacgaatataagggcacgtttggaacgccgtattaggtc

SEQ ID NO: 122534 - DNA, 529 bp, Cannabis sativa
tatattaataagtaaatttgattatattcaaatgagttttatttagggcataaaacccaacacaaggcatgaggcctccacctgcaacctccatcttatggatgtcatcttgtcccttaggaccacaattgtatcctagggcattagagcctataaatactcatttctcaaatatgagagggggattggaaaatcattataacacttgattccagaaaatgcaagcattcctctaccaccattgttgctctaaatatatgtttaagtttttgaattttcatattttcattctaggtcttgtgttaaagttttttgattttttggccttaagttagttgacgagttctcaccgtcaacagctaagtaattggtaattttaaatgttatttaatcgttacctccatcttgatgtgttgtccacttaacttagttctttgacacaaaaatgtgactcctagtctttaaattggtatatttatataagtagtactataaatgctctatgtaccataaatttgttttttttttt

SEQ ID NO: 122535 - DNA, 944 bp, Cannabis sativa
gtcaaaaattcagtttttgtggttaagtgttataaaccgtaaagttcaggtggtttagccgcaaataacccttttttaaatgagggatttgaaaatgttccttagacatcggggtttggcgggggttctcctccatctggtagtcagtcggaatggtgggtctcctccgtgcggttgtgatggtggaatggtgggtgggtgtgggtcgaaatggtgatggtgatgtgggcggattggggttgcgatgggaagtcgggcgaaaaggcagagagaggttagagggaaggaaagagaaacagtttgggattttgagaggggtatttttggggtttatgtaaaatggtcctattttaacaattacccatactttttgttttcctaaccaattatgccttaaaacatgcataaaaaattaaattttcctatttaattttgaataattttattgcctaactatactatttttttagcatataggagaattctttaatcaattattttaaatattatgtatgttgtagttatttataagaatcacctttcaatttttaaaacatctaaataatttatagtataaaaatatggtttaaatatttattacatgtgactattttttatacgcttgataaataattatttaaatttcatttcaaatattataaactattcattttttctttaaaagaaaataatagattagatccaaaacaatatacacaattacataaaaaataaaaaatgaaataaaaaaatattcctagatattgagaaaaagaatgtatataaaaacaaccctagtttggggtgtaatgtatacttatcctttaaatatttaaggtgcttaatagtctcttctgttataaaataatatagaataatataaaatagataagaagaaaaaaagaagaagaagaagaagatgatgatgaagagataaagagaaa

SEQ ID NO: 122536 - DNA, 1199 bp, Cannabis sativa
ggccaattatcaagcacaacaacctagaacttcctaggatgctttttgtggacactggtcgttatttagtttggttgtgttaggctaggtggctactagtcatatctgtgctatttttggtgacagtggtggggacagagaattaagtacgtagttggaagaagtcatattccaaatgttaattagctggccataagtaatggtaggtttaaggttttttctgatatgatagaagagaagttgggctcacataagaaaaggttgtagatatcaataagctaatgtcatctagatggaacctagctgtgtatgcatttttataactgatattatgtgctagaagtagatttcgatttgtctccacctcttcttcttccttctttggaaataagataattacgacaaatatatattctaaaacataattactacaaattaagatgtatgcttactttaatattattatttggattaagatttaattgttcatatttctagttttataatggtttcatttgacttagcttctataggtctttttaaaaaactatttttaaaattaaaataatttatataatttttgatttactcacaaattcaagtaatcccacctaccacacttttaccacatgaatggaaagaaccaatttgactaagttaagagcaatcaagttctcattgtgattacaaaaaaagaacttaaactattacaaatattgtagatatcttaaaattctgttctgaattcagcaaagacaagttttattttattaagaagaatagcaactctttggcaattagtctcatccttaagttttagccaagtttatatcacaattggagaccagtaagaatagacattgcttcggccaccagagaagaaaaagcaccagttttcagtgtggaaacagaggccaaacaatgtctaataagatggtcataaatcatagccccgtagccaagcttcctgtcggactcacatatactagcatcgatgttgagtttgactcgtccttcaaatggcaaagaccatcgtgacaccattgtaagagcaatagtctgggatgaacatgagaatcgcgcaaagacttctgggttgcaactttaaaattctgagcaaacaacaaggccgacttgataactcccttgacatcaaggtattagaaaattaataatctcaagatacaaatttttatata

SEQ ID NO: 122537 - DNA, 1530 bp, Cannabis sativa
catatttcaatattgaggaaatatatttcaaacctgactcatgtcttgagttacgaagcccttgaactacaatcagacttatcctatgaggaacaaccagttcagaccctcgataggaaagaagaagttcttcgaaacaagaccatagctttggtcaaagtgctctagaagaacagcaaggtagaggaagccacctgggagttagagtctagcatgagaactcaatatccagagctatttaggttaaatttcggggacaaaatccttttaacgggggaatagttgtaatgaccgcatgttagaatatggattagtaaaggtaattagcattaattattgacttttttataattatgcatgattttattatattgtggatcccattattagaaatgggcattataatttttcgatctgaagattttattaaactctagaagtattatttatgctatatatgaattatgtaaatttttataatttttgctcggcgacggcaaacaatgcgatggatggtcgttagagtcaaatggataagtctggaacctcattcttagcgggacaaacataaggaatatttttaataccgagtttgagctgggttatggcttttgaccattttacccgtaggcttagtattacttaagttgtaagtagaagggtattatggtaattttcttaaggggattatgtggctttttctaagggtggaaactagccatatttattttttcagttagatattgatgtagagttaatcaatttgaagaaaaatcaaatattcaaagaaatacaaaatttctctctcttcgaaccaagcttcgaccaaggggtttgctgctgagttcttcattttagtaggattcaagggcctttttttaagtgaaatagtttgtattagcttgaggtaaccctaaacactctaactctaagatttcttgtgttgtaagtttgatcttaatgtgtagttttatgagtttgtggctgttagggttaggttagtttgtggttcagtttctaagttcaatttgagatgagattgagttcttgatgctggttttgatgagttttgtggtgaatgaacaagtttgagtttgaaaactcaaacttgagtcattaatggcatgtttggattctatgtgtatttttgggttttattgcttggaatatgttgttggatattgttatacgtgttcttgaaagtttggcttggtttggatacgttttgagcaagatttgaactatgtggggaaacctggtgcaaactagtgtcgtgtaaaactggttagccggattgagggcaggtttctcgtatcgttcaatacatcaattcgtgttatttttggagccttggttagttaatcccttgaaattaagggtattgttctattagttgtcaatagtagaacccttagttgggaggggggtttaagttttccagattagggttttggcgtgttatttacccgtttgtgtaatgtgactagggcatccattcagcacgaagttttctgttcaggtcggccaact

SEQ ID NO: 122538 - DNA, 1729 bp, Cannabis sativa
caaaaagtaataaagctagaattgactatgtgggccggggtctgggctttgaaggaatgtttactgttgaagcccaaggtagaagtggtggtcttgctttattatggaaaaatgaaaaagatgggaaaataattggtttttcacaaaaccatattgactttatggtagaagttgaaggcagcccaaagtggagacttacaggagtttatggtgaacctcaaagacatcaaagaatggatacttggaatctcttaaggtccctattcaataattcaagggatccgtggtgtgttgtaggagatttaaacaatgtactaagccaaagtgacaaacgtggaggacaaccttatcccaattggctcatctccggattcgaacaagctattatggagtgcgacttagttgatatggaattggttgggtatccttacacttgggaaaaagggaggggaacaactcgttggattgaagtccgtttggatagagcacttgtttcttcttcgtggattcaaatctttacacaagctcgacttttaaaccttgaagtttctccttcggatcactcgccaatttatttagagttctttactccggatagtttcattcctaataggcgttttcgttttgaaaatgcttggttaaaggagccaatgtgtttggagattgtgaaggattgttggaatgcctctagtgttgtttcggtagcagagaagatttcttgctgtgcggataagttggccatttggggaaaaaatgtaactggtaactttaaactccgaatcaagaactgtcgtgatgaactgaagagcttgaagaacaagagagatcaactctcggtacagaggtataatgagaaaaaaaaggagttgtttttggtgttggatcaaaaggaagctttttggaaacagagggcgaagcaattctggttgaaggaaggcgatcagaacagtaaatacttccatagagcggctagcaaccgtcgaagcttcaaccaaatttcgaagctcatggattctaatggattatggaaagattgggagaacggcttagaggatgtaattgtggactatttctcttctctgttcagtgcttcgcttgtggatagcgacatggtggtgcaatgcatccaaaggaaggtgacatctcagattaatgaagaattacatcagccagttgttgctgaggaagtgaagaaagctattttcagtatgcatccagataagagtcctggcccagacggtatgacaccggcgttctatcaaaagtgttgggagatcattcaaagtgatattgtagccgtggttcaaaaatttgttacttcaggggagtttgatttggcttgtggtgaggcaaatgttgtgttaattccgaaaaagaagattcctgaaagcatggtggatctgagacctattgctctttgtaatgttctttataagatcattactaaagtaatggccaataggatgaagccgtatatggaccaaattgtttcggaagcccaaagtgcgtttattccgggaagactcataactgataatatcatggtttcctttgaagtgctacattatttgaaaaggaaaagaaagggcaaggatgggtatatggctttaaaactggatctcagcaaggcctatgatcgcattgagtggagtttcttggattcggttcttaggaagattggcttctcggaccattggagctctttggtgatgaagtgtgttagttcggc

SEQ ID NO: 122539 - DNA, 3647 bp, Cannabis sativa
aagagtcatcaagaagaagtattgcaaaggatgagtgtgcctattgtcattagaaagggcactagaagaaagattatccaaacaaggacaagtcaaatgaaaatgttgcacagaaggctgacatcgaagaagatttagcctttttagtttcttcaagtgtgtatacagacagatgaattattgattccgaatgttcttatcatatgtgtccaaacatacatttgttcttgatttttgaagaacttgatggaggagttttcctaatggaaaattacaatgtctgtcaaacaaaagggattggaacaatacgatagaagatgcacgatggtacaattagaagacttataaatgtgaggtacattcctaatttaaagaaaaaccttatttctataagtgttcttgattctaatggttacatgataacattagaagatggaaacttgaaagttatacgaggtacatttgtagagatgaaaggtacttggaaggcaaatttacatttcctagataggggtactgttataggtagagcatcttgctctaacagttctaaagaaaagacatatgattcttcccgcctttgtcacatgcgcttatggcatgctagggagaaggctttgcaaggcttagtgaagaaaggtttactgaaaggtgccaagaccgaaaagtttgatttctgcgagtattgtgtgctgggaaagcaaacaagggtcaagttcggcattgttattcattgcaccaagagaactctggattatatctacacagacgtttaaggaccttccaagaacgcttcacttggaggtaaaaaatggtttgtgacatttactgataatttctctagatatgtttgggtatacaccatgcgacacaaagatgaagttctgaatgtctttcataaatggaagaaaattattgagacttaaacaggcaggaagatcaagaggcttagttctaacaatggtgctgaataaaaagcagatactttcttacaagtgtgtcaagaagaatggataatcagacattttttagtacgctctacgccaaaggaaaagcatttttgcagaggctttgtcatatgcaacccatatcgtcaatagactccctacgactgcattagatggaaaaatacttaaagaggtatggtctagaaaacctatttttgattatgatattccttatgaatatttggatgtcctgcatatttccatgtcaaagaatccaacctggatcctagagcaaagaaagctattctcttgggttttaatgaaggattcaaaggttttcaacttttatgtggtgaatcaaagaagattatcttaagccaagatgtcacatttgacgagtctgttatactaagatagactaccttacagaaagagaattaagtgccaaatactatttctaaggtggagcttgtgatactgaaagattcaaaaaagactattccaattgaagatcatggtgaagatgaaattgatgaccaagaagagatcttagttgaggtggaggttccattagcatcacctttagtcaatcaacaatcaaaatctattgccactactcaacgaagaagggagattaaaaggcctgctagatacacaaacatggtagcatttgtacttcaagtaattgatgatgacatcccatgcacttagagagaagttgtgtagagtgttgatggcaagaaatgaaagttggcaatggatgaagagaagaaatctctacaccagaatcagacatgggtgtcggttcgacctcctgaaggaaagaaggttattggctacaaatgggtctgtgccaagaaggaaaaagttctggtataagacaacatttgatacaaagcgagacttgtagcaaaaggttatgcccgaaagtaaggaactcagattacaaggaggtattctcaccagtcatcaagcatttgtctattcaaattttgttggctttggtagctcaatttgatcttgagttagctcaacttgatgtcaaaatagcttttctccatggtactttaaatgaagatatttacatggctcaagtacatgatgacaaagttccaggatgtgagaattgggtttgcaacctaaacaagtcactgtatggtttgagcagtcaccgtgatagtggtacaagcattttgacaacttcatcaaagagtagaagaagtaaactcacatccaatttaatcattgtgtatacttccagaaactccatgatggtactttcatttattttctttaatatgtttatgatatgttaattgcatctaaaagcaaggtggagattgtcaggctaaagactcagcgaagttcagaatttgaaatgaaagatcttggagaagccaagaagattcttgagatggagatcagaagaaacatagttgcaagcacattctgtctaacagaggctcagtatttgaagaaagtactgtaaaggtttgacatagatgaaaagactaaaactgttagtacaccaattgcaccttattttaagttcagtgcaaagatgtcacctagcaccacagatgagaaaaagaaaatggagcatattctatatgcaaatactattggtgttcttatgtatgcaatggtatgctccaaacctgatatttcacatgctattagtatggtaagtcactacatgcacaatcctcgtaaaggtcactgggaagcagtaaagtggattttacagtatattggtactatggatattggtttgaattttgagagagaaaatattgatgataaacatctagtcaaatatgttgattatgaatacgttggagatctagataagcatcgatcaactactggttatgtgttcataatggaaggaggaccagtctattaatgattgacattatagttcattgtagcattgtctactacagaggtagaatatatggttgtacagaagcattcaaagaagctatctagcttctcaggttgaccaaacctttgggtattatttagaagaatatggaggttttttgcgtcagtcagagtgccatttttttggcaaagaaccaagttaatcatggtcgcactaagcacatcgatgctcatttttcactttgttcgtgaaatcatcgatgatgggaatgttatacttaaataagtcaggactacaaataaccttgcagatatacttacaaaagtggttacagggatcaagtttcaaaactgcttgaacttgatcaacatctctcggacttggagcacctaaggcgtaagtggaggcaatgtttttggattttggttttcttgccaagctggagattgttggatttggctcaaaagtaaaattttcttgaggttgcaaatatatagttcaactttcaagagatttgacttgctatttgccacatttatcagtgatactatgcaatatctattgatttatgctctcatttattacatatagttggaactacctcattgattacatatgattgggagatgagctacctctcattattacatatagttgggagttaaggttttccttctataaatatggagctcttagaagagcattgataattcattacatatcattcattgtgtacaaatctggggtgaacaattcgctctacaaattagtacaattaggttcaggggtaatctgagagagagagagagaga

SEQ ID NO: 122540 - DNA, 972 bp, Cannabis sativa
gatattgaataatagagatattgaataatagagattacattgaatagagattacattgagatggattacattgagatggagtacattgagatggagttttattgagatggagttttatttagggcataaaacccaacaatctctatgggtggtgaacgtggaactttattatatctctggcattgcccacactttggtatatactctatgcaatcattcttcattgtgggccaaaagtacccctagcaaaggattttttttggataaactaggtttggatgtatggtctccgcaaaatctaccatgaatctcatggatcacgatgctcatttctactccagcgatacacctcaagtatggcattgatagtcctcaacgataaagcttcccatcaatgatcatgtaacggggagcttgatactaaaccttcctagaagcaaccttattcgcgggaagctcttttgaatttaggaaattataaatggctgccatccaagagtgagacttttcaactattatatttaccccatggacctcaattcttggtttctacaagtgacaaattaggactactccgtgttggatgatcttagggtccgttgcaagtttggctaacatgtccacgaacgaattttattctctctgaacctatcagacgttgtaacttttgaacccttgcaacagttcctgcgacatcatgacatatatagccattttttaaccctttgtctggtactcactagaaatttgatttgccacaagctgggaatcattgtgtactttcatctattgggctcccatttccttagctaattttaagtctgccagcatggcttcgtactccgcttcattgttggaagcgtaaaaactaaaacatagggcactctggagttggtgcccttacggggagatcagaatgatcctggctttggctccctttgttggaaattattttattaggatcttagatct

SEQ ID NO: 122541 - DNA, 1088 bp, Cannabis sativa
ctcatcatagcgagaggtgaggatcgagaggaagaatactagggctgtgattgagaagcagagagcgagcaatgatgagattgagaaggcatcaaaggcgaacactcctctaaagataggaatgcctgtttcctgattgaccccaccgggtatagttgtggaagttgtgaatgcaaccgtggcaatgagagcggccacgagggaacaagactcggatgtcttggttagccatttgcctccttctttgatgagccctttgtgtgttgtgatgaagacttctttaggggtttcatgcttgttgttgtagcgtgggaagaattgtggtggcattgagtgttttacaaactgtatgaaaaaaattaaatttgattataataaatttttaatattaagagtaagttttccaaaagttgttactttgttacaaagtacgcaaaatggtaattttttttttttacattttttcgaaaaataatattgtttctacattgcaacaacatagtataatgcaacattaacgtaaaaataacataaaaacaatcgtctcataatttatgcaaacatctttttttctttgtttgttttctttctttcatcaattcaattcaatcctttcaaatctaaccctattttccaattatggccttggtttttagataacttttttagtagaactataataataagtgggatttaaggcatgcatagaaaaagtgttgtaaataacattgtaaagtgttataaaagaccacatatatgtaaaagtgttataatttaccttataccacttgatttcccattgcatttgcaaggcaacaccaggaatgagccaaggtctctgttctttacactcagcagcaagatgcaaagcactatttccgtctttatcgagttggcgaaaaacgctttccttaagaatattactatgtagaagaagattataaacatgtgattgtctattttcaacagccaaaagcacaacattcttgttatctgaatcaacatcttggatggcaactggaaattcctctaaaatcttctctatcatttcactcactcccatctttgcagctattagtattggtgta

SEQ ID NO: 122542 - DNA, 1025 bp, Cannabis sativa
tgtaaaaatttcaaaaaaataatatcttttaatagttaatgtttaaaatggaaagtttgtagtaattacacaatgtaattacatccaattctcattgagctatgagaatttgagagtgtaataagaacccctcaattaccttgaattacaccgtataattacatgctcagacaaacataccaaattatataattacctccaattacacacaaatctaattacaataaacgcttctaaaatagtattggccattcaatagcaacaacacattcaagagtaatattaattattcaaccacaaaaaaaaaaaaataaataaataaacaagaagataaatacatggaccaaacccatagatttggccaataaaaatcttgtgtctccaaaactctatctcatctctatcaccttaattagcaaataaaacacatgtctgattattatcaaaaaaaaaaacacatgtctgatttctcaaaagctcacgtacgtgatgctttcagttttttgctattttttaaaaataaataaataagtaatggttccgtttcttttgttcggttactattaacattagctttgtaagagcgttaggttaggtgggctgtaacaagagtgttgtaagagccactaccttccactctcatcatcagctagtctcttctttttcattttattaatatacgtatttattgtatttgttcttcgatttttgatgtgtaatgtgttttacgagtttattagtagggctcttatccaatccaatttgtatgattcaatctacaaaaatatggatattcgcacttgtgtgaatttaattgaattaaaaaacctaaaatctttacttatgcggactagatgttgcttggcctaaaataataattgattcaatcaaattcacaattatttatgtactagcaaaaaacaacgtgggaggcacgtatactaaattttatgctaattttttctatgttatttgaaagtgtacaattaaaaattaaagaaaaaatattattagttattagatga

SEQ ID NO: 122543 - DNA, 854 bp, Cannabis sativa
tagcgctgcaaccactttaaaaaatcaaaccgtaaatttaaaaaaagaagttaaaaaaatagtatatgaggtaattctcctttatattattctgtattattttatgatattaaaacataaataaatgtatgtaagaattaatatatattaagtttctaaaattatattttctcaaaagaaaatttctaaaattatatataaaaaagatgttatgttattttttatacggtgaagatatttttttaaaaaaaagggtggtgaaaacacatctattgaattctaaaacaaaataaataaacaaaatcatacggatgggatgatatagaaaaggaagttttattacttacgacatcattaatttatttattttctattttgtaataaatctatcaacgtataatataatatttttaacttgtttaatttgcatgtgtttttatcttatgttatatgatccagaacaaatcccttaaattcttctgtatgttggaaagtcaaacatacttcgaacacatttttcagcgtgggagatacatctttagtccctttcataaataaaacccatttttttagcaaaataataataataataataataataataaaatccatttctattacattttttttcttcagagtgtaataactttggtagatgtaaggttcgggagaataaatccaaattagccttttaaaaattttgaatagtttattatactaaaaataaaattaaaatattttattatacttgtgattgttttgtataagcatgtaataatttaaaatttatttttaacattataaattaggattttttttatttttatacgtcaaagcagttttttttttttttt

SEQ ID NO: 122544 - DNA, 854 bp, Cannabis sativa
  modified_base (145)..(165): a, c, t, g, unknown or other
attatatatttatgatatatacttaattatacaggatatattattttataatttaattatttttatcaaatattttaaattttttaactgtgaattattcattattaaatatttttatttaaatttattattatatatttttatnnnnnnnnnnnnnnnnnnnnnaaaaaaaaataaataaaatagtctagtagtccattcttaaaccaaacacaggattactttcagcataatctaatcttgtctagtccagtccagttcaattctttctactttttagtccaatccaatcaaattctgtgtaccaaacaaacccatagagtataaagagaatagaatttataatgacctatttgtgaggtgaaatgtagaattagggtatattatgaatagtctcttagtaacctttatgattttattccagctttgtctttctattaattcaatttagttaaaatatgataatcattattataaactcaataactttctaaactatgtagagttattattatatggcatgagaatgacacacaacatttgtagggaggataaaatggcttgaataagggtggaatatgggaaataattggagcatgccgcatgtactcttttactcatgcgatctttatttcccctgcactactatatataccaattaagtaattccctacacaaatatattgcctcctcctaaacacaaatatatatatatatatataaaaagaaaaaaagaaaataagaaggagtttataaaataaatcaaatctaagttttcttatgttctttctagtactacaattaataacatgttgatttaaaaaataaagactccttcaaaaaaaaaaaaaaaa

SEQ ID NO: 122545 - DNA, 1004 bp, Cannabis sativa
  modified_base (53)..(63): a, c, t, g, unknown or other
taagattttctgaaactttatatgtgtttaatttcattgttttagaaattcannnnnnnnnnnttaaacaacatacatggtagtaatctagatcctggtaaaataattccaacacttaccatgccgacctaaaaaatcaagaccagacgaggtttgttgtaagaaataaaatcctctttgatcaaatttttgagagaaaacctcgatgtattcgcatggacatatgatgacatggttggaatcgatccatttatagttttccacgccctaaatatagtctctcacaaatttcgtccagtacaccaaaaaagaaggttgctggataaggaaagagcatgtgcactcaaagaggaagttgaaaatctctgagccaacaaattcattatggaggcattctatcttttatggttgtccaatccagttccagtgccaaaacttaatggcaagtggtgagtctgtataggttcattgatcttaacaaagtgtatccaaaggactgtttttcactgccaaggatcgaccagctggtggatgcaactacaaggcatgaaactttgagcttcatggatgtatacttcgggtacagccagattaaaatgtatttgctcgaccaataacatacaagcttcaaactgatgttgacttatattgctacaaggttatggcgttcgaattaaaaaatactggcgcaacttaccaatgtttattaaattgaatgttcaaggatcaaatagggcataacatggaggtatatgtggatgacacgcttatcaaatccaaaagagttttgggcatatagaggacttggacgaatgcttcaagactctccgaaagtataacatgaagcttaatcctctcaaatattcacttggggtaagttcagacaagttcctaggctacgtagttaatgcccgagtaattgaggctaaccccaaaaaaattcattctcttttagatatgaagtctgttggaatatattttaccaggacctagatttactaaca

SEQ ID NO: 122546 - DNA, 851 bp, Cannabis sativa
acaaacataccctttcaaattgggctgaatacacaatatgggatttaaaattgaatttacaaaaatgtggcaaaggaaatacaatatatacctttaaatttggataaatgccatataagggtggataagttaaaaaagccatatttatcaaacttttttgtagaatcccatatttggtgtaatttactggtagtagtgtctttgtttttagtatttagaaaatttataaattttttataaaataatgtatattgtaattattttgaatccaacgagtttttgtaatatactgaataatttaaagtgtcacgaatatagacttcataacaatctgtaaagtttctcattggcatatttgataaaattcacaaaatttattattttgtggtattttcaaaaaatatgagatgtttcgtttagtgtgtgaaaagtgttttaggtcaaaatatattgtgtgtgttaatgaaatttgtaacaccctactagcttaggcgtgctatagtaatttttaaattaatatgctaacctttgctaaccaaaaattttagtgtaagacgtgattaacaaaaactttaataataataataataaattttattaattaatgatatataagtttacaattttgggatcccgtaaacattttcaaacattacaacagatcaaaaggtgtcgcccaacaactaacaaaatttgagcccacgttgtcctgagatcccaatgcaccaggtctaaccgttcagatgtataatcttcatggagctccaaactcaatctcgttagcttttgtcttgtatttacctacacataaagcacgtaactatgagtcgacagactcagtaagaaaagca

SEQ ID NO: 122547 - DNA, 1456 bp, Cannabis sativa
acgtgtccttatctggttggtccacgtatattgggcaaaatcaggggcaacaggagacaaggtgaaatacaaggaaacgggtgactttgttagatgcattgaagagtgtcaattagaagatctcaagtcaagtgtagcttctttacttggtccaacaaaagacaaggcaaagagcaaatttactcgaagattgatagggtgctagttaatgatctatggctggagaagatgcccaattcagaagctgtctttctcactgaaggcaccttcgatcacactccagttgttatgactatctatccagaaattcttagtggcaaaaaaccatttaagtacttcagaatgtggtcattgcacaaactttttcctaacattttggcaagaatttggcaggtcaaaggcactagaatgtttcagcttgtgactaaactgaagatgctaaagtctgagttgaagaaactgaacaaggaagctttttctgacatagaagcaaaggaaaccgagttgaaagatctgcttattgttcttcaaggaaatctttaggaagatccttttaatgatgaactgcaaaaaaaggagaaagacaccagggaggcctacatacaagtgcaaaaggatttatattccttcttgcaacgaaaggcaaaagttaattagctcaagggaggaaatgacaatacaacattttttcatactagcattaaagatagaaggaggcaaaatagaatactctctatagaatcaaaagaaggtacaagatatgaagatccagagcaggtaacaaaggcctttcttgatttctacaaaagtcttcttgggagtaaaatggagaataggaagcaagtgaaaagttccattatggagcagggaccactggtaacaagtcaacaggctgagatgctacttagagatttcactagagaagatgtcaaggaggccttgtttgggatcccttgaaccaaggctcctgggacagatggttactcaagtttcttctttcaagacaactagaaaactattggagaagaactttttggagctatttcatcctttcttcagactggtcaacttctcaaggaaataaactccactgttatcacacttgtccccaagatgaaatgtccaaacacggtgagtgattatagacctattgcttgctgcaatatcatttacaaagtagcaacaaagatgatttgtactagactcaaacaaatattgcctgatcttatagctcagaaccaagagggctttgtttcttggaggttcatagctcataatataatgctttgccaggatttagttagacattttgggaggaaagttaccaaaccaggatgtgtgattaaacttgacattcagaaggcttatgatacactggattgggattacttggaggaaatcttgcatgcctttaggtttccctacaagtttataaagttgatcatgaattgtgtac

SEQ ID NO: 122548 - DNA, 548 bp, Cannabis sativa
aaaccaataaaacttaatgtaagcccaaataaaagtctaacaaaagaaaaactgacaagcaagtcataggaaaaatacaacctcctctaaccataaattcaggaacgaaaaaacaacaaaaagaaaatacagtattaaaatattaagtcattcattccagtagtaaaagagatgacgatttttaatttttaagataacatgaaagacattttagtcaaagccatgttttattttatttttatttttaagagaagaaagaaaaatcttggataagtgagaaacgttgaaactaattttccggaacctcgccgtgtcttccggtggttgcggccgcatagtcactatatatatatacaaatatatatatatataaatgatgattgaagattcttaggcttcgtagggtcgttaagatggttcaattctataattttgtatgttatattagtctatataatgctagacagaactgtgtgtgtatatatatatatatatatgcatatatgtatatactaggtgattgttacgtgccaagccacgtagtgtta

SEQ ID NO: 122549 - DNA, 530 bp, Cannabis sativa
  modified_base (441)..(453): a, c, t, g, unknown or other
  modified_base (501)..(505): a, c, t, g, unknown or other
agctgcacagtatgtttaaaactcacgtaatacgcctatggtagttagggtgttacataccatctctaggttggagaatgacctctcggggtataaagagaagttaagagaagcccttgatgactagtaggccacaagggatgagccaactcatttatgagtttaagttgcacaactccaatcatgatctttcatacatgggcgatgcagctttcttggagagaagtctggctcaagggaaaacgttgttcaagagtatgttggaagcgggtcagaccaacgttcagcctgagggatcatcctctaggaactttgatgaggagatggctagcataccttttgggaaaggcgccgaccagagcttcgaggaggtgctcagctagcctatggacgctatggtcgacacacactctggggaactatgttggaaattattttacnnnnnnnnnnnnntactaacatgtatgttggattaacagcctaatatgaattctaaaacannnnnaataaacacatataaagttagaaaa

SEQ ID NO: 122550 - DNA, 1894 bp, Cannabis sativa
tctttggtgaaacttgagtgagtgtctgatactctgactctgcactagatcttgacaccacgatttatttcttggatgatcatgacaccagagtatccctaagatacacataataactagttacactttttcgatcatcaggagagcatgcccaatcgccatccagatactctctaattgcaagtctatttgagtttttaaaatgtaatccatggtacacagtacccttttaagtgtctaagtactctctttgcggcactctaatgagccgtggtaggagcttgtaggaattaactcaatttattgactgcaaaggaaagatgaggtttggtatgtgtgagatacttaaggcctccaataatgcttttgtaatgagtaagattttaaagagggtttccttctatttttgacaatggtttgccaacttctattggagtggatcatggtttcaaatgcatcattccagtcctgagcaagagttccttgacatacttacgtcgattgagataaaaaccagtttcatctctgtacttcaatgccaaggaagtaatgcaagggacttaaatctttcaaagtaaacatggcatgaagtttgttgacaaactaatttaacttatcaacattatttttcattacaataataatgtcatcaacatagattaataccatgacaatcaaaccaaaagctttgtaacagaatagggaagaatctacctcggaattcttgaaattcaaggttattaaagtagtcttcaatatatcataccagacccttggagcctgttttaaactataaagagacttggtaagtttacacacataatcaagtttagaatcatctacaaagccttgaggttattacataaaaatatcttcatgtagttttctatttagaaagacattgttgatgtcaaattgtctaatctcacatgacttagaaacaacaatagttaagatgattcaaataacagggctgtaagtttccccaaaatcgattcctggtctttgattaaagctctttgcaactaatatgattttatacctctgaaatgtaccatcaatattcctcttgatcttcaacacccatttattaccaataaaattcatccccagtttttgccaccgaaatccaagtttcattgttcttgagtattatcatttcagttggcatggacctattctaaccactggtcctgagagcttcttctacactagtgggttcttcattgtcccagttctaataagcgtgacctacaaagatattgggtttaaatatccatgccttagctctagtaatcatggggtgagatggatctaaaggagttgtttcttatactagtgcatctagtagcagacctaagattatgttttagggtgggcgtaattttgttttaacgtataaaaatacgagtataaatacatgtgtatcatgctagtccagtccatattttttcaagtttatagggttgtgccgtgtcaacctataaaaaaatacggaccatgccgtgttatgccataaaaacatatgggatgtgtcatgttgtgcaacaattttatagggtgcaacctaaatagttacgtgctaacccgttttttgtttttaaatagaccaacctcttttcttatatgagctcaaattcatgttctatatttttgtatttttctattaaaatggatgagctaattactaaaatatatgtgtattcatagttttaattacctttgcatcttttctcaataatagttacccataatcatataaaaatagttataattattagaatttgaatattactatcattttaattgataaataaatatttattattgttattattgttaaatcatcaagctttttaatgtgtcgtgctttcgagctaatttattcgtgctt

SEQ ID NO: 122551 - DNA, 594 bp, Cannabis sativa
ggttgcagaagggagcttcgggctatggggttaatggaggaggcgggtcgactggagaagagtggttcgcctggaaaaatggaggtcgaatgtgggcggtttctaaggtggacagtggcggctgggcgggggtctggttttctgagtgctggcgaggaggcgatgggggtggtcgatgatgggtttctggtgggaatggatctggggaaaatggagcaaggggcgactgaggagagagggagaggtctgaacagtggttttaggtggtggcgcagtcggactggggaggttgggttcgcctggaacaatggaggacggaggtgggcgcggctggggttcgaacggtggaggttggggcagaagtctgaggtgggtcgggtctgggcaaatggaggaagggaaggatgtcgaatagaggggggtcgactgtaggtcgacggtggggttgtttgaaggttgaagaagacgctgggggtgaagtcaggttacggtaaaaaaataatttgaaaataactattttttttttttggttatgtaataataatatataataaaataaaaacaatattaatataaaaaaaaatattttctttt

SEQ ID NO: 122552 - DNA, 2220 bp, Cannabis sativa
tgaatatttgaaccctattcgcaaaacaaataaattatttcaaatatttcataaacaagtaaaatgtttgttataactacaatgtgtacaatttgagttataatttttcaaatttaaagtgatttaccttaacaattaaagggaagagtaggaataattctattttgtatttcttatgttgtctctctcaaatattaattatgtaaatggaatcttaaagaaaagagtatacaaaggaattctcatactcaatcttagtgactagactagagtctataaagtctttagaggtcaatttagagaaacaagagagtgtttttgttgatgaaatgaacatatcatgtgagtcatggcttaaatgagataagtcataccaaactagaagaccccacaaaacacaacacaatggtttttgcccattgacaggttgcttccactaccaatacacactcatacaaaacactcttctcttcacttcttattagtgctgccgacagttgaaactttgaagtgttttttgtgagttgatgaaaagatgtaagaactactattatgaccaccttaattagaatagacctatcttattcaagctattggtgaaaaatcattgaaactttgaaaagcaattagagttttctttttgttttgtctccaagctatttggctttgctacctaaaaacattctagtactgtttttgaacagttaaattttgatttgagttaagtcattttcagcttaacttagtaactgatccattcattctcatcatttgatttgatatataatattttttaattgagtgttaaatatgtagtctattgctatattttaatattattttagtaaaaaaatttactaattggagtgctatcagggccggctcaagcgtggggcagcaggacctgcccaagacccacgctcaaggctaaaaaaatatttaatgaaaagattataaattaatttttaaaaataccatattttgtattttaacttttatttattaaaaaatataactattttctaaaaaaaatacctagtttattttttaaaatttttttgagtgtagagtaatagtatttttataatcaaataataacttaatagctcaaaagtccgaggtttgatcccatgatctcttcttttttcctattcctccctcgccactaagctagccttagtagcttttattttttaaaataatacatttaatattttatcaagataaaatattcaattatgtttccaaaatattatatttttaaatttttactattatatataaaaaaaaaagctcaattaaattttttaattcaagacccccaattagcttgaggcagacctgtgtgctataaggggttgttttggtgcttttgagtatccctaatggagattaaatttggtaatctatttgttaaatatagttcattttataaaaagttgctctaatagtatgtcaaaagttgattcaaatttagatcacaatatagcaaatgcaaaatttgtattgcattaaattataaactatttacttttttttttaatttttttatataataaaattaatgataaagttattactttcaatatttttaataaaaatatttattacacattaaattttatattaaattttgcaattatgtattagagtacaatcataaaatctgatataaatatatcacaaatacattttctgtatcaaatatagcataaattttacatattccattgaagtttgttgtactaaatttggcacatatttaaaattagactaaatttgacacatactgaacattatcataaatttggcacacaataattattatttttttcattacatttcacttttaatcattactgacactataatgcatattttttaattacaatattactattaataatttttttaatatttaatttaggagtttttacaaaaatataagattttggacaaaagttcacaattttactattacacggatttttttacaaaaatactattttttataaaacaatcgtaaaacaacaaaacaaaataataaaaacaacagtggaataattaaaaacaaccgcagaataatagtgaaaatttaacatagtacacaatataaaatttacacaatttttttgataaaaatacagtatatttggaagaaaaaaaaacaccgtcctacagttaaaaaataaaaaaaaattaaaaatttcagtatgtagt

SEQ ID NO: 122553 - DNA, 2319 bp, Cannabis sativa
ttagtttctgttataacaaccctagtccttgtattcttttgtctataactaaagatcatgagctcatagtcaagctcaagcttttgcaattttctctttgtgttcttgatagtcttgtattgataaacttctttatatttatggtattcgattgacattgaatttcatagtttgtcatgaattctagtgtgctcgaaaacccatttgctactacaaccacaattcctactgtcgcacaaccaccacaatagaatcatttccaaaattctttaaactcctcgcttacagtcaaattggatcgaaccaacttttttgcatggaaattgcaagtaatcccaacagtcatcgaccatggccttgatgatattctactggttggtgttgctcccattgaaaaattgatcaatggagctattaatcttgaattcaccacttggaaaagaaaagatcaactcctcttcagctggcttcacttgtctatgtctgagacaattcttggatcaataacctagcacaacacatcctactctatctagaaagcacttaaacaaaggtactctagccaatctaaggctcgtgttcttcaaatcaaatcctaactttccacaatcacaaaaggcaatctttctgtatcagactactatgataaagtcaagatttcggctgattctttatccacaacaggtcatcctttggatgaaagtgatcttgtcatgtacttactgaatggtttaggacctaaatttgatccagtcgtggttcatgtcaccactctagttgagaatattcccttcgaatccatccaatccttacttctcactcgtgaaagtcatcttgaatgacgttacaatactggggatctctcgtcaaaaaatggtcgccaacctctctatatctaattcaaggtttaccaacaatggctactccaaattgtaaggtttttttggtcgtggatcgaacaattactctgcacccagaccaccaaataggccacatggcagaaatggctccaacattcccaggcttctttgtcaagtttgtcacaagcttggtcatacagcggctgtgttctattgcagatttgataaagattttaattatcacactacgaatggagaatcaagggcatttcttattgaaattgaagatggtgatgcaccacatgctcattcctcttctacaattcctgactttggcattgatcaagactggtatgtggatacatgcgctacaaatcacactgctcaatgaatggaaaactttgaacttgaaatcccctactctggatctgagtctttagctgtatgcaatggtaaaaaactttccattactcatattagtaattccttcttaccttcttcctgttcttcacattctttgcagcttaattcaattttaaaagtcgcaagtataactaaaaatcttgttagtttttccaagctcactaaagataacaaagtttttcttgaatttcactcggccacttactgtttttctaaggacaaaatcacatggagagtcttgcttaaaggaagggagaaagatagtctttacatgctctctcatcatacctttcctcaccaacaagttcagattgagtgccatctagccacaaaacaatcatcacattctagttctagctctctagttttaattctaatagggttattccagctactgatgtttttgattggtgtgttagttatttcttcaagtatttggatgcacagcaccacaaccactactcaactaattttgctcctatacacattaggcctttggtagcttcttctgagggtacttttcagatgttgtcattgatcataataacatgaaacatagcattggtattgttgttttggatgagttaaacagggttaaagttgggatacccatagccttatgttggcagtgttcctgctgtagcggctgaagcaaaagcaattcttcatgttgttcaatggattcaaatgcttcaccttcttgtggacgtgttatgaactgatcgtaaaactattacagataaacttaattcttgtagttggaatgatagtctattggatgacattttacttaatatcaaaaacttattactcttgagtcctagtctaactattattcatatatatagagactctaatgagttagctcataaaattgtcaagttaggattatgatcactagataataaattgatttggaatggtcttctactttctatgtaacttgcttgctttgtattcccattgttttaattctaatgaagcacaagtttgtctcacatttttttttttttttttgtcataatttttaaaatat

SEQ ID NO: 122554 - DNA, 1105 bp, Cannabis sativa
gagagagagagagagagagagagagaaatcacttgctgaagaactgagtgaagattctagacttggaaagaagtgcagctttagagagaaaatattgatgtcgaatgatggtgtcaaactgagttcttctacagatggacgcttgagacgatcaagtctttccagaatagtacaagcttgatcgattaaagaatctatttcagagttaagatccagtgctaacggatgcctcaaagacgtgcaaataaccaccagggatggtgcatttggatactctcgagccctaattcgaagtagaagattggatttagtattcaatatcatacttcaaaatttctcatttcgtaatcaaatatcttctctataaactctaaagaaatttgaaatttgggtaaaagtggtaaactgtggcattacgaagtatttatacttgggagttgaaattggcatgaagtgcgaatcgatggtctatatttactctccaaaaaacaaattcgatctaacgatccagaattccatcagtgaagcattaaatgcaatatatgggaccgagataaatcgcatgatgatattctccttgagatttgcacagatataaatagctgatagttcattttttttcgcttcaagcgcctcctcaataaacaggtactccatgaaccaatgatgcatcgccacacatggccttaaattcaaaaaattaaaagttatcttccattcatagaaaatatatggaattcctaaaggcctcacctttaacctccacttgtccatccatatagtccgaagcaagcctttgcaacccacatcgtttcaaaagattaggggtcaattttatatatgtttttggcagaggacacatggaatctaaatagccaacacagtccaagtaatcaaagcccaacggtgggcccaaacaatatcactaggccgaatccataagccatcaattcttccgggtaaataacgttcaactcgtctaagcgagtccccatctagcatgggcaacatcggaaagacatgggtaaatggcggcaaaacccccaatactttggttttagtttcactaaacccccacaacccaaatttctgcgggtaaaccccc

SEQ ID NO: 122555 - DNA, 897 bp, Cannabis sativa
  modified_base (150)..(150): a, c, t, g, unknown or other
taaaataatatatatatataaaaattaatataattttttactttttttaacagtttggagataagcagtattacaatctaaaaactaaattgttactaatgcagcaacagtggatagaacggttgatggcggtgattcacgatggcttgncgattgatgctgaaaggcctaagattttttcttccctagcttatttgtttaggttaacttgtacttagatttattaacttattaatacttagactaattttacaatatttgtgtaatatttaattgtaatttatttaattacttctatgaagtgaaattaggtattttggccaatcctaaaattaatttacaatatttaatttaccttttaaaaaaataaatatctaatttaaatttaaattaaataaataaattcataaattaataaatatatgatttaaataaattaaattaaactaaataaactgaaaaaaaataattcttagggcttttggcatttgcgtcgttatttgccaggaaccgacgccatatatacccatatggcgtcggttcctagcaaataaccaacgccatatttacccttatgacatcggttattttagaccctacagcatcacttggattagcgttggtagcgaatattaccaaaattgacgctgaaaggccttaaaaaccacatctaaagagtctttttgtagtagtgtcatattttagattattttatatcaataatattaatatgttaattcacttaaattattttagatttatttttatattaataatatttatataaatctataggcctacgtacatagtattttatcataacattattatatgtagatataataatatatctttatatattaaaagtgactatctaacggcatttcttggtttaac

SEQ ID NO: 122556 - DNA, 3184 bp, Cannabis sativa
atttagggcatgaaacccaacaagtgaggtgggctttgcttcagagatgcgactccacaacgaagacgacgccaagaaaaaaaaaaggctctaggaaaaggtttgcaagagacgcaaggtggcaagatttgggttgcaaagggtggaaaagacgtagttgggctctttatggacaagaacattcttatctttcattattaatgtgtagaatcaaagttacaaaaatttgagtagtttagtcattaggaattattaaatcaactatctacttatcatattattggagaacgattttatcattcctaattaccatatctaattaaaaaaccatgcaatattaacaataagtaaaaaatttaataagagaaaactctctaataatatttaattgcatatatagaacatgcaaagctcaaaatttaattttacaatctagagtacatataaaagcttagaacaaataaataccagaggaccaaaataggtagattgggataatatatatatatatataaacataaccattagatattatttagtgtaatcaagaatgaagtaaataaaaatgaattcttttatgtgattgtataaagcataccaaaaacttctttgtcccaaaacataattatagatcatgtgttatgaaatttagtcataaaaagtgttgaattattctatatatatatatatattaatccagaaacattttttggtaatgtgaacatcaatatttgacagttggtatgaaggatgattttatggagtttagtagacctaagtaatagcagtcaacttgagagggggccatagccctgcgcttaggttgactccgggatctctgggatgaaaatttagacttcaataacttgaatctaacccactatgtttcagtctactgtaccatgaagatatggagcaaccttatacaagggttgggagctaaaattacatgaacctgcaaccctgaagccaacttgtgtacctagagtttcacctggtgcctatgctgacatcctcaactagggttttagtttttgccatcgtcttcgtgcaaagtggccaaaagttttcagtggagcatcaactagacataccacagccatgtttgaggcatcaaaatcagattcagagcaagttagtttttgagcacctgggggccccagggcctcgagcacccagtgcctaggttgacaatttgttaatctgggtgtcttccaagtgtcagatcgaagatccattttttatattgaatctgacttcataaaaaatggggaaacaagtccttctagaggaaaactaacaagttttgggtaggaaaaatagagtccaacgtccaggttgacacatggggctgaccctgcacccaggttgacaatttgttaacctggaccacaaaaagttgagttttcctagaattctttcaataattgaacttgaagcagaattaaacttgagtgaccaattcaattctcttcgcacttccctcgagttcatggagaggaattgaacttgagtgacaaattcaattctctttgcacttgtgatcctactaaagactactttgagggaagtatccactacaatgctcctaatgaacactctcatagcgggtctccccgacacgatcctgagttcattccagaggcctcaccaaagttgccttcacgaccccatggtcaggagacaataacaagacccaggtcgacaggagcacatgatcaacctagaagacaaagagacctgtgtgacctcttgaagaaaagaagaatggtggatgtgggaacttctaaggaagaccctatttgggtgatagaaactccatttgggacataaaccaccattcatggagtcaatcgagtagagttttacaccttagttgctttagagaaggggatcacgacacctaagttgtctgaatttgagctaacatagaacgactcaacactctccaaatgaatcaaagtccttcttattcctccaaagttcaagaatccttctgggcatcagtacactgtaaaggaagaaccaatatctcacacccactacttaaagtgctgaccgatttgcaaggtgtgggagatgacgtcaagtgtagaatcttccctggtacactaataggcctagcacaactctagtacctaaagcttccccttgatcgatcgactcctagaaagatctagtggatgcttttggcaatcagttcactccttcctaacaatgtcgaattgagccaaaagatttggtggatgtcaagcaacaggaagatgagcccctcaaagactacatccaatggtttttagaggcacccgctaagaccaaaagtcttcaataggatgcaagggttatggcactcatattcggtctcaaggaaaccagtcctcagtggtccgacctttgtcttaaggcagtatacactatgaatgacttagatagagcagatggctttatcaaacttgaagaagccatcacccaagcaaaaggctcaaagggtggcaagaagaagttgccaagcccctgatattgaggcacaaggcaatgggaaaagagggggtttgaacagacgaaaaagagtcaacaactgtgggaagcaaggaaactcccccaaaggaaagaagcctaaaactaggggagacccttgagagattatgatcatcgcttcaccacctactcaattttcttagctctaagagaggagatctatacgaccacttaatcaatagtgtcgtattgcaaacctcttcctttgaaagagttagggaaaagggacatgataagttctgtcgttaccacaacaattacaatcatgacactaatgagtgtaatcaattgcaggaagagatagaatttctcattagatagaaacatgctgctcttcagcaatatgtaccacctgaagctccagttggggcaaggctccactttagcctacgctagttgcaggtaggttaaagattgttattgaaggccttcacttagctggatattcaaggaatgccttagaaaggtatgcaagagcactctgacatgaaccaagagccaaaatcctagaggtagcagaacgacctccaaagtctcagtgatacgaaagtgaaccaatcaccttcagagaatgatgcctcacttgtcaacaagttaaggctgaacatcagagaccagcagggatgttgcaacccctagaaatccc

SEQ ID NO: 122557 - DNA, 2738 bp, Cannabis sativa
  modified_base (2360)..(2362): a, c, t, g, unknown or other
aaaatagattacattgaaatggagttttatttatggcataaaacccaacagttaattgggttggacatatgataatagtttgcaatcttgttaaagtatgatagcaagggtaacatcgcaccctggttggtatgaactcccgaccaagcacagtaaccttcccctgggttagtcgcgagtcggtcaggggagtgaaggaaggatttgacattccctaggtaacagtgattgagcaaattcttcatcattcccatggtcaccatggatggtggagagacccatcaatctcctagtgcaccttgcctcctcagggggatagcctcggtgtattcttctacaacatagtcttcgccagcctcaaaaacatcactagcctcagacacgggttttccatcttcattgtagccacgaaatggtagcacccgagctactccctcttcctcatctccttcaacattagcaggagtggcaggacggacctgcccttggtcctccacctcttggacttcaacgttcccaaccgtatcctgctcttcggtagtaggttatgcttgttctgccctgggcaaggtggcaaggcgggcaatgtgtgggtcagacagtgaagattttcatatagtttgcttggtttgcaccattattctacgtttggacggagttttatttgtgtagctagaaatagtcataaaaaactggcaacaggtttacctgcagcaccagggtttgggcggcccttgggcaaagggttaactatgtctggacggactatgtatgtccagttggatggaagatagtgtctccaccccttcttgagttcccaaatgaagtaaccatacccctgacattggatctggttgagataaaagttgtgttgcacattgggttctagggaaggcgtgtgttcactacttatatcccagtcctcaaagctagagttagagaggtcatcacgggacaaagatgggcttgtatagagaagaggatgatccttgtacaattctggaaccagatcctggtcgatatggtgttttcctccccaaaactcaccacgattcatcgacaaaaggtaggagacaagaagatgataatttattggggcaacgaataaaaaacaagttgaatgtttgaggaatcaaaaatagaaatttctctcaataatagaattttccatctagaagtttgaaactttgaattggaatctgattctctctaaatccctaatggataagtgaaaatggatatcgtggggataaaatcgaagcatagttagaatcagacatcgtgattaagtctgatcgagatttctaagtcttaaatctatgattttcatggttatcctagataaagctcaagaacagtcaagattcgcagacaaaaacctagaaaattaagcatgcaagtgtataaaagaaagaaataaagaacttactcactggttttaagctttttgttctgctcggatggtgttggcaagagtttcctgggaattctttaaagaatttaagagagaaattgcctgaaaatttctttgctctggttttttgagaataaagatgactaaaaggattgattagggttttcaatcctgtttataagcaacctgagaagagaagtaatcatttaataattttaatttcttgaattctccccaaaaagtgtacattatgtactcattgctggtagagtaaccgtcttcacgcctggacatcaagtcgcgattcaaggcaaaattgtcaatcatcattaatgacccaaaattgaagagacccttggtcaggatcacgtcaattcttcattcaatgcctaggacacacatcacccgtctggacaagactatagatcgagtgaagtccacgtgcaaccaggaaggtcccgcacaatttgggggcaaatgttttccatttttcggcacattgatgtggtgagagagccgagtgacacatgtcctatatttttgatacatgggctgaggtaaatgtccctatcagcctgcacataatttgtcagcatctataattgtcgattacccgagtagagctgtagagaagacatctgaccaggtagaagcctattatgccgagcaacttacaagagataattatttcagaatgatcttgttatgtcgaggcacgaagagaagctcgataatcgtgggatttagtcagagaaatagggcaacctatttcagtttcctatttcatatcttgtaattatgtaatcattgtaatttcctattttatgcattataagcacaagggaaaccatccctcacgcattaagcccctataaatagtgacctatcctcattataaaagggatcgaaagaattgcttcagagagagattctagagagaaaatannnatctaagagagttactcagagattagttgtaagagctttcaaaggggaagaacactttgttccttctcttaaaccaataaaatacaagggagtaggctattaccacactcatgggaccgaaccctttaaaatctagtgtttattttactttattatttttattctcttttaattatattattcaatcgcttattatttgactcaatttcattggctaaaagcgaggtcaataccttacattggttgtagtggaatataaaggctccttacattcaaatctctaactcttgttcctttctgtcgtacaatattgccaagatcaaaacttggatctcctttagtgatgaaattcttcacaatcttccacactatgatt

SEQ ID NO: 122558 - DNA, 1256 bp, Cannabis sativa
gcataaaacccaacaaattttagtagatatacatggatctttcccttatttgcaaaatctcaagcctatagaacatttttacaatttaaagttcttgttgaaaaataattcgatctccctattaagtctgttcaatcataatggggaggtgaatataggtctctagccacctttcttactcaacatggactctatttccaacatccttgcccctatgatcatgaacaaaatggtcgagctgaaaggaaatatcgccacattatgaaaactgcccttacattattagcacgtgctggtttgtctttatcttactagtggcttccatttcagcatgttgtatatcttattaataggatgcctacttgagtacttggaaacatatctccctatgaatgtttgtttcataaggttcctgattacttagtgcttaagtcctttggatgtgcatgttatccacatataaggccatacaacagtcacaaatgcatgttagttggctactcaatgaatcataaggttatatgtgtgaaaacaaagatggcagagtttgtgtagcaagaaacgtggtgtttaatgaaaaggattttcaagctcttcaagctgcagattctgtaaaggtacactcttccccaatgtctttatttcccactacttcattttttacctctcccatagcaactgatactatcttacctattgtacatgttgcacctaatgctattgtgcctggtacagatcctactgtgcctgttgctgagaggaccactacaattatgtcagctcttgttcttacaccaactactactcatgcatagaaaaatacatctattgttagtgtcagtcctctccaagacactataatagctacagctactatgaataggactcaccatacaaatgaatctgtctctagagccaatgccagcacttctcaagctgattccatcaataacattaccatcttcccacctcagcctaacccaggaccaatctgtgatacacatgtgccgaaccctattccccaatcatccacagcaaacacacataagatgaaaactagatccaaatctggtatctgtggatgctaaaatccactatcaatcaaagataatcgtacgcgggcaccgacaacctgtaaaacaaagacgagagtaaccggtaaaccttaggacaccgagatggtgccagctaaagggactccgacagtcaagtcaacaagattattaatattgtaataaaaaagatgagaataaatg

SEQ ID NO: 122559 - DNA, 1434 bp, Cannabis sativa
tgaaatgtaatctttctgagatagcattagtctcttttgagatagcattagtctctttccctatagcattagtctctttccctgccgcattagtctctttccctgcctatctctgagtatctcaatgcccaaaatcttcttggcatgccctagatccttcatttcaaattctgaactcagcttgtctttcacttttcttatctcactcattagtttgcttgctcttaacatatcttcaacatacagaagtaggaagactgtacttcttatattagatgtcttgacatacacacaactgtcataggcactcttctcaaaaccagatttggtgatgaaatcagcaaatcttttataccattgcctaagtgactattttaggtcatagagtgatctctttagcaaacaaacatgatcttatttacctttctccacatagccttctggttgctgcattaggatctcctcctccaattcaccatgtaagaatgctattttgacatgtatttactccaattcaaggtcattcattgatgttagtgctaggattagtcttatggatgtgtgttttactacttgtgagaagatctctgtgtaatctaccccttctcttcgtgtaaatgtttttgccactaatcttgctttatatctcacatcttctgaaccatgaatcccctctttgatcctgaggacccacttgcagccaactacccatcttcctgcaggttttaaaaccagtacccaggttttatttatcttcagatattcagtctcttcatccattgttcttccccatttcttcttatcaactgacctcatggcttcagcaaagcttctaggttcatgttcaaattgttctatgttcactgcatagtgaatgatgtctgcaaaaccaaacctatggggagctttgtaaggcctcttgtccctatcccttgtcagctaataatcatggacagtagtggctccttgttccatttcatcttctagctcttcttgtgatgtttgtacattgtctgtaggggctggttcatcatttgtttgtgcatgtaatggttgttccaattgtgaatttcttgacaattccacctcaaactacatgctctcatttctgctgttagaagcattatcatgttgagtttaagtgtgtctttgtatactttgtcctcttcaaagatcacatctctactgatgacaaacctattttggtttcctggctcaaggctccaaagcttgtatcccttaactccatctgggtagcctatgaacacacatttcatagctctaggatccaacttccctttcttgtcatggacatatgcaacgcaaccaaaagttttcaaattttggtagtttgcatgatgaccagaccacctttccataggagtttgaaaatttatagctgaagaggggcatctatttattaggtggcatgct

SEQ ID NO: 122560 - DNA, 1992 bp, Cannabis sativa
ttgtgaacccttatattcattttgggcaaagatcagtttggcctaggggtttgccattagagaatgtaggtgagattgaacatgaagagttttacactgaaatttttggtgggaaacagtttattcaacagggtatctcaaatggattgcctgatgttgattctgtgttttattttacccgaaaatcgggcttggaagcctttgacattaggtttgatgagcatgccccaaaggtggcattgccacagggtatgatggtgcctgtgaattcattcaataccctttaccattcttcagcattttgggctttgatgcttcctgtgtcgattagctcgatggcttcggatgtgttgaggggttactggagtcagaggatgttgtgggaaataggtggatatgttgtggtttatcccccaactgttcatcgattcgatagaatcgaagcataccctttttcggaagagaaagatcttcacattaatgtaggtcgtttgactaaatttttggtgtcttggagatcaggaaaacacagattgttcgagaagattctcgagttaagtttcgcaatggcagaggaagggttctggaccgagaaggatttaaagttcactgctgcttggcttcaagatttgcttgctgttggataccagcagccaagactaatgtcattagaattggatcgccctcgtgccaccattggtcacggggatcgaaaggagtttgtcccacaaaagttaccctctgttcatctcggggttgaggaaacagggacagtgacaactgagatcgggaatctgattcgatggagaaagaattttggcaatgttgtactcatcatgttctgcaacagccccgtagagcgtacagctctcgaatggagattactgtacgggcggatatttaaaaccgtggtcatattggccgggcagaagaaccaagatcttgcagtagagcaaggacaattagagcaaatttacaggtaacatgtcatatccatcatttgactttgtacctaactatgtgctgactttaatttaggagatttagcttcatatttacttaaacttgttgaatactatctctaaaatgaagtttaggtaggtaccaaaatttgacaaaactttaagctgtttatctttaatggacttatgcagacacctgcccaagatatttgatttatatagcagtgcagagggatttctattccttcaggacaatactattcttaattattggaatctcctagaatcagacaggactaaactatggattccaaacaaggtaatatgtagttagttatagtattcaatgtgtccccacaaataattattgatgttacatttcctcttcttttgttggcttcatttgaaaggaaaaatgatatgaaattgattctttatctgataaactttgcacttgttaacttgtctctttcactaaccatttcgatttgatttaggtatcggattcttgggttactgtttcaactaaagacagtgattggttttcgaaacaaggaaccatggtaaagaaagttgttgactcaatgcctgctcatttccaagtcaattacaaagaaaccgtgtcgagtgatcaaagcctcacagtatgcagttccgaagtgttctacatccctcgaaatttcgtagctgactttgttgatcttgtgaatcttgttggtgatttagatattcatcacaaaatcgcgatacccatgttctttatctcgatggattcgccacagaattttgactcggtgcttaacaacatgaattataaaaaagaagaagctggtgtaaactcttcaacattgtattcagccaaagtttctgctgttcatccatggaatatatcaagtgaaccagattttatcaaactcataagaataatggcagaaggagacccttttctaatggagttagtatgaaggtaaaataaaccatcttttgatagataggaaaaaaaatacttgtaccactttgttaatgtttt

SEQ ID NO: 122561 - DNA, 834 bp, Cannabis sativa
  modified_base (790)..(807): a, c, t, g, unknown or other
ataccgacggggcacgcctagtgagttttagacccagcaaattacccaattgctcttcatggtgtagaagccttgaaagtccttccgaacaaattaagaagagatatggtgataaggggcaaccttgtctcaaccctctagtaggcgttagcgaaccagtagtttctccattcaaaaggaaagtgaatcgatttgttgtcagacaactcatgataagtgagatctagtggctgcaaaaacccattttctccatgacgccttgaacataaccccattcaacatgatcgaatactttgctcatgtctaatttcattgcagcaacccccttgcgaccagatgtttggagcttgattccatgtataagttcaaaagctaccaagatgttatccgtgatgagacggttcagcaaaaaagtactttgagtttcagatattacatgaggaagaatgatcttgaaccgagccaccaggactttagtgatgagcttagatatgacattacatagactaattggttggtagtccttcacatagagtggtttcttcttcttcagaattaaagtgataattgtagagtttagtggcattggatcagcaccattattgacaatattcaagattaccactgtaactaaatcacccataatatcccagtgttttttatagaacattgccgacataccgtcaatattaggacttttgtcagagcccatcgaacacaaggcatcttccactttagatcgagtaaaaggcttgacaagttcactattcattgttggaaattattttannnnnnnnnnnnnnnnnntcataagtatgttgattaacaccctaa

SEQ ID NO: 122562 - DNA, 1675 bp, Cannabis sativa
  modified_base (1593)..(1628): a, c, t, g, unknown or other
aataaatcatcataaataattaattcaatattaataattaatttccataataaacctaattatctgttaatttccaaattaaagctaagcggtctttacaaccctaccctataatcatttctaaacatagtttaacacttaaatgcatcaaaaaccttctaaagtaaaaaccaccattattgaacaaactttgagttctaaaactcaagcttgctcaaaccagactatagcagctaaaaccctcaaaaaccagccaagaacaatcataaatcaagctccaaaataatttccagctcattcaaactcacacaaaaccgaaattacaaaagacacaccaaaatcaagctgttctcttgaaattttaaaggaagaaataaacttcgatcttattttgatctttgctaacaaatttttccttaatcatatgttgagaatcgcttaggattgatgagttttggcttggaactttcttggttcttcttggtttagattaggtcgaaagagaaaaagaatgaaacttaggtttagaattttgagtttatctaatagctccttgaataatatattaactttcataatataccctttattattatgcaaaattcaataaagataattattaattaaagcttaggtgacaaaaaggctaaaatactctttacttcactactaagcaatatcttaaattaggggtaaaataatcataatcaaatacctgtgtaaccttgatattctaactatccataactctttccccgctaaacctcaaatattaaatcgtaccaaagtgacactatttaccaaaacgtcaaatttccacaattacagtgcatgcaacatgaaatgccaaaatccatgtataacatgtatgacacacctagaattcaataaaatctctgtaattgagaaattataccactaatgcctatttctcacaataggacttattgtaatactaatgcacatataatcataaagactaatttaatcactagttatctgctaattttcatgtctaatgatgtagtcattacacttgcactttatgaagcaagtagagaatgtgtgcgactgagattattgacacaacatatttagaaacatatggattacactcaataaagcaatataagcatcaacaattctctatgatgataacgcgaaatgcattgttcaactaaagctataatgaagaagatagaaccaaaggcaatttcatcaaattcttcttaactcatgatcttaaggacaattgctatattggtgtccaacacattcaatcaagtgtcaatcttgcagacttattcatagaatcattaccaacatcaatatttagaagacaacatataagttcagaatttatcgattagaagatctctacgaatacctaaatgaggggagttatttcacactgtactcttttttccttgaccgagtttttatctaactaggttttctaacaagatttttaatgaggcaattatgatggacatccaaatattattcatgtagaatttcaaatcacccaaatcttctctattaattaccattaattgtagttattattgttggaagttattttaccaggatctnnnnnnnnnnnnnnnnnnnnnnnnnnnnnnnnnnnnaatatgaacttctaaaacgataggaaattaaacaaataagagtatca

SEQ ID NO: 122563 - DNA, 1094 bp, Cannabis sativa
atctagataggtgatatttttgattgaagtatttttctagtgtatttaattaaaatatcatagaaaatcaaccataaccttaacaactttggaaaactaaccctaattcactattgaattaagtatctgagtaactaaggagtggtgcaaaatttccttaaaatatcatttctgagctctatattgcttgaaacacaaacttgagtttatagcgtaacatcccataatctaattccaagcttatccctgagctattctgctaggactttcttatgggctttccctaggtttaatatccattaacttagcatttttgttttatcaagtaaacctggttaaagtgttaacgtaatgagttcgcctaacacgatctctaatcttaacttcgactatgacatctaccaactgagatatttcctgcttaagacttctgccactgcattgaccctcctggggtaataaatggttatgtagtaccaatcttgagctagtttcaaccaccacttccaatctataacccaatctttctgagtaactaattactttaaattttccccatagagatagcttaaccagatcttaagtacataacctctgttcacatgtcccaggtaatgatttgggtagtactacttatactccttcagttgacaagaagaataaacagtaaccctattaactactttagaacactctccaaatcctttctgaatgcctcacaatagaccaagtacttctcttgatttaatagcctagctatcactaaggtggtaaccaattgtaactttgactcttttgaaatcagtttaacgtttgcctgtctatataattcactacttcctcttaattagctttgttttaagcttgaaatcttgaaataacccttccaaatcataacaccataactaatctatcacagaaaacttcagttccaacatcagcgtctgaccttggtcaaagcttgatcaattcaaccttaccccatgtcaattatgatcccattatcactatagaaccatccatagatgttacccttatgttatcccaaaattggcactctgacgtggcatctacttagagcacctggtcggatc

SEQ ID NO: 122564 - DNA, 2141 bp, Cannabis sativa
  modified_base (39)..(39): a, c, t, g, unknown or other
taaaataatttccaacacataaaatgttatttctgatcnttattaactagtaaatctgattattttgaaataggttttatttagggcacaaaatgccaaaacactgctcaatgacatttctcaaagatgaatgtcgataactgaacaacatcctttttcctgtaggattacgatctgaatattgattccaatatttatagttttaactacatcttttaataatatacaaaatattattatactgaacttgcgcttttatataagagaatgttgataaagcaaactataaggcttcatcaccaactagatagggttggcgccaaaaaaatcaaccaaaatgcaggagttggagaataaatgtggaagagggaagatggatgtatgagtttaatagggataacctgccaaaccaatatagatgcaaggaaaagaagagagtagtagagtaatttagatgaaaaatggttgattcccacctacaaaagacaaatcttgccccctttaatcccaccaacgggtgtaccccaaaatagcacacacacaaacactcatttcctaacaactctaccagctcagcagtcaatcccctgtgatgttgaccacggtactcctcctattctttcgagcatacacaaaagttaagggtggcctatcaaagttctcacttctaagtctggtaaactcattctcaactacatctcaaagtattgcacatagtctggtaaacccattctcagctacattccaaatgctaattttcttaccaaatgctaatcttccaccagcgttgggtgaggcaaccaaagagtaatgggggaacatatgagcatttaaaaagaggaaacacttccatgcattacttgaggcaagaattttatttccaaaggttgtatgctttatatatgcaaacataagaaattttttttatatatccttaaatatacatacatacaaatttatctgattcaaaaaggaatgaaaataagttatagggtattcaatatcacagagcacaacatcttatcttatagatgatctattagaaaaaatgttgaacaacccaactgtaattgtgttaggaatactagttacttacaccagaacaaacattaaagaaccacaaacccatcaagtactcaatgatattttgttaagtagaacagttttgcaacaaagtttcattagaataacaacaattataactttttattattcaaagtcactgacttaataggtattattactcaatagatataatccaacatatattaagactaaatgatacccacattatcatcaaaacttatagcagatatgaaataaaattcaaaagaaatttttgttgttatgaatagagcgctagataaaatgtgtacctcaaaacaagcaatctgaaaatttcaaagccagcagctagccagaccaaaccgaaaatttcagcaagaacgagaaacacttcaaattttgagcaatccctatttagactttcgatttccaatatataaatctcaattttaaattcttataaaaaaaagcagaccgaaaaattaagagcccaatttatctagaaaacaaaactgttaaacaaatccaataagttgaattagattaaaccaatcaagttcgatatttttctcaaaaatcttctctattccataactataaatacctatgtctatatatatatgatatatatgagcatgaaagaaagtagcaattgaagcattaaatagtatgtaacgatacatatataatccccattaaagactgtttctcaaataataaattatttctataagtctatttaagaaccgcaatctgtgttatttgaaaggtcaaaaatattagggtagatggcctattctttcaaatgtgtggattcaacctctctaagaactcattttagattaggcactaaactcgaaatctcattgtagagattaaacttaaaactcattttaaagataaaatctgaaacccagtaaaaagatattttcaaacctagaaaaaaattgagagagagagagagagagatggagatgaagaaatttttactaggaatagttgaagccatggatgagtttttggaatggaactgttgagcgagaaagacgagccatcgagagagagagagagagaga

SEQ ID NO: 122565 - DNA, 819 bp, Cannabis sativa
gagggtatgaatagaggcatcatgcaagaacttggactcaatatggccacttctaacattaactacttgggcctcccattatttagatccaagcttaaggatgctgatttcaacttcattcttgagagtctggttttgaagctgcatggatggaagctgaaatctctttcaaaagctggtcgtgctactttgatcaagtcagttgggcttgttgtgcctatttacactatgcaaattactaaactttcaaaaaaacttgcctaaaaaatagatggtatgatcagagatttctagtgggttgtgatcagggaaattagggtattcatttgaaggcttgggatcgcttatgctttctaaaattcaggggtggtcttggttttcgaaagacttttgaaatgaatcgagctttgcttgctaagtgtggggatgggccctcctcaatgaagaacaatctttgcgttgtaaagtgcttagagctaaatatttaagacgaatgtcgttcttggagtgttcttttaaaagtttggactcttggttctggaagagtgtaatgaaatctaaagaaatattgaagtttgtagattttacatggtacggggttctaccctaagtccattgcccccaacccgggggaggtgactaaggttacaaagctatttttagataatgggaattgggacattcctaaacctcaaacctttttttgattcggaaactattagtaacatcattaaagggggaaacctagtagtcatggtaaagataggtgggtatgtgttaggttataattagcctatgtttcgggtctttaaagttagc

SEQ ID NO: 122566 - DNA, 621 bp, Cannabis sativa
  modified_base (28)..(37): a, c, t, g, unknown or other
aaaatgggcttggacagtaaaaatgtannnnnnnnnntgtcccagtatttttgaaaacatttggtaaaaaagcaatatttttgtaagtttcccttattattatgacttatcaattaaataatatattaagtgactaatatttatcatttataaataatataatataaatatgtataacagactaataattagtgtgtgtaaaacaatttatattaattgtcattattttgtaacatatggtagagttattgttactgtgtgtaaccttcacaattatcaccaatattaagtaaataaaggagtgttacacatcttaaattaaaattaataaaagctataggaattatagttgttggagaatgaatgttcatacgcatttatggaatcatcgtattaggttgagtagatggaaacttttaaaattattcttgttgacctcgcttttggccaacgacaataagtcttaattgtaagggacaagtagtataatatagatgtaatatagtgaaataaataaagacagtttttatagaggttcggccccgagcagttcggtaatagcttacttccccttgatttgtattgacttaacaacaaagaatgcaatgattccttttctta

SEQ ID NO: 122567 - DNA, 1420 bp, Cannabis sativa
  modified_base (1389)..(1394): a, c, t, g, unknown or other
ttatcagtaacacatattcgagatcaataactagtaaataatgtactaattttattgacgatacgtaaccaataactttattaataattaataataatgaataacatcagttgctaagtttatcaagaatacatgttcaagatccataaccaataacaattaataccttataaattttcaataatacatattcaagatcaataatgtaatatcccgaaaaataatattgtatttaattgggcatattcaattaaatgtgtacttattctggtaatgaggtaagattatgatcttacttaagttaattagtttgaatttaataaatagttaaataaagtgtaacttattaattacggagattatattagattatgtgggtatcgtagatactatttctgaaataaaatatttttgggctcggcatgagtggaaacttgacggagtggtcggaaatgtcatgacaacataagataaattaacttggaagtataacggactagtttagaattttaggattatcgaattggtagttagttaggattaccaaaatacccttaagtttgattttgagtttaagggttatatggggggaaaatggtcatttttaaggttaggaatttctaatttgtcctatatggttttggctgatattgtagtggattatttaggttaactgttgtatttcatttatcattatagtaattaaaaaaataacaaaatctagaaactaaaaatcaattcaagagctctctctctctctctcctctctttcggccctagaaggaacaaaggggaagcagatttttcatctcattttcagtccaagattttgctaggaatctaccctagttgttgtttaagctattgagttaaattcttgacactttctcctttggttttcttaagttttaagttgaattttggttaggatcttagggtattggggcctgtgatgttaaactgaagtttgataatatttttaggattgttttggggttgtataagtttagattgagtgattttagtggctatttatctagagttggtttaaatgaagatttttgagtttaatttcattagagtatgcaattttgagctaacggatgaattgttgtgaattggtgcttggggtatattatatttatggtattgtattgttctgagatgtttgaacaggtttagaggagttttgtgtggtttttgaggtaaaaactagatttcctatttttgccagctgagaaaccaattaaccggttgtaaaaccgatcaaccggttttgctagcaggagaaaattctggttttagcatcgaaactgatttttgctcgggggtattttttagaacttagattaaggtaatttagcaatatttgttaggttttatgccctnnnnnnaactccatttcaatgtaatctatttt

SEQ ID NO: 122568 - DNA, 706 bp, Cannabis sativa
aatatagtgcaatgcagcactcagtgacattgtattgaaaacgcgtacgcctaattccatttctcacattttcattacaagattactttgaatcaccattcataaaaattccttaatagtaactttttaaagaaaaaaaaaactcaattaataaatcaaaagttgagaatatataagtaaaaatagttgcttaaactcaattaatcaccattcaccattattaacttaagttgtaccgagttcataattcctaaccttcacagcagaaccagactcttccaagctagaaagaaaagcatgtgtaagaaaagggttaaatttctcaggacccgttgcatccaccgtacacgcatcccagacaccaggtgagacatccgagatggatgaaagaactgaaattgataacactttaggtttcccctcactctctaaaacaccctggaaaaaaccaatacaattgatgaagccaatagctactagataagatttaccaacccaatgaacagaaaaaacacattcccatttatagaaccattcaaatagaacaaaatcatacacacacctctgggcttgaccctgccaaagcataactgcctagagaaaaattcaattcttttggctcagcaaccttcttaggaccccaaaacagtgcagtaactctagctgcctgagttgaactcccaataacttctctgaattgtgatat

SEQ ID NO: 122569 - DNA, 1591 bp, Cannabis sativa
ttaatttatctcaatcattattctatttttgttttttgaaatttttatttgcatccaaaagattataaagacattcattttgttattttcaatttctatataaaaaaagataaatctctaatttgtacatatttatttttaccaatttttttttttcacttttttttggtttgaaggaagcactaagttaaattgaacaacatgggttttcacacattgtggttgagttggactacaagagtgctattaatgctctttatagttcaactcatagagtctctcttttaggttgaattatttctgattgtcggattttaatttttgtgataaataatatttgttgtgtttttgttaaacgatctgcgaacaaaattgataacttttggtgactgttacttattcttttgttagtcataactatagtgggggtttgttcctgctcctttttagataattattacagatgatttgtctattaattaaattataattttcttgtgaaaaaatatatatcaaattaaatattttttaaataaacatatttctaaaatattaagacagacttagacaacaaaatctataaaatattattggaataaaaaattttaaaatatatagataaacatctaaaaaaaattatattgaaattaacataaaagaatattaggagtaatttctaaaaattaatctaagttattttttatttaatattatatatatatatataaaaactcttaggaggtaaatataatcttcttcatctttctcttcccttttcctatccttttttctttttgaatttaattttatcactctttctatcttagtctctgtcccccttaccaaacctagggtgaagtgaatcaaaatttaatgaataaatttgagggaataatgggtgaatgaaaaaatttgtgtaaatgataattttttatttgattggagtatatggactatctacaacgatattcctatgcgaatggacatatctctcatcttagtaatctttatgagaatcagccagttgtcagatgatttaaatctctctttaagttggtgaaaatcaattgtaatgcaggattgaatttcgagttgagtaaatccgaggtcggtacagtatttcgtttcgtgatatataatactggttttgtcttagtttcaaatacttggacttgaattgattgcttttctcttaatattgctgaggctttggatatatattctgaggtcatgcttggatgtcgtcttggctttcagagagttatgttggaatctgattgttttactgttatcaatgtcattttttattatgtaatatttgtaatattgttacttattgtaataattttattgatattaagtattattctggactgttaatagggtggctcacactttaactaaattagtattatttttgaataatcattatgtttagctaacgagtctttttttttttcaaaaaaaaaatattgagggaataatatatgggattatttcacaaaaacataaaaacaacaacaaaattacaaaaaaaaaaacggtttcacggaattttaaacatttttataattttttgattttatttaca

SEQ ID NO: 122570 - DNA, 1315 bp, Cannabis sativa
  modified_base (1234)..(1234): a, c, t, g, unknown or other
gaccgagacctggacccagacccgggacccagacctggacccagacccggacccggacctcgacccggtcccggactcggatccggaccctggacccaggacccggacctggacccgacccgaacccggtacccgggaccggactcgaacccgatacccgggacccgaacgggtagttggtgttgagatcgagtgtattaaaaatatattataactctacacaatcaattaatacaagtcaataccaaacattgtattgtattaaataatactaatacaatacaatacaacacaatctaacacagtacagtacaatacattacaatacggcgtaccaaacgagccctaagaacataaaccatgcaaaataactcaataaaaaccccataaacaaaaatcaccatgagagagcaaagtttgagctctaaagttcaaacttttctcaaacacaacaacaccccccaaatcagttctaaaccagctcaaataacatcaaaacaacctctcaaaaaaatcaaacatcacctaaaaccacagaaccctaactccaaaaatcatgcacagaaacctaactaacaacttaagaaaccaaaaagaagtgaactagggagttttacttggattgaaatcactaagatcttgctaagatactcagaattgagctcaaaaagccctaacttgctgctagcttcttgagaggtcgagagagagagagagagcgaaagtatttttctaattttctatttgaattaatggagaaaatgtaatgtttatcaataatatcagaaaaatcatattaatctcccaagattaatcaaataacccgctaaaagacaaaaaactacttttgggtaaaagatcattttaccccttgtctccccatgagataacattgccacctaagggcattttggtcaaatctaatacctcgaatattcccaacattcccaatatttatctaaattgccccacttttactaaaatactaaactataataaaatgtgactctatcggccaaatatcgcgtcccactattaccgggcataaatatgaaaaacataaaatttcatatataacataaataacacacctagaatttaaatgtatctctataaattcataaatcataattaaaagtctaattctaaatcaaactctaattatcttctaattctcatactaaaattaagcggtctctacagttatattctaaataatcaatgatcctctatngatgatctacatcgagtagggatgaatttactgttttacccttcaatgtagtttattcttaaaatacttagctacctataa

SEQ ID NO: 122571 - DNA, 640 bp, Cannabis sativa
  modified_base (36)..(64): a, c, t, g, unknown or other
  modified_base (536)..(536): a, c, t, g, unknown or other
  modified_base (583)..(606): a, c, t, g, unknown or other
ctcttccgatctttcatatttaggatgttaataaannnnnnnnnnnnnnnnnnnnnnnnnnnnntaaaataatttccaacagtatgtgcctgccagcctttctatatgtctgccaaccttttccacattactttgttgttcagcttttcttgcaagggccaggcctccgttgttgaacaagcctctttggtctgacagacatttttggtcgaccagcttattctcaagacctggccggcctacaagcttcccttggccagccaaacatgctttctttggccgactagacatggttggccaaggtcttgatggcatgcttaactccttttactcattcttgcttggcagttttgcttgatcgctttagaactcttgacaggttatataccgtgtaaggtgactttgtcctgctattgaaatattgtattccatgtgtcttcagttttgactatgtggacattccatgtcaagtggacaaaatttagaataacatttgcccccaagttcatgttcgaactgttgggaattattttacnaggatcttagatctactcacagttatgtttattaacatcctaaatannnnnnnnnnnnnnnnnnnnnnnnaacacatataaagttaagaaaaccgtacattgat

SEQ ID NO: 122572 - DNA, 839 bp, Cannabis sativa
gccctctaatatcaaagccattattcccatgaaacaaatgctaccaaattttctcattagtcttagttaagtagcttattttaagataatgaatgtgaacatgaacaataacagaaatgcaaagagacaatccaacgaacaaagaaccctcaaaactcagcatcattagcttaaaaaacttcgttgtttcttcataatggaaaaaatagagagatgtgggtcttaaccaggccctcagataaaagccgggcggcatcggtggggacagacatcttaaccccactgcttcaatatccgtgcacattaccaatgttccttcattatcatccatagcatcggattattgtacacagaataccacaatgtttcttacattaacaatcacaaccattattttaattatgaaaatcaatttaaatgaacttcaataaacccagttacaaaacaaataactcaattaggaagatacaaaccaaatgagcatatatctattttcgcttaatatttaaagtatgtacccatatgtatactatggaaagagaaatagatacctttagacttgtcgacgaagaagagggattcggcgggagcggaggcaagagagccaccggagagagcgtctttagtagacttgtcgaagaaatcatgaatgtcttccgtgcttatattggctctccatgccttcttcccctttctagacgtcttagctttcttccccatttctccgtgcttaactctgctagggtttatgtgctaaatgacgagaaactctttgccaaaaacaataagcatctctatatgtataaaaatataaaggaaaagatttttttttttttttt

SEQ ID NO: 122573 - DNA, 682 bp, Cannabis sativa
  modified_base (27)..(36): a, c, t, g, unknown or other
aataaaaaggattacattgaaatggannnnnnnnnngggcataaaacccaacaatacaaaataaagagagagaagataaaataaacaaatttaaaaatgggttggctggaggttcacagttggacgctgcctgatggagaggatggacctgcactggacatccactccacgatctccatataaaggtcgtgaacggccttcgtattctggatgaagcgatcgagcgtggaaggcattttcctcctccaactgcttattgtcctacagtaggccctcaatttgaaacatggcgtcagtaagttcatcctagagggtctcattagcaatgcccaggtcacggtttgtcaccctgacccgatccaattctttcactggtctgcaaacttcaacagtggccctttctaccagcaaggccgcttgtcaagaaataatgccaaggcagactttaagagccaaacatcttagagtcctaccccaatggagtgccgctttatggagtgggccaacgccaaggcatccgcgctgctgcaggatgcccaagtctccgtgggcaattctgaagtgctcccggccacttggtctaagagctatgaagtaatggcaatctatagaaacttttcgacttctagacctagattttatttatctaaagaaaagtttcaactattccagaaaagataaa

SEQ ID NO: 122574 - DNA, 673 bp, Cannabis sativa
taggactgggacctaagccctaggacttgaacctggaccaggacatagacgtcacttggtcctaaaccctcaccaggtcctaagaaccgcaaccctgaccaggatccagaccctgacaaggaccccaacctaaacccaaaccaagactgggattgagacatagagttgaacccggaccgagacttggactaaaaccaagactcgagacctgaacccgaacctggacccaaagcaggacctaggaactggacttggattgggtacctagaccgggaatataggcctcggaacccagaccccgatctaaatttgagactcaaaaccaaaccaggacctgacctggacctaggaatctgaagtcggacctagacccagactcgaaacttgccccggacccaaacgaggaaatgaacctagatacgaacccatacaacgacaaaacctgaacctggacccgaacctgggaccagaactcagacccaaaacaagaatcaaacccaaacatggaacgacactcggacccgaactcgaacccagatcgggatcggaacccaagacttagacccagaactaaatccaaactcagatcgagattgaaaccagtgactcggacctgaacctagaccaagacccaggaccctaacccacacccggagcctgatctgaccctaga

SEQ ID NO: 122575 - DNA, 746 bp, Cannabis sativa
taacactatttattttagagttaacgttcgctgcttttattttttattttttttgtttgataaaagctgcttgttagttgttactcatgatgactttgcttttaaataaaagaaaaaaatgattgctacatttttctgcgtcattattgttgaaattctttaacacttacagaaatatataaactttcagatttatatacaaatatgttgctacatatttttaacaaaaaaatctatttctaaagaaacctttaatgattcaaagaaaaaagaacatgaattgtagatgagaaatttgattttctatatttaaaaatttttaatattttattcttaaaccaatacattttaaactaaaaaatatatgacacttttatctaaaatcaaaaaatacccctctcataactcagccccattttttccaatccgcatatgcatcggacccccccatcagccccgtcggatccagccccctctctcttcctctctctcaaaccgaaaaaaaaacccagggtttgatggtcggaccatggggtccgatgggtcgaaccccccatcggaccctggttttttttttgttttcggtttgagagagaggggctgggtccgagagatgggggctggtcctcggtggtcgtcggaggtggtggaggtgagccgtgcgtattgtgggtctgacgggtcggtggtcgtcggaggtgagagagaggaagagagagggggtgcgccgtgggtattgtgggtcg

SEQ ID NO: 122576 - DNA, 1594 bp, Cannabis sativa
atttttgtttatatttgagacatcaacttttagtgacttttccagtgactttttctggcaacggtgacttttctgatgactttttcagtgatggcgttttccggcgacactaacttttttggtgccaacgacttttccggcgccagtaaccctcgacttttctagcaaaacttattattgtttacaaatataaaattttcattttttttttacaaaaatatggcataaaggaactatatagatgtaagaaaataaaaaaccctataatctcttaactttatttatttatgcataaaaatgtaaacttttgtaattttgtgagtctaatttttacttggatgtattggttatatgagcattgagcaccttgacaagaagcccagttgaatggcttcttccatggtcaaaatacaatctttttaaggataattttcaaaattacctaaaaacttaaaaaaagtataaaaaatacggtatattacaaaaacacaaaatttacttgcaaaatacggattataagtttgtaaaatcttttacgaaaaattagatattgtatatttgtaattaatacttttgtggtaaaatgtgatttattttttctaaaaaatggtgcagaatgtaattttccatcttttatttcgttcaaagtttcatattttatcacttttattttatattttgtttcttttccctctttctaaaaaacagtatttctcattattttgtttaattatacacatataaaaacatatgtataaaattttcaaacaaatttatgtttcatttctattatttctgatgcaagcaaatttataacattttagaagtggccaaagaaagagttctataaaaataaatagatcttcataatactgagtctttttaaagagttcacccaaacataaagctcttccatatacaaaaatctcttttgaaaaatattattcaaacagttactaaaaagttattttaatcttttcttcttccagtcaaaagccataaaagctgagccaaatggatccataatgtaaaatttcaaattatgtaattagtgtgaaatgaagatttataaaaactggtcatttcaaattaaatttacatcaaaagtaattgcattggatattatacggagatgcatgtaggaaaggattacactaaactgcttgtgttaatatgttctgctcgtttgtaatatgttcagctgagagtaatacatttatgaggattttttatttttacgccttaaaacaattttttttttttgtatttttacggaattttacatagaaactcttattgcaattagggctgcaacttaaatcgcaacaaaaaaatatagcaactcacataaaaactaccggagaaaccactttagaaactcccaagccgtaaatttgaaaaaaaaaagttagaaaaaacagtatatgaagtaatttccctattcattgtgaggtagtgatggggaccctagtgagaccattaagtgattactaatatccttttaatacaaaagccaattcttttatcttataatgattactaccaaaagtcttgtcaattgacatgttagaaagttgaggtttgtttttttttt

SEQ ID NO: 122577 - DNA, 806 bp, Cannabis sativa
  modified_base (770)..(781): a, c, t, g, unknown or other
ttttttttgactaaatgtaactttaaatcacaacaaaaagttacttgtaactaaaacatagtatttagtcataagttgtcattaatttagttttagtcacagcaaatatagtgactaaaaaaaatatttactcagaacaaatcgtaatttttgtaactaattaatacttttagtcacagactttttaattacaatacaataatgataatttataattagccacaagtgttgttgtgactaaaagtaaaaaattttgtagtaaaatcatatcaacttcacttattaaaatataaacttaaatttttcactatatggtgacatagtaattttttttcagaaaaatgttacaatgcactagtagtacttataataccttcttatatgttaatattattattatataatgcaattaagtattgggtctcattttgtttaatgtaataacttttaaagaatattgttaattaattgcaaaataacacatttagaaagtgttaagtaccatttgtagcaaataataatgtttttttttattaatgcacatattattaccccttttaattatttattctcttagagagtataattaatgacattgagataggacaatcatgtagtgacactggttgagttttcataaaataaaatacttataaattaacttaaattacaatctatactacggttgtaataacagatttatattcactacaaaaaactgttacttttggtgacaactttttattcacaatataaattttttgtgactnnnnnnnnnnnntagtcacaacaaaaaattatttgtg

SEQ ID NO: 122578 - DNA, 1955 bp, Cannabis sativa
tcttagacaacattcccactttacacttacttcaatcttaagttaacttgagacttagggataaaatgattcaaaaactataatcatgcctaatatcgatatttctaatatcacatacgattatctcgctaaataaaaggtttcaaactaactcatgtgactttaatgactatcgtcgcattttctatcgttgccgaacaaaaattataaaaataataaatttcacatatggcatatacaatacacttagagtttgataaaatctccggagttgagaattataaccctaataccaattttcttaaaaatagggcccacaatatatatattcatatacaatcataaaataaaagtagtcaatgttaattatcctactaatccatattcgaatcatgcggtcattacacagtagatcaatatgaagagttatatgttaaggagatagtatgcctacatggggctttgaagtccattatttcggatagggatccaaggttcacctctaagttttgggaaagtctccaaagggccatgggtacaaaggtgaagttcagtacagctttccacccttagacggatggccagttcgaaagaacaattcagatattagaggatatactgcaggcatgtgtgtgatagatctaaaggttcgtggagtaagtatctacccttggtagagttttcatatgataacaactattagagtacgataggggtgactccctatgagttattttatagtaggaagtatcattctccaattcattgggatgagaccggagaaaagaaatattcatgtccaaaatcaattcagcgaaccacggggctatagagaaatcaaggctaagatgcttacttcacaaagtaggcagaaaagttatgcagatccgaagtgaagaaacatagaattttaggtaggggatcatgtcttcctatgagtatctccaatgaaaggggtaaaattctttggaaagcatgccaagttatgttctaggcttttgcgtagtaagatttccttaaggttagcttccgcagatgttagctttcacgtagttagcttccgtgaaggctagcatccacgaaggttagcttccgcgtagtaagcttccgtgaaggttagcttatgcatagtaaaattctacgaaggttagcttccacgaagtgagcttccgtattagtggagtttccatgcagggtttacaaataaggtcaatttttgtattttggctataacttttcacttgagtgttcgttttagatattatatatactgttttgaaactcttaagaagctgtatagcatgggttttattttagagtcaaaataagtaggtagattggcagaaaatacttgtttcttttcgagttttaagaagtattttaaaatagacacttatcaattttatattattgtgacttagggccttcgattatcaagtaggtttttctactcaggttgactagaacacttaattgtggaagcaggataagaatattataataaatatatgtgattacatgttatacatttccaaatagataacatatcaataagagcggtttcgatgtacatagaaatgtattgagttttgatggatatatgcttagcatttagtatagtatgggttggcgctatcacatcagtacgattagagtgcttagtataggcttatattatggttaaccatactgtcttgaatgttcgcaacttataacgttggatgcgggatagatttgtaattaggtgtatgggcacctgaatacgaatcgattagatgtttacatatattatactttttcttactgagtctgttgactcacaattattatttacatgtgtaggtaaggaaaagcaaagcttgaacaacagtgagtttggggtgttacgaattttatgtttattacgtaagtgtacgcaatcaagtagtatctcatgcaagtgaggtcgaaccaca

SEQ ID NO: 122579 - DNA, 1057 bp, Cannabis sativa
tgcttttcttactgagtctgtcgactcacaaatattatgttatgtgcaggtaaaggcaaagctgttgttgaacggtagtgagttttgaactggatgaagattatatatatcgagatattcaacttggagtgttggatcttcgggataactagggctcacaattttgtagtctctgtgcgacatcttttgattatgtaaagttgaaaaacatagatacgggatcctagattttataaatgtaatacaatatatgtatatttattaaagtttaaattttatcacttttgataaaccctttgattagcaaaggttgcacagtaattttgaaaaacattgtagcacgactaaactagtagggtgttagaatctctctctagaaattgaaggtcttgccttagccaataatcttgtaaaacttgtgagaaataaaaactcgaaatagacgtagttccattaccgtcgagacattgggagtgaactactataaattttttgtgtctctctatttactaacttaaacatatttctcctctcgccaatctagcgagtgactattgaccaaatttctgcgtcaacatgtataaatctcttcaatttaaattctacgtctgttgctgtacgcaatcattaaaagaaagaattaaaaaatttatcgatgccgaaatagatatgggtattgttgtaattacatgtgtaccatgccaacccaactcatattttgaaaggcacgcaacaatacgggttatgtcgtgctgacccataaaaagatatgggtcgtatcgtgtcgtgtcgtgctatgctaacatttcaaagggtaggtcttgtgtaacgtgcgtgccaagatgacacattacaagctaagtgattcccacaagttggccaagtggtggcacatgttggtgtacatgctgatgcttagtttgtatggtagtggcatttttgtaaatatcttcaatattgtccggattaggacgggacttagtattccccatttatttgggtctacaaatacaatggtgcaatcggtttggcaaaactatgtgatttggtttacggt

SEQ ID NO: 122580 - DNA, 1892 bp, Cannabis sativa
  modified_base (656)..(659): a, c, t, g, unknown or other
  modified_base (1689)..(1691): a, c, t, g, unknown or other
tctctctctctctctccaaaccaccaaagaaaaaccctcactggcgtaactccagagaccactctccggccaccgtctgatcccatgcgccgaaccattcaaatccctatgcaccgacaacctaaacccctaagcaatgttgcccctttcgtcacctttagcccgggatctcaagtcaaagtttgaagattcaaactttgaacggattttttggccccctccagtgtccgttcaataagtcgtcttcaccactagacttagcttatcgagaagaacaatatacactaagccattttgcctagcccgctactttttttggtgacatttttgtagccctgtcccttttcggtgacttttcgatgatattatataccgtttcgacaaatgattgacatgggtggtcattttaatgtatactacccctattgttagtgacattttcggtacacgaatttctactgccaccaatagttaatgtgcaccgtttagatgattttttttaactctaaactttaaatagagtcatattatatgtcgtggactcagttttgaatgtagaatacaatgataataattatttagctatttgatggtataagtgagagcaatatatttaagattagactaaacaattagagctcgggacttgagagctnnnnatcatctttttggacaaagtttaacaacttgagagatgtagagactcaacatgattattggacttgattttatacgtgttgaataacattagacatatttcaatttttatgatttgcaaattgtttgaaaaaatgaaaatttaatctgtatatttttctggactattctggaggcactgagtgccaaatatatttttgtataaatatttatgcaagttatgatttttgagttattcaaaatacagtcgttatgctggtaaattttttaaaaaataaaagggaatatgttcttttgttattcttattaattgcctgcttttggttatactgatgagagccatgttgattatgatttgtgcatattattgtttcacaacctagtctctgtgtcattctaggtagatcaagtgtgcagtcacctataggtgaaagacctagaatctgtacatagagtgaattgaatctaagccctagtattatggtagttatcaggtgcgattactcagtttttggatgtcattttctatgattggtattgagagctagagacttagtggactgtgtggtatgcatttgaagcttggttttgtgattatttgtggtcactctattttatttaatacattttgataatggtgaagggaaatttctaaaaggtgaccatgcaagaatttttattaaactaatggtcctttgatattagttattttcctactgggttttataagctcaccccctattttctcccatttaaggaactcaatttgatgctagtacatgaggatggtactgttgaggaagaaagtcgttattagtttagtcttatattctatttgtcaaactttccaatgaaattcattttgtatttaagcttgaatggatggtatgatgagctatgtactagttaaaaatgaagaatgatggatgctatatattattttggtattttattgacttattaaatctatctattcagtgacttcataactgtagagatattattgttcttttatattgatgagtggtcctnnntttgttactaatatttttttttatcgatataggagttaatccacttatttttaaagaagtattttatgatataaattaaaaaatcatttataatcatagtcaaagtttgacctttgaccacccaagttatagatatttgttgcgataatttgcacacgcaagtgtacgtatcgtttaaagtagtaaactcactaggagtga

SEQ ID NO: 122581 - DNA, 2848 bp, Cannabis sativa
cgttctctctccctgttagtgaagtaataccgcccaacacttttgtatataatggagtctaaactccctgttggagctttaaataaatttgcttcgtgtcttaaatttcctaacagtctagaggtcccacgtgtcgggctcagtggtggtcttttgttgctctagacacatgatgtggatgtaaccttattttcttataatataagttattttcactgttatcttaaatttcccaattctactgcttttacttttacagctttttatggtgcaccacactctcaaaataagctgcattcttggcatttaattgaccgacttggtataaattctcggttacaatcttggctcattatgggtgattttaatgattacgtttccctttctgagaaaatagggggtgacatgtctcgtgctccatccacacaatttcaatcctttgttgataatcatgcatgtcaccctatttctcctttaggtaatcttttcacttggactaaccgacaaaaacaaccgtctcacacccaggaaagacttgactggtgtctctccaatgctaattgggatgtccactttcctactcctcgtctttatcatggcgatttttttggctctgaccatcgaccacttattatcacattgcatcactctgttgaccaatctaatcatgtcccccgattcatctttgataggctttggatgtccgaacctgattttgagacttgccttcgcgatgcttggatgctgaacaaccagaatcatcattctaatccattgattggattcaatgaaaaattgtctaattgttcgtcccggcttaagcaatggaagcaatctttgggacctccgcttgctactcaaattcgtgaagttcaatctcaactcaaagttgttcaatccttccctcgacccactaatgataaattagatcagggaaggaagcttgaaaaggaattaaacagtttgttgtagaaagaggaggactactggcaacaacgatcccgtgtcacatggctctagcttggtgataaaaatactcgatactttcatcgtatggcttctatgaggcgtaacaccaacaaaattctttctcttcaacgctcggatggttccatggctaatgatacatcctccattttgaacactattgagcagtattttactcacttgtttcaaagccaatcccatgaggatgagatcatcaactctgttcttccaggcattattgaatgtcttactgaggaagaaattgaacttctccaagccaccttttctgctaatgaaattaagaaagctacattccaacttgctcatgataaagcaccgggtctggatgggttcagtggttgcttcttttaaaagaattggcacttgttcggtaaagatatcatcactgcttctctaaactttctgaatggggatgcagacttagcggccatcaataagacgctcattgttcttattcctaaacggccaaatcctaaatagataacagattatcgccctattagcctttgttccacgttctacaaaatcatctctagggttctgatcaaccgtcttaaaccaattcttagtcgcataatctctcccacccaaagtgccttccttccacaccgtttaatctccgataacattattattggacaagaggttatgcactccctttcccaccgtaaatcgggtcgattgggatggatggccctaaagcttgatatggccaaagcctttgatcgtgttgaatgggttttttttcgtagagtaatggagaaattttcttttcgccagcgtttcattaacctggtcatggcctgtgtatctactacaactttttccttctccattaaccaacaggttcttggacaagttaagccttcccggggaattcgccaaggggattcgctctccccatacttatttattcttttctctgaaggtctttcatctctcattcatcacaaaacccagcagcgccagccacaccgacattcacttagaattaaaattcccaggagagccccgactatttcacatcttttctttgctgatgatagccttctttttagatctgcttctcctgaagctgcgactgtcatcaagcatattcttcatgattatagtcttgcctctggacaattggttaattttactaagtcggctttattcttttcaccgaatacgacccctgagatccagaacccagtcgctactatttttggcattcttgtttgagagaacatggacaaatatttgggccttcctcaaacttttggaagaactaaaaaggatgccttcaattacattaaggatcgtgtttggtctcatttcaataaatagaattccaagcttttttcaaaaggaggtaaagaagtccttttaaaatcggttgttcaagccattccttcatatgctatggcttgctttaggctccctgcctcctttcattctaagcttgagtctctgatggctcaattttggtggggcgaaaccgagcataaccagaaaattcattggaaagcttggtccttcctttgcttttcaaaattccatggaggtcttggatttcgatctatgaaagctttcaatcaggcgatgttggctaaacaagcttggcggcttcttcaatatcctcactctcttgttgccactctccttaaatcccgttactttccacactccagtttccttaactctagcaagggccatagaccctcccttgtttggtccagtatcaattggggcaaagaatttctctagtcaggtcttcgaagatcaattggtgatggtaccaccatctccatctttaatgatgcctggattccaggatatggcaaacttccttatctta

SEQ ID NO: 122582 - DNA, 1310 bp, Cannabis sativa
atttgagtttatctaatattttagtcctagtatttttttggatcggatcagatccatctaatatttcaggtccaatatgtattggattggattggatccatccaatccaagaaaaaatcagtttaatttttattgttaattttcatatataaatatatattttacgtttaacaatataaaatttaattactcatctaaactaaatgaaaaatagtaatgagtttgattagatgttggaagtattagagttttagacacctcatccaacatcagatccaattcaattggatatttaaaaataacatccaatctaatttgattataattggatatctaatgtttgacggtcggttgtaatttgatcagtcaattattattggattggatcaatttatggacactcctaagcaaaagtgttctttagtgggatctttcacaaaaaaacgttggtaaaaatcaagaattttcccggttatatatttgtaaaaagtgcccttaaaaagttacttttgttgatgcacttctctaaagtatgaggaaaagttttgtttcttgtagtcttggttggaattttaaagttttgtaataataatggtcatttcattgtattgtaatcctaagcaggaataataaagccagttgtaattgttagaaactaataaaatataattaaaaatattttttttacttttttatttttattaaatttttaatatttaaaataattaaactaatgacatttttgtcagcacacttaaatcaaacatggttctattgctattcccattacaatacaataaaacaaagatcaccgtaatgttttgggaagacaacaaataatgtttctgtgcatatgatttgaagtttattgggctgaaaacaaaaaaaaaaaagtaaaatggctggacttttgtgatactatcgaatatcagaaatatcccctcaactttttacgcagtaggtttaatcactttttttcgtcaaactatgtgagagaattcatgctttaattaaattttttaaaaaaactaatcataaaaaagactagtaaactttttaaggtaagagtttgtgtagtttgagaaatatttttaagagggtcttgcttaataccacctaaaaacatgtcattttggattgattagctataccttatcaaaattattacattggcatgttcagggccgagctaggattagataatgggggccaacatcaaataacacaaataaaattaattggagattttggtgattaaaactcatttttaaggagtgcatgtccataaaaaaatagggtaaatatcattt

SEQ ID NO: 122583 - DNA, 1069 bp, Cannabis sativa
  modified_base (812)..(822): a, c, t, g, unknown or other
ccacgtgtcccctctcgactggtccacgtattttgggcgaattctggagcaacagtattaattagtgtataaaagataaaataatctaaaaaataattattacttttttccttatcaattattatataaccatttgaatttattgattccattttatatgagttttctatctataataatttaatgagtgtattaactaaattataaatttctttttttaacaatattataaaataaaataatattggaaaaattagaaaaaaaatgataaaataaagaataataagaataattcatataattcgtcattgaacaaacaataaaattatatagatatatagatatagataatagatttttttttaaaaaaaaaaacatgttaacaataatactaatacgtaatacctagtattagtaataataaaagaaagattttgatgtgaatattaaaatcactatattttgaaatggaaaaaaatatagaataaatgtgatgaagcataatatattttgtaaacatattaacatattaccatgtttattcttaaaaattaaaaaaaaaaaaaaatgatgaagtataatataatttgaaccgcttacatggtatttcactaaaagtagaggttgatgaagcttacaggagatttatcatagccttatatattagataattttttattatagatttttgcaacttgtttcgagaatttctccactctgtgtagttcttttgtgtaattagacataattttttatctaaaacttgtaaaagtttatttttgttagaaaatattttaccagtatctagattnnnnnnnnnnnatgtttattaacatcctaaatataaaaataaacacataacacataagagtttagacataagagtttagaaaactttagaaaactttacataaactttacattggttgcagcggaatataatgactcatttcgctcaaaatcactagcccttgattttattctgtcgcagagcattatcaagatctgagcctggatctctttctctccttcgggtttggttaccactgtcttactcactatgattgag

SEQ ID NO: 122584 - DNA, 1927 bp, Cannabis sativa
  modified_base (83)..(97): a, c, t, g, unknown or other
tttcaaatataaatatttaattttttcaagaaaaaaataaaatcttaaatgaaattagcaatacgtggctcggcacgtacatnnnnnnnnnnnnnnnatatatatatatatttttattttacattttatatggtatttattttccaatattctaatgaaaaaaaataccattattttacaatttccaaattgctattatttaaattaaagttgatgtcattaccgtatctcacttgtaatcgctgtcatcattgtatcttatttgtaattgtcactattgatcaaaataaatttgctctgtgcataaaacaaatcatatacttgagttaagtaactactaatattttatacataactgaatgattttgttataaagagtttttggcagttaaatacttccaattattgtttcatttgcacttaacactcaaagcttagattttggcagtaaaatcttctaaactgaactgttagcaaatttaaagtgtcatccagttaattgccatcatagactacttatgtgtacactcttgtacatgtgacacgtggcagttaataaataaataataatattaggtgtactaatattaaggtactacgtgtacaagagtgtacacataaagagtccatgttgatagttaactttaaaaaatagatgacacattaaatttgctaacaattcagtagtttggaggaatttaccactaaaatttgagctgaaaaggttaagtggaaatagaatgatagttgaaatggtttagctgcaaaaaactctattataaattccttacttgcatatttctaagtgctttggcattattgtaatgaaaaactaaatatagctcgattctcaacataatatttgaatatagccatatacaactaaaataaataaacgaacgttagaaagagaaataaaattaaagtaaacactaaattatatagtaaatatatcaaattttgtaatatacctaaatattcaaatcaaattttaagaagaaaagaaaaaaataattcaagcatcaagaaacggaataagagaacaccataaataaggtatagtagcttaacaatattacatggttcaatttgtggtatataaagcttaatgatctctcaaaaaaaaaaattgagaaatctataaaggaaaactcattatataatttgtgatctaaaaaatacagaaaagtatgagatattgtcaaaaaaatatagggtaataaaaaagactaaattaaaataaaaaaatttataaaaataattgataaaattgaataaaattcaccataaaatttcctaattataaattgagaggactttgaagaaaatagtaccaaaacttttatagaatagtagtagtgtagtagggtagaattatgtctatgataaatcaaatcaattttagggagcaattaaatgtataagagactatatgtatattgatattttttcaaatgttttttatatagatattttgaatttttttattattttttttttaaattcttgaatcatacgattatattaattatttatataagatttaatattctttgattttttttttgtcaaatcaataatcttaatttgagatacaattaaattgatttttttatataagttcaaatagtctttgatttgaaatagcatacaattttttttaattaatttaaatgagaaaattaaatgaaattattattttgagtatttttagagtgttattgtattattttaaataagagattaatagatagagttattttgagtgattttagagtgacatatcactcccctatttttctactttatatatataaatatatatttttattgtccttcaacgccacttatatatatactaggtgattgttacgtgccaagccatgtagtgttagttttatttaatattttagttttttattttaat

SEQ ID NO: 122585 - DNA, 1888 bp, Cannabis sativa
taaaccacctcatatatagaactctgagcattggccactagtggtgtctagcgcctttagacatgtcacattgtgattgtttagaacacctccgactcctatgataacatccatactaaaaatttacacatcatctattaaaataatatattattttatctttcacactcttacttctaaagacactctttaaaatattataattatgacctcacatattattatttaatatatatatcctaatttttagctataataactttttagctttatttttttctaaaaaaaaataaataaatagcatcaatgctacaacatagtgtccatgcaaatttttagaatgacattcttttctcttcaatggtatagcatcttaatattttgccagataatatatctaccttacaagcatcttttaaaattttaccattggagatgcttttagcgacactttttaaaaagttataatattaaactatatgagacccgatacttagactaatagcgatattaacacataaaaaatgtgttaaacactaataatactctttaacaattctcatagaattcgtgaggtgtctttattaataaatgattattatctacacagatacaataataactaataaaacactatttagcaaaaaaaaaaataataataataaacactaaattggactatttatgaagtttgtaataatattaattacaaaaatcttatctcacctttctttttttgcctaaacatattttaactacagtaaaataatccattaaaaaaactacagtaaaataatgaatggaagagagaaaaaaaaaacagtgaattagaaatcatatatttttaaaattaaaaatcatttaatcccttggttgttaattttttggattggttaattgactttaatgccacttttactcataatcatattccattgtttgaacacaatgtataatccctttgaaaatagtcacttttatttttcatgattgatagatatcttgcaatatcagatctgggccatccatgtgatcaggtatttcaacggtatggatttatatcatcagattataattggccgattcaaactctaaaacatggtatgcactatatgatctatgactttaatagaagaaaagtataaatttatgacttattatataataatttcatgatcataattgggctccactgaattggcagtccttttgttattgggctccattaatggttaggttggctctgctaagatttaaaatggagatctatagtggttattcgaatttcaaaatatgagtggggcctaagtcttaattctaataaaaataatattaagaaattataataaatgactacaaaaataatatataaacgcatatatccaaaaaaaaaaaactacaaattattgtactattactaaatgttcctattttaaaaattttctgagtatccctaattcatgtatgttggacaattaataaggttgcacatgaattagcttggcatgctcttcggttggataaagaactagtatggtttaatgaaattcattcttctattgggatttcttaaaacttaaagtttgtatgacattatgattttttttaacattcattgctacaaaaaaaaaaaaatcgttgataaatggtcctttttatagtatttattattcatattgtcttttatcacataaaaaaatcattttttttcatatttgtttttagaattaaatgtaaattatttaatattcttaatataaaaaactaaatgctacttgtttcaaaaaaaaaaaaaaatccagtactcaaaataattttcacatatactgcagtggttcacgcagttatggtaatttaattttgcatatctcttatttttttttttttt

SEQ ID NO: 122586 - DNA, 771 bp, Cannabis sativa
accttaggtattttcaccgccaatttttgaggttgaggactaatcggcatcaacctcaagtttttggggacttttgccgcaattatcccatttgtaaattacgaatgtttttctaaaaaatgtgaaaatgattttttttagaaaaaaataataatgcaaataagagagggtaaaatgggaatatcaatatacttttatttgtttgtttatttttatttcttcagaaaaacggaaattcctttttcagtctcagagataacttagacgccaaaatccaaagaaacagaccgtagtggtagcccaaatggctcaccttctcaacacttccttcgcttcttcctctcaaaccttcggcgggaaccccaatttcccaccggcactcctcatttctggtcgccggagcagggtccacgtccaggctaagaccaagaacacggtattctcatcacctatctatacagtcacctatctatacagttgggtacactatcaccattgatatagctcatgatatcagtcttctccaaaactttgggataaagctcaatgggtttctctttgttgtgtttattaggttgatttttattcgttttcaagaaagtggaaggaattagttgataaggtccaggccaagcagctacaacctcaagaattcaacaatggtaaaataagattatgtttgcaagttaagaaattggtggaagtcttataaattctggacgtaatcatttttctttattattattatattattattattatttataagta

SEQ ID NO: 122587 - DNA, 1857 bp, Cannabis sativa
  modified_base (394)..(397): a, c, t, g, unknown or other
tcagcttagctcttatttggacttgtaatcaacacaggattccaaacattttaaacaagttctaattaggatttttgcccctgaactttgacatgtactaaattatgcctcctgaacttttaaggtcgttaaaaatgctccctgaactattgagattgttggatttaaggaattttgtctaatttcattcaattttactatttcactgattgtttatgtactaaacaatgctccctagatattaatatctaccaaatcatgtccctcgaacgttgatatgtactgaattatgtcccttgaactttcatttatattagactttttattaaaattggaaaaaagtccttaaatccaacaacctcaatagttcaaggggcatttttaacgaccttannnnttcagggggcatgatttggtagatgtcaaaattcatggaacaaaaatcctaattagcacaatgaagctgtcatatgtttcttaaactattccctcaattactaccagttggaggtgattaatgattcataagaacaaataaaggcttagatataaggctttcaaacaagcaaaaagcaaaacacaaacattctattgcaaaaatatggatcatgaagctggggccaaaaatacaagaattgattaacaaatataatagagaaaccaatacctgattaaagaacggccaggactccatattttgcgccctacatgtgtccacattgatagcttggtagtttgcaattgatcttaaaaatttaggtatctgtcataataacattatttatgtcaacaggtcattttactattaatgtgacaagaaactgtagtatcaattgccatattgatgtcttggtagtatattctcttcttgtgccaaacagaaaatccattgatgtattaaaaacaaatgatcaaactaactgccaaaaagatgaagtaacataaaatgactaaagtattatccttttaaaattcctaagaagaaagataactgggaaagacattacagaatttgagactatgtaaaaatgtgcagaccttttgtgataaaaaagttgaagaaacaaagaagagatgtttatgtttttatggagagagtgcattttcctgaggtgtgttgtaatttttcatccccaacacagtgcaacaattctacgtgaaaaagaacataattactttatcattacaaaagtaagcatataaaatcaagattttctagttttgggtttaagctcacgaccaagcacagggctagaatattctagttttgtgtttgttgttctacttgtctgtcactaagaacactaagtacaatctgatataacaaaaaccataaacaaagtgaaatgaggaattgaaattcaccccggcttgcgaaatcgatcttgacgtagtgtataatagttcccattttccgttcaataaatcagatttaagtggttcctttgttggattagctgcttcaagtttgcgggcaatctatttagagaaaatccaagaatcaaaacacaaaaatatatacacacattagaaataacaatgtcaattgtatccaagataaattacagctcaaacttttccataaaagaatctatcctatgttagaaatttaaataaaatgaaaatgaaagtaggttatacaattatagtgatcaaagaggcctaaaggaccatagaacaatcaacattaaaaaaataaataataaaactagcataactatctgcagccttttctttctgttgaatccaactttataatttttatagatcaatgcctaatcatttaataccataaaaaatcacacaagatattgattatcatccatacaaaacaattatcctccaaatatttggggt

SEQ ID NO: 122588 - DNA, 660 bp, Cannabis sativa
gtgtaagaggtattttggtaattaaaatcacatatatgaaggtatttttgtaaataaagtgtcaatttatattttctatgtaataattctaaaaataatttggaaaaaaataagtgattatatttgcatcttttttttttttgaaacaaattatatttgcatcttgtaaatgtgtaaatgtataatgattttcattcattagcaaaaaatattaaacaattttttttaaaatatatatatatatttttaatattcattttcaattttattattattaagttattttttattgtagcattttcttttatttgcctttataatattttaaaataattaattatttttattttagcttgaaatttttcatattttttgtgttttaatttaataaatatttaaatatgttttattcatatgtatcaatatctttattatctttatatataaagtgtattatctagtgatttttgttagtttaacggaatattttaagaatataaaaaatattttgttaaatttaaaagtgttagtaggattaattttataaatattaatattatttattttaagttatttgaatttatatcaattttaaattaatttatatataactattaatatattattatgttttattgttatttttaatattgagagtat

SEQ ID NO: 122589 - DNA, 1964 bp, Cannabis sativa
  modified_base (1083)..(1083): a, c, t, g, unknown or other
  modified_base (1901)..(1926): a, c, t, g, unknown or other
tttttaaatttacagtttaggttgctctggtagtttttctggtagtttttatgtaggtttccatataaatattgattacaatataggttgctccgttagttgatatatgagtttctgtgtgaaattcttaaaaaaatacaaaaagaaaactgttttaagtgtaaaaataataataaaaaaaacctattttaatttatataataatattcaatattcattttatatctgaaagttgatattaaatatttaggtataacataccaattaataaaaatatgacactttaagtggtactagatattgctaatgtcttttagcatttcttttatttttattaatgtgcatgtatttttttttattatagtaccctaaaaaatttatttttcttctttttaactgtttttgtttaagagcatctctaatgaaatactataaatgtagtgtataagcatttttagcctatattttgtaaaatttatgctaagtttgacacaaatattaaatttgtaaagatgtaaaattgagtttgcgcgctaagttagctcactatttataattgtactccaatataaagatgtaagaaaatataattattattgatcatcatttaatattatattgaatatatacgaacatcattattttttattttttttattgcgtaaatgatagtaatatagtaaataaaaaaaataaagttatgtaaaagtcaatagttcataataattagtgacattatattaaataaaaaatataaaatttattgtgggctaaatttaacttaatgttatatcttttgtcaaatttagcacaatacactttttaaaacaccattgaaatagtatttttctttaagtgaactaaaatatagtaatacactacatttttagcactccaaaaccaaatataatataaatttagggataattccataaatatgaagaaaaaaaaactagtttagataaataataagaaatcttaataggaaaaattatagcatttaaaataaaaacttaacatatatgggattgaattactatagaagatattaaaatttctttcatatattttttttttaaaaanaataaaacaaatgaaactacaatgatcgtcggagttgtcaccccttaccggaaaaggcaccagaatttgtttttgaggccggataaattgcaagagttgctttcggcactggaaaaatcgttggagttgctgccgacgtcagaaaagtcatcaaaattgacattattgctgaaaaaattacagaaaaaattactaagaaactgtttcttgatgaagaaaccaatttctttataatttttcggcgaaaatgccaatttcgacgaattttccagaggttgctgtcggtatcgagaaagtcgacagagtagttgctggtatcagaaaagtcgtcggagttgctaccgacgccaaaaaaattgttaaaattgacattgtcgtcagaaaaatcatcagaaaaatcactaaaaaagtaactaagaaactgatttcttcatcattaatttttccggcgactatgccaattctaatgacttttccgaagtttgctgttggtgccgaaaaagtcgccggagtaactcccagtgtcagaaaaatcgtcaaaatttgcattgtcactggaaaaattaccaagaaagtggtttcttcatgaagaaatatttttttagtgatttttctagcaacaatgccaattttgataaatttttcggcatcaacagcaactccgacgacttttccagcaccgacaaatactctagtgatttttctggcaccgacatcaaactttgacgactttccggcatcaatgacaaataaaactaccaaaacaaatacaaacattaaaggctaattaggatttttaccccttgaactttgacatnnnnnnnnnnnnnnnnnnnnnnnnnntaaggtcgttaaaaatgccccttgaactattaagattg

SEQ ID NO: 122590 - DNA, 1429 bp, Cannabis sativa
gggcccaaaataatttttttttttatggcccactaaaagtgagggccggccctacccatatatatatatatgtttttcatgtatgtgtgtctgatttcttttaatatgatactatgcggctaaaccaagatatctaacaatcaaatcacattattaataattattaactaaaatatatattacttatgcactaattaagctagctactaaagaataaaacaaaatacaaagaagaacaagaatatccatctcattcttgtataataaagaaaagttcatatatatcaatgacatgacaagttttttgtattttattttaatgggaatgtaagcaaataatctttaatgtcacaaatagagaaataactcattattaaaagaccctatctttggtaatataagaagatacaatgaagaacacttacactacataataaaatatgtatatagttggacacactttttatatttatagtatatatataaatattatgtgggaatgtgatcaataaatggaactaattattatacaactattataatgacaacatgataaccatcttgaaagccgcctatttgggtcgtctaataatttttatttttatcatttattcttttagataaaaaggtttaataagtaatcaaagtaaaaaataaataaataaaaattaaataaaatagaatgatgagagagaggcttccaaagactaactttgtagagaagaagccaagacttaagaaggagggcccttgagatttgacacaaccaacacagccaactcggtttggtcggcctcttttattgctttgtgcatttgcatgtgggggccactttttcatttacaaggaaaacatataatataagattaattattagtttgatcaaacttttattttgtgaaataataaattaggttttatatatatatatattcttttaaaaaaaatataatctctgatcataatattatattaggttatattattattaaattttattttgataaaattttagttaaatatattattataaaaattacagaatctaaattattatttaataaaataggtaatatatggtcaaaaataatatttattctgtaacatattcgagttattagtagttgtaaagaccgcatatgattaataccttgaattatcaaataattagggtttatgtatgagattaaattaataattatgatatacatattttggaaatatatttaatattatatatgttattatgctatttaatgtaattacttaatttctgtgattgtgttcggaagctgtggaaagcgacgtcgggcctttagagagtcgtattttatatgggttagaatattattggggtatcattgttagatattagaggtgttagaattttcggggtttggtaattgaccattttacccttggtttgttt

SEQ ID NO: 122591 - DNA, 4082 bp, Cannabis sativa
  modified_base (4038)..(4046): a, c, t, g, unknown or other
cccccgtcgggtaatacccgcccctcccccgctttaatttaaacgggtattgggacggatatggggtgaatttaagaagcgggtatgggggtggaggagcgatcctcgcacctgccccgtttacatccctacattataagtgtagcatgtttttacgtgaactgcaagtcgtattgttattattaaaatgttaatttatattgttattattgtaattgttaaaaaattagttataaatatacatcttattttaaatataaattaaaatatttagagtttgaagtcgaattgaaatattacaacaatagaataattatatattaaagattaaattattgttattattattataattattagaaaattagtttttttttttttgagaaaaatttcactattattataaattaagagtcatttacaacagtagtaaaaatatgatagggaatttctcctacccaacaaaagtcttggtccaactctaaagcatgttttgctaaaccatgggcgacatgattagcatttctcatcacatgagaaatagtagcttcagggaaaaaggacaaaagacaacaaacatctatgattaaatctaaaaaacatgataaatctatagatgtatgaattaaagcattaaagactcttagtgaatccgtctcaatatgtgtgatttgtagctgctgttggagtgcccaattgagactatgaaatagtgctttagcttccatttcatcagaatggaagcacccttgagcaggctttgagatggcagcaacaacaaggccattatgatcccgtacaatggcacctactcccaaagtttgcgaggtagcattgacggctgcatcaacattgagcttcaagcctgctgcagtagggggctgccacgaaatgtccttgcttgcttgttttttactggtgtgtgcaccagtaggtgaaacactagttacagcaggggctgtatgggtttgccttgtagaagcatgatactttcctaggtaatcttgagcaaaacttgttgtaatcttcccttctttaagcactcccccatgtaacactttattccgatgcgaccatatcgcccacattgtgcaaacattaagctcgaaatctggttgtgagtgaacattggagaggtgaaaaataaaatcaccatcatgcatagcttgtgcttttctgaaatccattgtgaaatccgagtgtttccatgtcgatttggcatgtgggcaagtgaatagagcatggcctatagattcccaagcattagagcacgtggaacatgcaaccgagtcaataactttcctgcgatgtaaagcggcagcaattgggatggcactgtatatgaccttccaagcaaaaattttgatcttagacggaagtttcaagtgccaaaaagatttccaccatttgctattcaaatctgaagcagaggcttcttgttgttcatctaaggtagcagctaagtggaagcctgacttgactgcatatatacgcgaggttgtgtgatgccatatcaatctgtctgaattaggaaagaaactcagcgggattgagacgattttatccacatctaactgaccaaaataatttcccagcagccttatatccactccctttcttctgttatgaaattagcaaccaacatagagggaggtcctatgtaagtgatgggtttaaactcagtaaaaccaggtatccatttgtcttgtccacactgaatattaaagccatttccaactttgaatctcagcccttagaggagaagttcacgaccccaatggatgctttgccatgtaagtgaaggagaatggcctaggttggctcccagaatagaattgttagagtaatatctacattttagaagctggcttaacaatgatgtaggcatttcgaaaattctccatgcttgcttggccaagagtgcctggttataatgaacgaaagatcgaaaacccattccaccttcaaatttcgacttacaaagcaatttctatcttttccaatgaattttggagccatctttgtttgaaccccaccaaaaattagccatcatgctttccaattgttgacaaaaagttttcattaagcgaaagcaactcattgcataggttggaattgaatgaacagctgctttgagcagaacctcttttcccccaaccgaagacaacttatcattccaagcatgcatcaacttccaaactcgttctttattatgactaaagagctcttttttgtcacggccagagtaagaaggcaatccaagataacgctcatgacactcgctaattggcatgttcagtgtttgatggaaataactttgcgatgcaactggagtgtttggagagaaggacataaccgatttttttattgttaagcatctgacccgaagcacgatgatataagtttagtgccctctcaattgccaatgctgaattattcgttgtctcacaaaaaagcaagctatcatccgcgaaaaggagatgggaaacagagggtgctctcctagtaaggcgtaatccttggaggttaccaatagcttcttcatgttgcagcagtctcgagagtccttctgagccgatcagaaaatgatatggtgaaaggggatcgccttggcgtagacctcttgatggtttcacatagcctgtaacttctccattaagggagaacgataaacttgaagaggtcaagcaattctgtatcaatgcaatccaattactagcaaagcccattttctccataactgcccaaagaaaagtccactctacccgatcaaacgctttactcatgtctaacttgagtgccgaataacttttaccacctcttgttctgtgttggatatggtgcacaagttcaaaagcaaccaaaatgttatccgttatatttgagagaaaagcgctttgagtctccgagataacaagcggtaaagcttccttcaagcgcaacactatcattttagatacgagtttgtagatgacattacacaagcttattgggcaataatttgtcatagcagcaggtgagttggtctttggaatcagtgtgataatagcattattaatctattccatgctttggccttcgttgagtatccctaaaaccacttcggtgatggaattacccacaatgtgccaataattttgatagaacatttctgacataccatcgcttcttgggcttttctcatgactcattgtcttcaaggctgttgtaacatctgctacgataaaaggctgggtgagtgtgtcattaatttttgcagtaattgttgttggaatggtagctgtaacaagatccaaggcttgaaggtcaatcgttgaagcttagaagagatcattgaaataatcttgtataattgtggtcattccagcctttgatgttatcttattcccattgcagtccataagagaagagatcttattccctaatttatgcgatgaagcatgagcatggataaactttgtgttttggtctccactttgtaaccaatcgactctagaccgttgttgccaatactcttcttcttgtgccaacaattcatcaagaacacttaattcatccatggtagaagttgttctagtcacgacataattcaagtttgaaacttgctgttgtgctctaccaatatttttcttaaagtttccaaacttagatacatgctatttttgtaaagaactagcacaagctccaatatcgtttaaaaaaatttccatggcagtacctgagtttggagaaagtcattgttgctgaatgatgtttgaggcttcttcatgtttaagccaaagttgttcgaatctgaaccgtgtatgtcgtttttgctgttgggcttcactatgaatcgggtttactatgactgcaatagctctgtgatcggagttgtaataattcaaatggtgtgtcataatgggatcaaaagtatttgtccaaagatcattcacaaaacactaatccaatctttctttaattgtgtccaccaaatgtcttcctttaatccatgtgtatgggtcaccctcgaaaggttgttcatgttgggttttatgnnnnnnnnnaaactctatttcaatgtaatccattttattcaacat

SEQ ID NO: 122592 - DNA, 1415 bp, Cannabis sativa
taaccacatgatctaaaatcaatgataaaaaaaagttccctaccggtaggaaacttttgctaggtcctactataatcttgccctatatatatatatatatatatgatattacataaaattcaaacaaatgaagcattttcttttctaaccccttgaaatgaacaattgatacaatgaatgtgatatttttgtttgcattattctttacttggtgtggtgtaatacaattgactaaagactttaatttccaaccaacaaatattattatatttttaaaataaggaaacatacattttcaatcataaataattatgtaccttgacttttgtcaaattatgcattaaaaatttaatcttaatttagtctttatatacagtatattttcattgagactttagtgttcaatagcacatattatatattatatattgtattattaatgtgattcttacatattttaatttaataattattgacaaagcttcactttaataatagtattaaacactattatagtaatttttattttattttctagtattgttattagacactaatagtacctaagatctaagatattatgatgtaatgtgatatattaaattccactaattaataataatatgtgatattttataactttataataacaccagtagtgttatttgacattttttttcatatgaaattggctctctaacttttcttttctattatgtgttgtgtagtgtagtaaggaagtttttatcggcatccttctttatttcaataatttgaattctactataattttttattgtgagagattatacttaactttttaaaaagttagcttatgacagtgttatttttaacaagataataactctcaaactacatactgatgactttattaagataaaataaaacataaaacttctataattggcacgaaatctccaaaaaataatgtgcaccaccacattatctttttttttgttttggaaaagaaagaaaatattttcatttcttagtaagagatataatgagataggtatcgtataggtatacgctacgtacaatatttatgatgaatcataataaattccaacctacccaattcagtgccatttatttctttaatctctcaaaaaataattttaaaaaaattccaaattggcataaaattgtactctatatattacaagataaagaatattgaataaaattttcagactttgctgcccactttagtttcctcgtcaccatatacttttttcatatttatagtagccgaatatttaattttatcaataataataaattaattagtaattttttctttctaattttgacatgtactaaatcgtgttcctgaacttttttggccgttagaaattctccaaactattaagattgttaaatttaaggacttt

SEQ ID NO: 122593 - DNA, 2586 bp, Cannabis sativa
  modified_base (2514)..(2541): a, c, t, g, unknown or other
tctctctctctctctctataactgaagatgacgatctaaccaggttccttctcatttgaggctccttctccatttataggcaataggtttgtgttagaatagtaaggtcaaaggttgagttggatggtttgttataacttcttttagtttattgttgcagctttccgatttaatttgaactgtaataattagttgatagtgctaaaaggattgcttatctaggagtttaacaataattttcacctaaattttcatatgagcagtctaggataatgatacttagttttttgagggtcttggcttgattatgttccctaattaccatcatgtatgtcaactccaagtaagttcctgcagtgcttggacttgctaaagtcacaatcttagtcaccatgtttgctaggttgtcctctgtgggaaccttttctgtctgaacccccttgtgtcactttatcccaagtaaagtgatactttatctctaaatgtttggttcggtcatggagtactgggtttctacacagatgtacacaactgtgactatcaaagtaaacctttagaatctctttaagtagcttaatttcttctagtagccctttcatccataactcactcaatattgactcgattgatatgattcaacttgcatttcaaagataattcaatgttctatcaagttatgtctcacacttcaatcgcaattataaagttatcatgaccaaattttacccctatgggagttacaaaaataagctccaggttacccacagtgggtcccactgggctccaaaaaatagtcatcaccactagaagctaattttcacagttagatcatcatctacggtcaaaaacatctatttgtattttcctctttttttatgggcctccttcacatataaaaggatagctcccttagctcatttttaacttttaaaaaactacccacaaggttagagcttatttctcttatttctctctctagaaattagagcttctgacacttagcctatttttgaaataccactcgtgagaaataaaaactcgaagtagacgtagctccactaccatcgcgacatggggagtgaactactataaattgtgtgtctctctctctctaaattttgtacttaaactgattattcatctcaccaatctagctggtgttggtcactttttaacgtcaagcctactattttcactaaaatccaaaactaaacccttaggcaaaattactattattcctctttcttcacacttaagttatcttaaggcttaggataaaataataaaatatcacaacttcgcccacacccgatatttcaaattatcaaattatttgtccttccaaataaaaggttctaaatcaaacccatgtgactttaatgaccaaactatcgcattttcattgttaccgagcaaaaatcacaaaatattaacttgcataattatcatatataatacagctaaagtaataaaatcttcggaattgagaaagtataaccttaatacttatttcttaaaaataggatccatattataaaataatcacatataattatataatacagttaattaatgctaattgtcttactaattttatattttgagtatgtggtcattacaccttattgaccaaagatgtcttcatgtaaatcgatccaagcttattccataatcctagggcagattattcatcgtcaacttttccaaggacttcatctgctaaactcaaaagaatagaactatgtgctttcaccttgatctcttgagaaaccttcttgacatcttcttcttccttagaactagtcatcatgatcgcatctgcaagtccttgatgcataaagagtgctttcatcttaatcctccataacccaaagtcattaagacatgtaaacttgcttacttcatatctggtagtagccattcttgatgagttcttaaaacttcaaaaattgattcttgaatcttggatctaactgtgaagctctgataccatatggtaaattaacacctatcaagaattaaaataaaacaataactagagaagtgaagaattagagtggttgaatcaaataatgacataaagaagaaataaatgtgaaataaacgtaaagaaatagagacaagatataaggttcatcaccccttttgtggtgactaatccctgggaggaggatgatacaagagttgagctcatcaacaagtgtgtcttgcacctcaacaatggtgtcttgcaccttacaaatcaactcactcgagagagatctgatcaaacacacacatcctctttaacaaccctcctcactaattataaatgtaacaatcatttaaattcctctctagatagtaacctaaaaaagtaatacacaaataataatagagtttttggtagctaaatcctcccaactatcgtttcacttgcacttaatcctcaaagctcaaattttggcggtaaaaccttctaaattactgaactgttagtaaaattaaggtgtcatctgttgggttttgtgcccnnnnnnnnnnnnnnnnnnnnnnnnnnnnatttacttattaataaagatcggaaataacattttatgttgcatg

SEQ ID NO: 122594 - DNA, 1229 bp, Cannabis sativa
  modified_base (390)..(391): a, c, t, g, unknown or other
cgtcggtcaacgctatgaatagtagcgttgaccgacgtgaatagtgtattttgtagtagtgcatctagggctatgggacacagagccaatccattatccacattgacttcttcaatgaatgcccaacaataatctttgtataggtattcatcattgtgaatggagaactttccatctttcaaatatttctccttcacaatgtgctctgaagcaaccttcagtatcatcttactgtgctccaaccaacagtgcatccaacatagtaaggtctgcaaatccaaatcaaacaagcaataattctttgcttcgcccaagaatattgaacattgtatatattaagcaaactgtctgatatatttttctcaatgtgcatcacatccagattatganntaacaacaaatgcttccaatactcaaggtcaaaaaatattgacttcgtctttcatggcccctaagattcatttgtaacaacatcaattttctcacgacgatgttttcttttctttgtagttgcttttctctttccaaggtggaattaaactttattcaacttttctaacacttgttccccttgcaaaggtggcggtggcaattcaaattcttgcttattgtcaaatacttttttccaagtctaattcacatgatcgtttggcaaaaacctttgtgttccatataacacattttcttcgagtgttttaaatacatataacatgttttcttctcacaaataggacatgctttgtaccctttcacactaaatccagagagatttccgaaagataaaaaatcattaatggtccacagtaatatggccttaagattaaattcttctttcctaaaggcatcgtatgcaggaacatcctcatactacaattgactcaaatcatcaactagagggactaagtacacatcaatgtcattactaggctatgaagggcctgatatatcaacagtgtaagtgtagtgatcttcctcttcattaccaaccaaggcagcaagttatacatcataagcaaaactagccagtagctatacttactgttaatggtggtatgtggattgattccatctgtagaaagaccaagacggatatttctaggttcattgccaaattgaagcaacatatatagcatcaattgatttccaagcgggtgagtgagttggatgtcacatcttaccatgtaattttctatcgctagcatgccagatcaaatttttagcatgattga

SEQ ID NO: 122595 - DNA, 1735 bp, Cannabis sativa
agggcataaaacccaacactctccccatagcaaaaaaccaacagccaatccagactgaagagccatcaacttcatgttgtcactgactttagttttggctgcagcttctatcatcctttggataaaatccttcaggctttaattttgttgatgcttgacgttggtgacaaagccaacctccatgttcaaatcacgtgcaacaatgaactgtttgtagaaggctgattataaatctttctacctattaatcaatccaggagccaaatgcttccaccagtcttccgcagacttggtcaatgtcagggaaaaacacaagcacttggcacgtcgctcacacgtgccacttgcatcatcttgttatatttttctaagtgcgttcgctgatctgtctttccttcatacaattcaatgtgtggcatcttaaagtttttttagaagcaggatctctgcgatcctccttacacaaggttttgggtccttatccttaaaatctgaaaggggcccactctactttttaactagcttggttagagctgctatctgctactctaaccttttcatgttgctttcgggaagatcacgtcctcgcattttgtcacttaagtggtttctaaggttgcctccatgtggcttcattttttcacttttgtacctttcgtacttagcgtgcaatcactgacgaaggtctacagtggacaactgtcttccatatgcccaccagttttccttctatcccggttgacagaatcactggtgtggtttttttgcccttgggcttaggtactttcgtactctgccctttaggcacaactttgcctctaggagctgaagggtgtccagactcgaaagaaccggtggccttctgcatcttagagggctggctgggcggattcgggtccttctgaggaggtttaggagcagacttctgtgtgggttcacctactttgcctttacctttatccttgtggggatttgaggtttcaacctcggtttgcccaagagcacgctctttagccataacttccaccgagggatcatcgttggactccgccaagtccttaaacttattttggagatgatccatcattctcttcatttttcagtgagtttttttagccctgctaactctatctgagtagcttctaatttcctagtcacttggagcaagtttgggtcatggtcataataataactatctttatgatacccatccttcacgtaaccatcgtcgtcatcttcctcttcactgtctttagggttttggtcatcatcgacgccatcatataagtttttagcgtcctttcctcgattcttaacattggaagtaccctattctcttacaccacctagttggagactgggggcgagggagtctgcctccttcataacagtatccagaggagctttcttgcctacgtttctaagtgaacatggttgaggcagtgtggtggctagcaaactttcgtcagctctcaatgaaagcaccaaaatatttacagagattaataatcaaataatataacaaccatgacaacaagcataattaatcaagttaaaaaaaggttaattaggatttttgccccctaaactttaacatgtaccgaatcataccccccgaacttttctagcagttaaaaattccccatgaactattgagattgttagatttaagaacttttgcctaatttaattcaattttactatttcagtaattgtttatgtactaaccatgctc

SEQ ID NO: 122596 - DNA, 598 bp, Cannabis sativa
catcaaacaaaacctgtcaaagtgtctctgtttcattagcctctcagcccaagcccacatgtctgtctgctttgtcttctgtttttaatcaaagtgtaactcagtctatgactgataatgtgtctagtttaaattcaattaaggacaaatggcataggaaacttggccatccctccaatcatgtgttgaaccttgttttaaatcaaatgaatattaagaatgttaagaatgatgagtttcatttttgtgaggcttgccaatatggcaaatctcatgccctgccttttaaactaaatcatgacaaagccaaaaatccactcgagttagtgcacactgacatttggggccctgcccccatcatgtccaacaccaatttcagattttacattcattttatagacgatttcagcaggtacacttggctttaccctttaaaagccaagtcagatgccttccaagctttcactcagttcaaaaaccttgctgaaaatcagtttaatagaaaaataaaaagactgaaatctgactatggcggtgagtatcaacctttcactaaccttgtcattgaaagtggcattgatttccaacactcttgtcc

SEQ ID NO: 122597 - DNA, 1238 bp, Cannabis sativa
aaagttgcttttcttgtagtgaatattttgtggtctcatattctttgatatttgtttgtatttttattgggcttaataagctcacaccctatatttttctcttaggaattcagcttaatacttgtagctagataaaagaaagtggttggatggagaatgatgtaattagcttactcctatcttatttagtatttaattcttcttttaaagatagaatatgtatttaattaataatggatggtttgtttcacttaacaatctcaatctgagatgaggaatatgataactcctaagtattattgtttgtattttttcaactataattaatttaattatttgctgactatataattatagtaatattattgttctatataaaataatgaatgatgctactctattactaataatatatttatttatataagttattttattattttaaatgtatttattatgattttgtaacataaattaaaagttcatttggaatttttttttccttaacaaggattaaagtccttgacttgggtcgtgagacaacatttttggatggagaatttgggtcacttttaagagatggactacatttctgattgaaagaatcaaaataatcgctacgtacagaataaagtagaatctgttatattatattgttataataaaagataaattaaaatattaaaatgagatatattatatattaatatgagattaatgtataatacagttttactgacccacattgagtaactctaaaactgtgtagtgacacttcaacgcgcgtcattaatgagggtgactggaaagacagtttttagtgacacttcaaaagtgtcactaaacccttttaaattcaccttttgcgcgtcactataggtgtataaagtcaaatttggtcagactgaaaaagtatcagcaacacaaataaagtgtcactatatcttttttttttattattaataattttgaagatatagtgacacacaaagagtgccaccacattaaatatttttctaaaaaaataatatttaatttttttaattaaattttttttataaataattatctttttattttttttttaaaattcaatttgttaatttgggcagaataaatcattatttttttatttcatcaaataacttatttgtttggtgctcaaaattaaaatggaaacaaaatgaaaatctacacaaaaatttattatttgcaacttaaaattttttaaaaaaatt

SEQ ID NO: 122598 - DNA, 997 bp, Cannabis sativa
tctcaaatatacgcaaagtattattaattttatgaaatacaacgataattgtatactgcataagaaaaaaagttagaaaaatccacttggcagttggccccttactcctggttccgccactgccctggactttgttgtaatgtaatttatgggcctgggaagcccatccacatttctcccaggcccataaattacattatataccaattttttattttttattttattttttatctttattttgttactttttaatttatattcaattttttaggtcttattcccatcattatgtgtattaaaaattttaattttgataagttatgtgaggttatacatatttagtactttgattataaaataagttatttattaattaaaaataattttagaaatgtgttatatgaataggtaattttcaacttatcgttagtgatactttgcaggcccatttacttagttttgatatcattattcattgtcgtttctgaagggccactaaacgcaaaaacgcattgtcgttttcggccatgcctcaatgcttttccctcaaatatttatcaacacaattaattttctaaaaaaaaaaaaaatcaaatcaacacaataaatttaagccactaaggctagtttagtggtgagggaagaataggaaaaaaagagaggtcatagttggaacccaaaccttttaagcttttaaactattaattgattataaaataccattaggctacacttaaaaaagaaaaaaacaaaaatcaatacaataaatttagacagctaattctaatttaaattctaataaagttaaatttgtatggcgacataagctctctcaacaacttttttatcctattctttaaaatatatcataaatttatttattttatagtacacttttatattctaccatacattaatttttttatatgtttctttacatcattatattaatattatttttatcttctacactattaaaataataatttttgaa

SEQ ID NO: 122599 - DNA, 1331 bp, Cannabis sativa
  modified_base (1238)..(1253): a, c, t, g, unknown or other
atcaagaagacatgttgtgtcaatctcgctaacaactgatgtttcaatctctctactacaagagaaaaagggtattggcacgattaaattagtgccaacaaactcattttttagtgcctatcattataatgacacgacttatcgtgcccttttggtcgtgccaataggttcgtgccaaaatataataaccggcaccacaaataacatcgtgcaaaccgcttgaacaaatggcaccacaggtgtagtgcccacttaaaatccttaaaattgtcagctatagcagtaggcaccacatgggtcgcgcccattgttcattattttttttttaaaaaaaaaaaaattgtaatttacaattaattgatatttatatttaaaatatatatcaaaaaccaataaaaattacattataaaaatattttttactatataaattagaaatccaaactaaacattcaaataacttaatacaacacttaaaattaaaataactgttgaaataaaatatacttatattgtcacattcatacaataactaaaataattattcaaataaacaatacttatattgttacaaataacaatactataatcctaaatgtgtggactcctcctcctcatcatcatcatcaccattctctccagactggaatatgtgatatttgtggatagtaaggctgcaaagatacttctggcatttgcgggtagtaagattgctatatgtgtgacatctactgcattgatgtcatcggtgacgattgctgcatctgagacgctggtggcatatgttgcatcgatggcatcgaaggcatctattgcgcatatgcggtgtctgctgcatagaaagcatcatcctatttttacatctttcttttaaaaccattgaagattgtcaaccattgattaaaatactttgctatccaaaaagaaagtttcattttggttgagagctctagtatatttagctttgtttaaaactaataataacaactataattttcaaaaaaaaaaaaaaaataataacaactataagagcattacatgcactaaaaatctttgaaaacccatatctaaaatttattagtttcgattaccaaaatctaatattcaaataaattccacaaaaaaacagttacttttgcttctaaaacataaaaactttaattacttacttcattgactctacagtaaatattttataaagcaagcctacaactattatatatatatatatgggtgannnnnnnnnnnnnnnntttttattgtaaccatatggttatatttttctttgacctgtaataccaggttactaataggtatactttcctttttta

SEQ ID NO: 122600 - DNA, 1439 bp, Cannabis sativa
  modified_base (1406)..(1413): a, c, t, g, unknown or other
ctctctctctctctctctctctctatcattgatgacacccaaccccaacaacaaccgtaggttccatctcttctctttttttcctgccatattttttattttgtattttctcttaccattttatttttgttgtttgcaggtagttctcgcaactaactcagatttgtggtgcattttttaagaataagtgttattttgaaatgttacatttatatctatgatttcttggttaaaatctgattttctctcactttattcatcattctttgccgaactgccattaaaataaaaaatatataaaaacacctacggaggcggttatttgttaataaccacctctaaagagtcccttcaggggcaattattcgcttagagaagtctaggtgttgtatgagtatttcgctgcctgaaaaggtgagcccttgatagttagtattagagccaagttcatctcaatgggaggtgaacctgtttaacatatcctaaaggggatgtaggcatgtggaaggatcgagatgttctgaatgttagaaaaagatgtcgttaagccagttagtctcctaaagtggattagtagaccgagatggagttgagactgtgttgcttttcttcgtgggaatactggacatcataaagaggagacaatgatggttgctttgaattaagttgagggatgctagaaagataactatcacgtgcaataatagagaggcgcaataaaatgtttgacacttgttggcgcagtacaaggtttgattgggtagtccatactctatgcttggtatactaggttgagtttccctaagtgacatcataagctgcaagaggcgcttctattgaaaaggaaacttgttgggatgtgtgtggaagtattgcaggggccgtcagatacttgttagtcacaacagtggtcgagagttgatgactgagatggtttgaattgggatagacatggaatgcttcaattcctacgtgtgtcaagaggaatacgcatggagaccaaggggacagatgccacaatctctagaggatgatcgtacttagaggcatttgcatgtgacttttgtttaacactaacactactacaaaattaactttttccgtcggtcaacatgtcagtcaacactaaaagttggcacaaaaagtttggtttcgaattttacgttagttgttatttgacgctactttgcgtcggttgaaaatagacatttttagatattgcgttggttggaaactgacgcaaagtagcatcaaataaaaattgacgcaaataaaacttgaaaaaaatatgtaatatactaattaatgggccgacccattacacatacctaaccttagctagtataccatatatcataaaaccataactaaaatagtcgccccctttagctctctctctctctctnnnnnnnnctctctctctctctctctccacacta

SEQ ID NO: 122601 - DNA, 1046 bp, Cannabis sativa
aaaaaaaaaaaaaaaattgaacacttgttctcgtatttagagttatatttagttaatgtgtaataaaaaaaatatgtagttttcaacttattctttgttttatatttaggtgggcttgggtatactacatttctgcaaaatgtatacatgtttatatgatttttgggccctaagtttgagttgggcttaggcactacaccaatttaatccggcttaacttgagattagacttgatacacggtgcaagtgcaagtaattataatataagattcatatatcattattaaccaaaaaatctgtaaaacctaatattaataggaaatttacataaattattaattttggtaaatttaatacatttttatattttcaaagtattcaaaaaaataacacaaaaatacataaaaaaatagaaaaacaacatcaaaataatatataaaaaaataatatgtaaataacaaaaaactaacaataaaataataagagtacaatataaacatacattaaaaaactgtatattatgcaaataaaatcttaaaaaccataaaaactatttacaatttcacacaactgaatttttatatatttttcttgttacttttgtattatttttttgaaataatcacgatattaaattgcactaataacgttagattagtatttatggtacttgacaccttaagattattatcaaagaaatttaaacaacaccaaatttgtgagtgtattcaagggttgcctaaatacacaaaaatagatatgcgaatacttacttaaaatagtgagtactcgaagaatacagtgtataatacacacgagtattgtaaataatataaaatagatacaaaaattatagtagttttgtaggaggtttgagctcaatcaacctgattcactgttgaaaaagagtactctaattctgtatttttattcttcaaatcaaccctcctttgaatggaaaaggaaatccctacttataagtagtggacactggttacaaataatagtaataataataggactgttacataataataataataata

SEQ ID NO: 122602 - DNA, 1551 bp, Cannabis sativa
aagtttagatatacacaaatagggtaaccatattaaagtataccagccaaaatacaattaataataaaatatttttgtcaattaaatataccaaaaatggaattaacactcattttggacaatgatgttcataaagttggtttcaaatattgaccaaatgcacatgtggcaaagattactctataagcaacccccattagagatgctcattttgaacaatgatgttcataaattactggtatcctatatagctgcaacgtacatgatcatgaaaaaaaaatgattaaaaagctctattgaataccgaaacaggtagaaaatctattgaaataattctttagggaggtgtactataaacgtaccttgtaatataaatatatatatatatatattcgggtgcacttttaatgtgtattacccatgaatgtattttgaaaaatttgagtttttatgcttaagtttttttgtcgaattagaaaaatctttcttttttacattatatgggttgacattgtttaatctgctaaaaaagaaattaaaaaaaataaatttttgacaaaaagaaagataaaaaatatttaggttgacttaaatattttttatataaatatatagtgtaaaaagagatattttttatatttatttttattttaagtagttaaattaagtatagaaattaaaatttctcttttattattctccattagatcaaaatgtaatggttcaatatttttaaaattaatattaatagttaaatttaattagtaatcatgaatgggtaatacccattaaaatatatacggaacatttttcaataagtatttccaatttataaatatatatcattttacttgaggagtaaacaaagtatgtttttgggcaaatggtggtggactttgatttaacaggccaatttataattattagtgttgtgatcgaatcacataggcagctcgagaagaatacaaacacacaaaaacctcaacaacacaataaatagaaccaataaaaagagattaaatgagggaaataggcgcgaaaattaaagaaagataacaccaagatttaacgatttcgagccatgtgcaaggctatacatctcgattgaatagcaacctcaatcctcttcattaatcacaccaagtttctctcattacaattcttgaatgaactaagaactcaagtagttacaaggaaactttcctcacttgtgctcgaacactccctaactctctctctccatatatatatattagattacaagtatgaagtaaatgttacaagtaaaggagagtgatatttatagctaaacaaagttccaggcctctatgtaatgtccccgcttcaagcctccattgggccgttatacctacaaaatgatgactcttatacacgagtacgtcactctggctgcttcatagattaacgactggccctgcagaccatcacgagtaatttcagtgtgctttatcctcactcacacgcttcctaggaaaactttccaggaggtcacccatcttgaaattttctcaggtcaagcacgcttaaccg

SEQ ID NO: 122603 - DNA, 2549 bp, Cannabis sativa
atcataatcccacttattacatgattaacacataatataaatataaaccctaattatttactattagacttatcgggatattacaattttggtgtgggatggacttagaattggttaagcgtttatctgaagttttacatttggatgaagaggatggaccagtcttacaattgagtacagaaggcgtgactgaagggaagaaaacaatggagttgagtttagtaggcaaggttcttggaccacgacttgccaataaagatgaaattgaaagggctatgaaggggatttagaagattagtcaccgtttctaagtgaaggaattgagttctcagaacgtttttcatttttcctttggtagtaaagaagatcgacaaagggtctatggtgggggtccatagtcttttgataaacaacttatttgtttcattaagcctacgggagaggaatcttttgagcacttattttttttcttgtgaagtggcgtttcacttgtgacggtcctctccatagggtatttatcctatttgcaatacatgcatttgtatttgggattgggtgaaattcatctgggatctgaagcacaagggtattaatgttgaggatgtttttctttatgcttcgatcgtggttgaaaccatctggcagacccataatgataaggtacacactaactatccggttgatatgaagaagtgtattgactctatttgtacttcttttgcatatttacatgcttctcttttctctcctcctaccccatgctgcatggaggcctggagtccccctcctcaagactggattaagctgaactgtgatatcatagtggagttagataacatctgttttgcagttgtggctagggatcacctgggcagagtaatccagattcatacagatcggttggatttttctgatgcgttgtgtggagaagcgacgacctactgcttggctgttatggtggtgctggacatcggtgccaagtttgttattgtggagaatgacttgagtgtggtgatcattgcacttagtgggaaggatcctcattgggcccttgagaactatcactccttttgtaatagatcttctccctcattttttagttgtatttttttgaatgttagtagaacatgtaattttgcagcccataatgtggccaagtgggcgtttgctcacctgagatttggtgatatcccggtcttatattatggggaacctttcatgtaatgaccatgaggtctaactatttattatcttataacaaatacgcttttcttccaaaaaaaaagcctacgggtttttgtgaaatatctaaaaaaaaaaattcagtattcatctttatggatttcaatcaataaatgtctgatttctttgctagagaatggggtgcaggcattggcaatgttgaagacatcaaaatacagaatggagtcatgaaagttaaagtccgaatcaacatcatagaacctctcaaaagggggttcagggcagcgattgatgacaataggactgaggtcacgcttatcctctaatatgaacatctactggagttttgctatgactgtgggattattggacacaaatctctggactgtccattaagagatgttgaaggtggtgatgcggttgatgcaagacaagatcgttatggaccttggttgagtgcctcgagtttgcctccccgtgattgagttcgcttcagttgaaaaatggtggttctacaactgccccattatgagcatgggagaggcctcttgaattattgaatcagttgaacgtgctcgcaatagatactcaggcctgatagaggaggaactagccgcgacattagttctgaaagccagggaacgcgaggaagaagataaagagcaggtcctgcgttcttctgctgatattgccccttctaatactcttaaaaatccatctctggtagcaagcactaggggtgttatgacagagacggttttcgatgacctgcaccaggtggccacggccaatacggttatcctagatttgagaaattcgatagttagtggagatgttgttgtggaggctcctactttggaaggtcaggtagttagtatgttgactgccaatgctgactcagctagattattcactgcacgtgatactttagtgaagacgaatgagacaatgattgataaaggaaaaatgattattaatagcacatgtgtggaggaaatctcatttggtcagatgcttaaacaaacatttgaaccattgatcaaagcacattcaaagaagacctggaaaagaaataaaaatatagtggctcgtagagtggggggtagctcaaatccccttagtcctaaactttttcaccggttgttggctcatacttcaaaaaagctaagtcccgaaactggcagtggtaagcgaaaaattaaacctgaaaaaatacaaacagtgaataagaaaaacaaatcagttagtcaagtggttgatcattcagctatggttgatgttgtattggcgaagtgtgcggagcagactgttggaatatattttaccaggacctagatttactaaca

SEQ ID NO: 122604 - DNA, 1124 bp, Cannabis sativa
  modified_base (26)..(47): a, c, t, g, unknown or other
gatatttattaataagtaaatctgannnnnnnnnnnnnnnnnnnnnntagggcacaaaacccaacagtgctatcaacaagaatggcacttagtcattgctcaataaaaaaagagtggtcctttgtttattcctaagagaatggatgttgggctcgaacattggtctaaatcgggtttaaacatgattaaggtgaatgttgatggtgcgatttcgtttcagaaggctgatttttttatgttggaggtgtggctcgggactgtgcaggacgacttattaaggcttttctcaattagtaagcctaggcgttgatgcagcgatggctgagattgttggcatcaaagaattaaactttgagttggatcaaaataaaaggttgggttgaagtttagcttgaaatcgattgcttagttgttgtccaagctttgcaaaagttcaattcatattccatcttcctttagtttattggttcacgagtgtaaggttttattagtttcgttaaagtatgttaagattcattttgttaaacattttgtaaacaagttgctcattatattgctcgtaattcttatttctatccagtttgtattttcatcgagaataatgctccggttgaattattatttatcgtaatggttgaagcttctagctaataatgattccatttccattcaaaaaaaaaaaatatatattaattgtcttcattggaatcaattagtaaagttcttttgttcttgttttaataatgttctgtttcattgttgtaagaaatttagctctgatacataggaattaacctctgtaattccagcttcaagatcacacttaaacaaacaaaagttaaatcaaaacaaacaaatcaagaacaaaaatccaggaaacacataaaccagaaaaatataacatagatgaatctaaatggctgtcagacacaataacacattgatttataatggttccgatcctaagttcaatgtgaatttggtcatactccagtttaaaagcatttccaccaatctttattgataatgagaacaagagatatcaatatcaggagctacaagaaaataatcacagcaagtcatccatggtgtaatcccttaacacacattaactcactaacccg

SEQ ID NO: 122605 - DNA, 1239 bp, Cannabis sativa
gagtttctttacggagaggttcattggtatgtgcggtgaccggaggaggagtttgatcctgagtttcagtctcggggacctcgaggttaaagggctaagaagctttcttctttctattagttgtggttttccttggccttttaagaggctccacctcgacatctgaaggagcccttgaattgtcactctcttcttccctttcctctgcataacatcctcaaaatgcatttctgcaagataagataaaaatgttagcattaattaaagataagtaaaaggggagttttagccataatattctacctaaggaatttaccatagtcactagaagatgaggtatcactagaagatggggtagaaggaccatagtatccactaatatccctacaaccagtgatcttaaatttatcaaagggatcaactggttctaaatcccagctcgcgtctaggtgacttgccctatttgtcatggtcccatattgctcagctaactgtagtatgactcattacaactaattttaacatggaatctgggataccaactatacaaacctatgtgttatgcgatctacgaggagggggtgccaaatataaaagttaaagaggttatctcggaatgtcactagagtgttatgctcaaccctaagcagtgtgggtgaccaaccacattgattaccttgggatgatccttcaccggcatcctgaggggcagtgttctaaagtaatgtgcccgtgccacgcgatctcacgctttctcctcgtttgggataggaacctacttccaagaagaacaattgggacacttgtaatcacaagtaaactcccttgtcagtcaagagatccacagatctcaaattgacctcatttagaagaaaatcgcatgacctaaggccgtaaggaagagtcaacaagagcctgcatcgattggccatctcaggggtaagggcaggtcttttcgaaagagctatcaaaaacaaaaaataacttgtatcagataacttagaataaaaagacatggattaatttaaccaagtctaatgcaagcaatcacttacaaattatatggaaagtggttgtgccaatttgagagaggcgagttgtccaaaagaagttgtccttaagggatgttttgtttggcgaatccacaatgattttgggctccccggagtgactgtcgatgtaataaatgttgggttttatgccctaaataaaattccatttcaatgtaatccattttat

SEQ ID NO: 122606 - DNA, 878 bp, Cannabis sativa
  modified_base (40)..(41): a, c, t, g, unknown or other
ttacataaaaatattgcataaaatacaattcaatataatnnaatacaatacaatacgacctaatgcggcgttccaaacgagccctcaaagttcagattaaacaacataaaatctaggctccaaacttaagcacaatatcaacaaattcaagctcacaccttgaatcttcaaaacccaaaacataaacccaaacacaacactaaaattagagctacataacatattaaaaacacctataaaatccctaaaatcatctcaacaactctacataagcatcgtacttcaatttataactcaatcaagcacaaggcatcaaaattccaccaatatcatcatacatgcatttcaagaacatctaaagcttaaatcataacattcaacttcaatttcagcaaccaaaaaccaagaatcaaagttgaaggagctacctcaagcttcaagcaaggatcaagcctcaactcctcaaaatcaagctttatccaacacaatcctcaagcaatttcacaatttgtaaaaatgaaaatagagagagggaggggtcggttttgggtgatagaaaactagataattactcttcatttttttacaaaataatgccttttgttgaaagtaatccaaaaatgcacatttaccaaattgcccctagggccataaaacacatactcaaactttcaagggcaattatgacatttctacacacaaatatactcaaataaattttagattaatcacacataaataaaatgtcaataaattatctcaaaattatattttggacccgaacctagttcggcccgaaatacccagttgtgattataccgcgccaacttgtcagaacacacctgaaaaaggacaaaacaggcatactatataataat

SEQ ID NO: 122607 - DNA, 518 bp, Cannabis sativa
attatcgggtattagtttgggcctatccaggcccagtattctcgtggatataagccccaacagaattacaccgaatgagtacacgtcgcacccggtttgccagtagccacctataccatgctactttgaattaataaacataataaaataagggattatttcataaatacacaaaaacaattattattaatttttttttctttggcattattatgataaattaataagtaattttatcataaaaatattttctaaacaaattatgaagttgcataacactgttggcaattttcaaattttgggcaatatgtgttattatgaaacatgatttttaaatatagctcaaactcaaagatctgatgcagttttactaagagtttggaaagataacattcttaatgatgggtctgattgtgtgttatataagcctaattgttagatatgtcaatattggtggtctaattaataattaactaaaagtataagggaggaacaattctgtcttttttttttttttt

SEQ ID NO: 122608 - DNA, 1423 bp, Cannabis sativa
  modified_base (1391)..(1392): a, c, t, g, unknown or other
ttgctgctatgaactagatggaactgttgtgtgaaagattctgcaagcaggcacctctagtttttttgggaggtccagatgtgataaaattcgaacaatggttgacgattattacataaatactaaactttatgggtgtcaccagcaacgacagagtggcttgtgcaacattccaattctaggaatatgcccttgtttggtgggacatggtggtcctgactcgggatgtcactaccattacctggtaagaattctcggatttgttaaatgcaaagtattatagcgagacagttcatagtgcaaagaggaaagaatttacttagctgactcagaaagataatatgaccgttattgagtatacaacccagtttgatatattggctaggttggccttgagaattatgccaactgattttagtaagtaagaaaaatatatgggtggattgaattccaaaattaaacacaggcttatgatcacaactgatcataacaccacctatgctgatatggtgagaaaagcactgcgagctgagggcacagttgagtgcatctaggagtcccaatggactcatattgttggtggagccactactcctcctacctctgattatggagccactacttgactgctgaccagaagagaaaggcaccatcttgcatctagtggctcaaattagaacaagagtctttgagggaaccaaggtcgagacaaccgtcacggtggttctgaaacctgatatacttacccaaaatgtcctagttgtaagaagcatcatttgggtgaggatgtttcaattgtggtttgcttgaacactataagaaagattgtctacagttcaagaaagaagaacataagataaccgcaaagcccgctccaagaagggtctttgctcttactcaaaatgaagtagaaactagcccctcaactcttacaggtcagctctcggtcaacaactcttacttctatgtattgtttgactctggggccactcattcctatgtggtagccaaaatttttaataattagggtaggtcgtatgatagctatgataaagcgtttggaaccctataactgcctggcggagagtaagttatctctaaaaagtgggttaggtctatgccaatcaaaattaaggatagggagttgtgtcctgatttggcataattgggcttagcaaattttgatatcatacttggaaaggattttttgtcaaagtactcagctagtattgaatgtaagcaaaagatggtgatcttccaacctgagggcgaggaaccatttgtatttgtgggatcagttcaacgatcccagattccagtgatctcggtattgaaagctagagaattattacaaaatagatgtctagggttttgtaaagcccgcttagttnntttggaaattagcagttatttatgttaatca

SEQ ID NO: 122609 - DNA, 598 bp, Cannabis sativa
  modified_base (555)..(561): a, c, t, g, unknown or other
cacctattaaaaagtccatgtagagcctagaagtaaaaaaaaaacaaagacatactcattgtccaaagaacatcctatatattcagcttatatatacaaacagaatgtaatggaaaaggggattcgagggattcgaaaaataaagagaaaaaaaacactttaaaattataatagagaatatactctcaagtaaaataaaaattactcattaataaaagtgattcttgaactacggttaattaatacctgaactatgtaatgatatttttcaatactcatacttaatttttttaaatctaaaatttaagagttaccaaaaaattgcgtaacaaatatatattgtgtgaattattatatgtaggacttacagatataataatcaataatatatactcaaattatttatccacctaacagtctgaattaattcatcgtgtacaatttatactaataataggatattgtattaattcatgctaataagccaaagaatatatttatgaaacctatatttatgtatattaatcatcaatagggtaaatactattttggacnnnnnnntttgcaaaagttacagattggaccttgtgttttgtta

SEQ ID NO: 122610 - DNA, 642 bp, Cannabis sativa
atatatgatctcaaatcaaaagtacatattaatgatcttattatatatactaaaaagaaatatatatgtaaaagataccttgtttgtttgccaagaaataagactagtttttcacattaatcaaatataaatctgtgaatatatatactcctaatccttagtcgatcttctttattaattattattactataattgcacttcaagatcataaattcttaagtactcgatcgagatctctcataatgcatgaaaattaaaaaatctatcatagattcatatagtgatagcagatcgcgatccctattatttcaaataatttaaagatatatattatataataatacatataacatatatataatgcgtgtatatgtatgagtgtattatatacgttcaagagaaccaaatttaagtgtataaatatatgtgtatcatttcatgatgatctgtacatatatatttataatattatatcttcttttttttttttttaaatgaaagtcattttatgaaacgaaaatctctgttactaaattaggcaataactcaattggaacagtgtccaagttgaataggcgatcagggtgagatatagaggcccttgcaaaggaatgagctgtaacagtcagtagtcccgtgat

SEQ ID NO: 122611 - DNA, 1751 bp, Cannabis sativa
gcaaaataagtagaaaaggttgtagtaggaaaataacaggtattaggttcagattgtacctgtgttttcatgttatttgagtgaattctaggaaagaaggcttcattaaaactacattcctagaaatgtagattcttccttgatcactttcacataggtagcctttgtgatatggagaatactccaagaacaagcactgttgggatatgaaatccaatttatgagagttgtaagctctcaagtggggaaagcaagaacaaccaaatagttttaggatagaatagtcaggggtagtaccaaagagacattcaagaggtgagatattgagcaaaacaggtgtaggcaacctgttgattgtaaaagaagcacacaaaaaggcatgccataagtactttagatctaaccttgcatgaactaacaaagtgtggccattttcggtaatgtgtttgtgctttctttcagatctaccattttgttcatgtgtacgtggacaaggatgagagaaaagtataccttgatcagccagaaaacttgcaaaaggcttgtattctccaccaccatcttcttgaacactttttattggcaaatcaaatttcttctcaaccatacttttgaatctgacaaacatgtcaaatgcttgggatttcagtgttaaagggtagagataagtaaacctgctatagtcatccataaacagaatatagtatttgtaaccatctcgagatggaacatgggaagggccctagagattagtatggatgagtttaagaggtttaatggccctataactagacacataaaagggtaatcgatggctttttccctgttgacaagcattgcagaatgctaaagtctttaaggagccagagtgtttgatatgaggaagtattttactaagtgtattttggttaggatggccaagtttgtaatgccaaatgctaatatcaccatggttatttcagtaataagcagtaggcactgaacaaaaataagaattttcatttattgatgaattattacaatcatgattatcatgaaaggtgttgtttacagatgaactagaagaattgcaaagatatctagtttgatgggctgtagaagtagctagatgacattgtagaggcttcttgaatttaccagtagcatcaccaaggagaaataggccatccttaagtttcccatttgccagtactgctctagttgccttgttcttaacaaaacaccaatttttgtgaaattccaagaagacatcactatcatgtgttagatgagaaacactaacaaggtttttagtcatagttggaacttttaagatagaattcatatgtaaaggacaagaatgtaaaagaagatggtatagtagtagacagttagtgtttcatgaccttgataaggaatagaggtttcaagattggaattgtcaaaagtaatgtaattggttgcaccagtatcaatataccaaaaatgacgatcaccaaaatcttgaacagtggttgaggagtaagatacatgaggttcaatctcaaaatcaattatcaatgagagtagtaactcgtggatcttatatatggtattatatttgcacacattactaatgtgggactctctaacttcgcccctcaagatggtgactattttttgctcaccaatctttgatcactcgaccacaagtagcactttgttaggttatatttagcctatgtttcgggtttgaaaagtaagtattttctcgtctattggtgtcttttgga

SEQ ID NO: 122612 - DNA, 946 bp, Cannabis sativa
tagttgatttaacattatttagtaaaaagtccctgtggagacgaactttgattacttatcattgtattacttgtttgtgattgtgtacacttgcgcaattataaagcaatagaattttcacaacacctattttaagccctcgagcacctgcctatccgaatgagcaccctgctagcagggtctttcgtgcgtggatactcatctaggggctcccttgtccgcacaaaataggctacgtgcagcctcaattggcagctaagggtgctttgcacccaaaaaattcaaattttgtgatttcttcaccaaattcaaaattttcaattttaaaaccctaaatatcaatataaaatattatttttgatatttgagcctaaatcaacttttgaaattaataatattaaattattttaatagtttattattaatttttgatattttaaagtttgaatttaaaaaattagttatttatatttgaattatggttagattttaaattttttttaatttcttaattttataaatcatttaataataagattagatattttaatattatatatatttaaatgaaaagatatttattttatctttttaatttaaaatattatattataaattatcttatatgataaattatataacaataaattttaaattaactaagatattttcatagatatcttaaccataaaatagttgttttatgatacaatttattatttataaatcataagttagaaaaataatatttattacaatgttatatcattttacttattagaaatttataaataatattatatatatttaaataacctagatatttttgtaaaaatttataaaaggcttaaaatgagatattttagcatataattttgaaaattatcattagtttattattttattattaaaatagtactttcttaaccatatctattttaaaatt

SEQ ID NO: 122613 - DNA, 1478 bp, Cannabis sativa
tggcaacactagttggattgggacaagacttagctccttcaatatgccatttttactagctaatatacttggtttgagacaattacattctagaagaatctctataaatttcaacttccaagaaataatgaacttcccctaagctcttaagagaaaactccttattcagatcatcaaaaagtttgcaaattagagtgccattaggacctgtcaagagaatatattccacataaaccaacagaatcatcaatgttgatccagatatccatatacaaacaaagatgaatcggatttggaagcataaaattcccactgaagtaagcttgctttgagcttttcattccaagcccttggagcttgttttagaccataaatggccttctttaagcaatagagatgagttggttgagtgacatcaattgtaacgccctgtccaacagggacgctacgtgtgtgtgtgtacttttataaaatttccttccttttttataagattatactaaaagtgtggttaattaaaatttgataatttaaaacaaatatataaaacttctttctttttttttaaaaaaaaaaagataaataatattaatctcggggtcctcctgtttctaaaatatttacaatctggtttaaaagtgcttttacaacataaattttatattcccagaatacaaaggaacaccctgatcactgggtcgtgccactacgactaatatgtacattactgctacgaccttcaaacgcatgggtgctcaacttttgccttccctttacttgcactatatagcacccgtgagtcacagagactcagcaagaaatgtgaataaacaataatcaatataacatttatccaatcaatctcacactaacaaacttaaacaattacataatatcgtaatcacacaatcctggtacttcataaagtacccttaccactcgttaaccacgagctgaatatgtcactatcgttgcctggtaaagcaagcgataagtaagaaatatatcagcagttttaggagtaattactcgtaacggtaatgaccgtttccaaccctcagtcataaccgaggctcaacaaagatttaaccaaaatattgataataatcaaggctataatcattcaaccgttaacatttaaccacatacggtgcttaccactttatttcttacctcaattcagaactcaagtgtgcgggccgacctgagtagaaaacaagttgggcgatcccggtcctatgtcacgacaactgaaacttaatgaataccttaaatcgaaattctggaataaaaccctaattcaaagccgaataagaatctaatttccaacaactccaaaataggctagacaactcataaataacctaaaacagatactacgcaactcctcgggacaaaaactaaacctgaagaaaacccaagaattctccctgtagggcaaccgatcgaccgggtctatagcactagaatcaaccagt

SEQ ID NO: 122614 - DNA, 1027 bp, Cannabis sativa
ttaatataaaacagcccataaatttattaaaaaaatgctatttttccaagtcaccaatacgaattttatggattagaatttaaaaaatttaacaagtcaatgacacaaaataaaataaaaaaaaaagtcaaatacgatacaatctgtttaatacgaatttgatattattttttaaataaaataaaaaattattaataatattataactatgtaaaaatatatatatttagcgattcaatgttaaattaaaaaaaattaattttctttaaaaaaaaattaaaactatttaaaaattttagttttattacatatacaaaattatataaaataaatgtacataaatttttttaatggaaccctaaatttatcatttttttttcacaactctagctttagtataacaaaattggtcaaagtgggttaacacaaatacgatacgatcttttacgggtcgggtcggattagagttgaaaaaattaaacgcagactgaaaacgaatcaatacgtttgacacgaagtataaaaaccaataaaataaaacatgacacgaaaacgctcaataatacattttatcacccctaatatataatatacaaataataaaatattatataatatatcgtatatatttaagtaaacactcaaaaagtacacgataaaaataataaaatattataactatatatgcactaaaatctataataatatccctcaagcttgaacaagacctgaaaattaaattaaaccacctttgaaaaaattattaattttatcaagatttattcttttcttttttaagtcaacatacattaattaattaaatttttattattcaaattttttattttttatattaatatcatatcattcttcacatgttttattaataataatagcaatatatctgttttttattcttcatgaatgaagtttaatttaatccatttataaaaatctttcataaaaaaaaataaaccaacagtcataaaaataattataatacaaaagaaatattatggtacatttt

SEQ ID NO: 122615 - DNA, 734 bp, Cannabis sativa
tgtgaaccatgaaacataaaacgatttttgatcattattaattagtaaatctgattatattgaaatgggtttgatttagggcacaaaatccaacaagtagtcattgttgagtggagggtagcatggtcttgtcgattagcaaaagaccatcggagcaaaggacgttgacttggtctttataatcactggtttgcagaagaaatatatatacatcctttattggattaatttttgcaaatatttcagagtgtgaatgaagcttcaattcgctgagattccatagaggtcacaactccaaagataatggttgttgttttttaaaaaaaaaactagaagaagacgaaggagaagtagaaaggcggtgcatcatcagtgacatggaaactctctttgccctatgaattttagcctgggcttgaagctaaatttttaaaataaataaatgttggcttggaattagttttatatttcgaatgttttcttgtgctttttttttttttaccaccttaaggacaatgtaattttgaagggtggaaaagtgttagagcatctccaatggagagctataaatatagtgtattgctattttttagaacattttgctaacagttaattccaatggtaatataaaatgtatgccaaatttggcccaagctaaaaattatgctaaatttggcacaaaagataacattagccaaattttagcccacaataaatataatattttttttaat

SEQ ID NO: 122616 - DNA, 732 bp, Cannabis sativa
tttgtgtgattaaaagtaattatacaagttgttattgttcagttttgttttgtttgagttaagtttttttaattatgaaaaaaatttgatgttgtgataatgttaaagatttattgtctatcccaaaaattctaatgaatgattcagaaatcatgttaatgagataagttctctattcgtctttatcaaaatcaaattagatttattaatttattttgttggacttttatttttgctataatattttttaggggctcttacaatctttcaagcaaatttataaatgcaagtttggaatagctgcttattgtttagtctacatttacactttaagattggttttaaaggaagcatgtgattctcacataaaacaaataaaaaaatacaataaaatatatacaaaaccacaatattctcatgtaaaaaaaatagacaaaataaaaattatacaaaatatatcaacatatacattataaaataattacaatctatcaaattgcttgtcacatttttttttaaaaacgtataatattataaaagagattttatagaagtgattgtgtacatatgctttacccttccaaaatacatcaattcgtagtggaattcttgtgtttaaaagctttaataaaataacttagaactggaatggaaatgttacttttgccagcacatttttgtgctggtaagagttagtattgcgctggtaaaatagaatttacttgtgatgtg

SEQ ID NO: 122617 - DNA, 2992 bp, Cannabis sativa
tggctccaactggtggcagtggtcgcctgttagggtttcagacatcgaaataaggtttttgggtctggagactcccaaagtatgaatcaccataaaaaaaaagaaagtcaaaacacaccctgaggggtccgagagcatgcattaccgaccacttccatttggccatggaaatgctcgtaactggtacaagataacataaacttcctttagtaaaatgggcataactttctcaattctaatcaaaatgacttggttcaacttgaattggaaatataatttcaagacggatcaaagtgtgtctcacatccatgactaacttctgaagttatcaggtacaaaattggcttacaatgtaagttggtacattttactcgagaattagataatgcagctaagcgagggttggtggagcacactgccacaacttatgtggcgttgtgtgcgagaatcaacactccaaaacacagatgtttagcactcatcaccaacatcatgcatttctaggagagaggtgacatcccaaacctcaatttcaaattggtgcatcctcaaccgaaaatcaccaattgtccaatatttatgggatattcgcctagaaacaagaggattgttatagatatttatttactcgtaatattttattcatgaaaagagtggtatacgagatttttaacgagatatcctaatgtgtgtgggatcactaacaatccctctagcctatatatacatcaagtaggaggctaagaaagggatcttctttttggctttttctttttggacaaattttctctctttggatctttctcttcatgaccttccccttgaacttcacttgacagcaggcaagaacactatattatttccatcacattatttgtttgagtccaccatactcagtcgacaccagtcctcaaaacaccattgatacacaccttttttaacaaattattggtttattattcccaagaactttacaacctttaatttagatcagatttatgaatatcaagtctcacattagccttatattcataaatctcgattaagatttcacctagaaattctttgctgtacttttatctacacactcttaagaaaataattctggtgtgtcggatctaatcaataaaactacaagtagacgtagccccaatattgtcacgacatggggggtgaactactataaatccctggtgtccatttaattttttgcgattttattagtcagattaattcaccgtggtcctcttttattttacgatcttcttagattagttgacaaaaaactgctcaacagtttggtgctttcattgagagcgccacagtagaaatttgactgttttccccttggaaaactcatcaatttattttttcaacaacaatggtgttaagtacgagaagaaccaattatgaggaggacactgaagtccctagggatgttaattaaccccaaagtgaaggaacctttgtccctccacaaccacatgaagagggaacctctaggcgccgagagaagcatctcatgccacttatgccaaaagatgagggacaagtcaaagattgtgagagttcctcgtctctatctaaggagcgcccaccagtcaggtccatacatgtccatgaagtgttctaagaaaatgaaactctactcgcccagttggcagaaagcctgcaccataatagagagctccaagagcaagcccaaaggcacggagaccaacccccagctaagaaatccttctccacctaagagaagaagggggcacccaaggagagaagatgctcccatgaataatccaacaaggagggggggaccatcaacctttacccaatgttggagcccatgtaagacatgcacaagaaatccaaagtaccattacatggaggtggtcatgaaactcatgggacccaaactgttcctcctaaccatgagaataataacatggtggagaggaaaggagagaccatccttctccaatttgagaaccaccgtcacctataaggtaccccgatctgtcaattggtaccactttgcaagcgccaaggcggtccacctcccgtggtaatgcacctgataactctatggtatagagttattttttatgcttttaaattgaaaatattgtgaggagagtagtgaaaatgtgtttggttgcttgatattaagtagttttagtttaatttctatttaggaagctaacttttgagtcttgtaaaaattattgtgttaattgtatttttttttaattaaatgttgcttgtttgttgtgggaaagaggagttaacttgctagataaaagggaagtgatgcaaaggagaagtttgaacaaaagctgaaaactagacagaattgctgaagcattgctataacattctgggtagtttgggaagtgacgtggaaaaagtctaaaaaaacgactttcacttatccacatcaacaatttcgtcccagtcactcaaaatacaccagctggctgctgtggaatgaaagagattaaacctagtgggccaaagtggaaaaagattgggcttctatttttagggtgtgaattttgtaccctaagaacccaacaacaaaaagggaagaaaaccaagtacacctccatcttccattaacatgagcagctgcatattttgaaaaagaggagtaattgcataaggaagtacaacagaagaaagaagagagggggaccaagcttttgtgtttgaattttcttttaccctatcttaatattgttctttttctttctcttttctttgtgtttgtacttagcaattaaaagaaacttgttgaactaaaaaaagaggcagcagccatggttgaaccatttcgaatttggatgctattttttgatttgaatatgaactaaactattaaggcttgagtggctatggactcctatgtttgtatggttaattttaaagcttattttagtatttttgcctatgttcattcaagtgaagtctcatttttatttgattgttgtttctt

SEQ ID NO: 122618 - DNA, 904 bp, Cannabis sativa
aaaaaaaaaaaaaaaagagcaccaaagatctcatatcttcctcattctgtctcttcttttaacttctatcttggtatggccattgggttaaggtaatttacaaaagagtgttgatatagggtacctcctagttttttactttgtgtggttgatctggttttgaattggaccacacattaaaatagacatttcatacaatactgaacagcttagggttttggtctgaggctaacagaccaaaagcttaagaagtggttatgttttcatatacaaagggtactcactcttgtaatggattttacttgcattgcaatcttatctggtggggtccaatatccagcttaagattccataacacgagcctgagaaagataaaataggcattctttgagcacaaaacaaactctaactggcttatttggatgatattcctagtccaaaagatcatatactaatagtaataggaatcaacagagagaacaatgaaattttaaatatatattacctttacatgtatacctcctaagtagaggtttaagcagcagagttatacttcttcacctggttgtttggtaaacgagaaaccatgtaatcattaaacttgacaaggaatagtcttcattctgagaaggggagaagttttcctgaatgtaggctcctcactatccaactttcaggctgcaaatgtgatacatgtgcattcagtcaatttaaatccagacattaatgagaaaaatcggatattccaaaatttagggaacaacaacatagtaacatacaagcaacgaaatgtcatggaagatggtaatttaaaaaatatacatcattttaccataggtggataaaaatatattattctaaataaatattaagaactgaccatcattggtatctgccgctcatt

SEQ ID NO: 122619 - DNA, 1516 bp, Cannabis sativa
  modified_base (95)..(97): a, c, t, g, unknown or other
tggctgatcttctctgaggcagctcaccaaggacgtaccccaatttcaggggtgaaccttgtaaaaaactctctgtgtttgctatctctctcacnnnaatctctgcacttgtttattgcttatttttgcataattttcttttggaatcagctcaaaatcagagctgattctctttgtttaacccctcatctttgaattaattttgccctaattttcttctgtctttcgaaaacctgttcaaacataagatagatattagtaaagtaaaatcagtaataaaaggcaaacaaaagcaataatacgtgtcaattgtgtgtgaacaaaattcagtgcaagaaagttaaaaattgacctctgaaataacttgtgtgtgtgagttgagtaggttaaatttgtaattttcctacaatgaatatgataaaaaatttatacctaaattaaagaaaataaaaagttcatacataaagaaaaatcattcaaagtttattatagttatccaaaatttaagtcttaaaactataaaaattattcttaataaattgccttttagagcaactagacatagtgactacaaacttaaataaaataacatataatatttctaatgtcatcaattaagaatatcaagtcttctcctgtaggtaatgtgttatcctcaagttcattgtctacaatacaaaacattaaattattcaaatttatgggcatctatataaaactattatatatcttctataactactaaaaggaaaataacaacaacaaaacaatttgaaaataaatcaatgagataccaaaaaattgaacaaacaaagttagaagttagaacaaataatatgttaataaaataaaaaagcggacaagatacgtttcttcttgttatccatgtttcttagtatgtgacatgtagtatatacaaggaaagtttaatctcataatctcactaattaaagtcctctattacaatcctatcacgaagacacctcacggagccgggaacaagtcaagactactggggtaagcaaaagtccaccctaccttattctagtttcccggacgcgaaagaccctattgtctttcctagactaggagtggtccaattatggaagcctacccagctaatacccggatgggtactcaaagggcctattgcggatatcgatcgtccaagtgtcacgaatgtctacctttggcgcaattcaaattgtccagtgatggttatacttttttaaacacaggatcagatcttgttctctgtgtccaggtatggtagtgcatgcacctcgtccaccgtattgccagatgaattgacctctatttttaaaggtgaaatctttggtgacacgtgccctctacttttaaaggttgaacatttgagcgacatgtgtccactgagtataaatgtccccaattatccacctgcagcacgcacaggcacaattgtttccatgggaccaatatgttagaatatattttaccaagacctagatttacactacaacatttatcatcatta

SEQ ID NO: 122620 - DNA, 2675 bp, Cannabis sativa
  modified_base (2135)..(2135): a, c, t, g, unknown or other
  modified_base (2221)..(2231): a, c, t, g, unknown or other
  modified_base (2378)..(2384): a, c, t, g, unknown or other
  modified_base (2648)..(2649): a, c, t, g, unknown or other
tccaactcccaggtggcttcctccaccttactgtttctccagagcaccttgaccaaagcaatggtttttttttttcgaaggacattatattttctatctaaaatcttaactggttgttccttgtatgataagtcaagctgaagttctaggctttcataactcagcacatgagtgggatctgaagtgcgttttcgtaacatagagacataaaatacgttgtgaactattgaaagtgctggaggcaaggctagacgatatgctaccagtccaaccttctcgagaatatcgaaaggccctgtaaacctaaggcataacttgcccttttttttgaaatgtttcaaccccttcataggagatactcataggaatacatgatcacctacttggaattctacatttctgcgtttcagatctgcataactcttttgcctactctgagaggcaagcattctgtccttgatctttcctatagcctcgttggtccgttgtactgattcaggacccaaatatttcctttctccaaattcatcctagtgaattggagatctacatttcctgccatacaacatttcatagggagccatccctatagtactttgataattgtcgttgtatgagaattctatcagtcatatgtacttgctcccggggcctttgaaatcaaacacacaggcacataacatatcttcaagtatttgaattgaacttcggattgtccaccagtatgaggatggaaagttgtactaaacttcagtttggtacccatcgcctgctggagactttgccaaaattttgaggtgaacttcgaagccctatctaatataatggacttcagagcctcatgtaacctcactatttctttcacgcataactctacatattgatccactgtaaagactatttttaccggtagaatatgtgaggatttagtaaatcgatctaccacaactcaaatagaatcatacatccacgtagttctaggtaatccaaccacaaaatccatggtgacatcttctcacttccacttagaaagagtcagaggttgcaacaaccctgcaggtctctaatgttcagccttaatctgctaacaagtcaggcatcgggatacatattctaccacatctttcttcatcccgcaccaccaatagaagggttttaaatcgtggtacattttggtagtgccaagatgcagtgaataaggagtggtatgtgcttcctcgagaatcttatttctaagttccacatttctaaaaacataaactatagttctatacaacaacatctcattacccaacactatataatctttagcttaaccatatgaaacctcttctcagatcttcacaagttctagatcagttaactgagcagttttaattctatctaatagataagattgcaatgtcaaattgttaagatttcctacaacaaactcaatacctgatctgaccatattatctgctagatggggttaaatcttaatcatactagttacttgcccaagacccttcttaataagggcatttgccaccacattggccttcctaggatggtaaaggatttcacactcgtaatccttaaccaactccaaccaatgtctctgcctcatattcaaatcttaaggggtaaagaaatatttgaggctcatgtggtcaggctaaatctcacacttttctctgtggagataatgtcaccaaatcttcaaatcaaaaactacagcggcaagttccagatcatgagttgggtatcactgttcataatcctttaactgacgggagacataagcgatgcctcgattggcttgcatcaaaacacaccccagaccctgtctagatgcatcgcagtacactacaaacttctctttatgagagggtagggctaacactggagctgtgatcaatctctattttaattcctggtaacttgcttcacacttatctgtttgcagaaactgttgattctttttagtgtgttcggctaagggtcttgagattttagaaaatccctcaacaaaccgacagtaatagccagagaaaccccaaaaacttctacctttcgtaattgtttttggtctcggccaatccttgaaaaattcaatcttccctagatcgaccttgatcccatccttactgacnatgtgtccaagaaaagacacctgacattgccaaaacttagactttttgaacttggcataccgattgttgggaatattttaccaggnnnnnnnnnnnctaacaagtatgtttaattaacatcctaaatatgaattctctaaaacaatgaaattaagcacataagggtttaagaaaaccttacttttattgcagcggaatataatgactccttccattcaagttctctagcccttgattcctttnnnnnnnagagccttatcaagatctgaacctagatctctttctctccttcgggtttggttaccaccctcttactcactatgattgagtacttgacttgctatgtatgggcacgaccctcattcactcaatgttttgaatgtgaagaacaatgaaggaggtgagaaatcactaaggaatgaactctctcaactaggttggttgaatagttaagtttacatttatttgacaaagtgtcaagtggatgagataagagcatcatgttccttttanngtgtttcaactagggcttagggttga

SEQ ID NO: 122621 - DNA, 2916 bp, Cannabis sativa
ataaatcacttcaaatttcttatattgataactaattagattataaagagttttatttagggcataaaacccaacacaggcacccggactacaaccccaaaataatggaagagtcgctatgatcttcggaggtcctcatattggaggaaccactatgaatgaactgaagcgttatgatggggccctaaaacatgataaggaaatatgggaagttactccacttctgactcaaaggcccaggctcatggatcaacccattaccttcactaaagaagatgcaaggctagtgggctttccgcatcatgaccccttggtcatcgagactccaattgcaaataagagaatattagtggacaatggaagctctatgaacctactattcaaagacgctttcacaaacattgggctcactgacagagatctctcccctagcggttcacaactcacaggattcaatgggacaacccttatccctatggataaggttaggctcccatttaccttgtgtcgtgacaccccccaaagcatgttcaaatattgcacctttgtagtagtggactgtcccactgcctacaacgccattcttggtaggccatccttagttgattttagagcaattacatccattcaacacatgtgccttaagtttcctacctgagaggcaggagtgggaacagttagggataaccagaagaagcaagacagtgttataacattgtagtacatttgtcggtcctaataatatagggatcgagactaacgttggcagcaaaataagacgaattggaccctcgtattagatctaaagcagcgttagaacccatggaagacattgaggaagtaagggtatgtaacctcgacccatctaaagttatccgcctaggtaagaacctggaaccagattagcggagtaaaatcatatacaccaaagcatcgatggacgtgtttgcatggtgccatggggacatgaccgagataagtccgattacttatgtcctaaatgttaacccagatatacccccagtgcaacaaaaaagacttctgctagacccagtgaaagttgacaccctggaaaaggaggtagacaaattattgtccaacatttttatccgtgatgtatactacccggagtggttggccaacccggttctggtacccaaaccaaaaaaaaacatggcaaatccttaaatctaccaatctcaataattctgggggtatttttaacgaccttaaaagtttagggagcatgatttggtacatgtcaaaattcagggggcaaaaatctttattagcctatattttttaataatttgaactagaaataggagaaacctgctgatttcttcttattattattatcaccaactattccttcattcccaactaacatcaagtacttgtctctcctagtaagactagtacattcaaatcccaaagttttagccaattgtttttgtatgtaattagctacttaccagctcgattttcctcctcaaactcatcttcaaaaccttcttcctcattaaccaaggcataaagaaccattggagggttttgtaggtcttgaacctcatcaaataaggccattttttctttttcaaagaagaataaactagaataaaaattaaaactttactctagtataccacgaaactgaaaacttaaagctttaatgtgatgataactttatttcatgagtgtgtaattattacttcaaaaaatatcaatatgtagtatattccataaaaaactcagtttcatttcttcaattgaccaattttctatatacttcactaccatatatataggtcttactataatagttacttttcaagaaagagagggcattactgcatatttggaataagcacctatggagacccagaaactattagaaagtattagaagtctatatactacttactagtactggtcttgtgaattcacgagcacatgatgttttcagttgcaagggtctggttccttttttgttttgtttttgctattctctcctctcttttacaaaacttgtgttgcctttctaacatatttgggtacccctaacagtggttcttcacttataaggcgaaaagattttatgggaatgtgctttttgaattatttttcttctaatatgcaatacccttatctacagtgtagtcatcaactttttaggattaagacatttgtttcaatttaattttgttaaaccctaatttacctcttttgtctcctctttcctgtggttgctcgagtcattagtaattagtcatcaatgcattatggttgttgcatcttaatgaaatctgctaagaagatctcgtccagttaagggctaagatggcctctatcactactccatttctcgaacatagtatggttttttttcaggaaggtaatgcaacaacatagttaagagtgaattgttccttatttatgataaaatttttagatacccaagtagaataggatggtgatgatgctttcaacatagtcattatgtgtttttcgtgttggatcactctttagctttatgtctcattattatattttttttatttttttttataaaacttattattttaatttaattagacagagaaagaaaaaaatatttgtactaaagtgatgtagcagtaccacgaggtaaagcaatatggaattctgagagtgtgaattttttcttggaattctatataaaagaggttgatgatgagcatcatcctactacttatttagataaaattggatatcaaaacttgattacaaatataaaaaagcaactgaaagagattacactagagtctagctgaaaaaataagtgggatggattgaaaaatgaatggaagctttggaagcaactcaagggaaaagaaactggtttaggatggagtatgcaaaagaatacaattgatg

SEQ ID NO: 122622 - DNA, 1631 bp, Cannabis sativa
aggtttggaatagggattgtttcggcttctgtgataggaagcttcgtgccctttatcggcaactcagcttgattcaaggagctccaataaactcggagaattgtgctaaggaagctacgatgcaattcgagatacttgagatggaacataaattagagagaatctggaaacaaaaatcaagggagctgtgggtggctaagggagacaacaataccaagttctttcacactgctactatagtgcggaggcgcagaaattacattggggcgatcaaggcgactgctgaaaattggattactaacagagaggatatatgtcgctacttcgaagacaactttaaagggttgttcacgagttcaagtccaagtttggggagggagtttgagtctctgtttgaggtgggcgtgactgatttggacaactctgaggtgggccgtgtgccttctgtcatggaaattaaaaatgctgtgcggagcctgcatcctctgaaaagccctggcccggacggtttctcaggggttttctatcgttcctactggaatattgtcgggggagacatctgtgctatgattcaagacttctttgtttcgggaaggtttgtcaaagaactaaatcatacttacatttgccttatccctaagtgtgacaatccttcttcgtttgatcaatttcgtccgattagtctgtgcaactttgggtataaaatcattgcgaggatacttacggatcgtttaaagctggtttttgacaagatcatcagtccttttcagaacgctttcctaaaggggcggtggattgctgaatgttcagttttggccacggaagctttggacacaatgaggaaaattaggggtaaaaaaggatttatgggaatcaagacggatatgcacaaagcatatgattgtatcgaatggggatttcttgccggggtgctcaaggctaacgggttcgatgcccatgtgtgcaagctgatcatgcaatgtgttacgagtatgttgttctcggtcttggtgaatggggcttcggggaaaatgtttcatccagaccatggccttagacaaggcgatcccttgtcgccgtacttattcatcttgtgtagtgaagttttatcaaagttgatccgtaaagcggaagaccgtggggagctcactggtataaaaattggtcggaatgccatgcctatcacagacctattttatgctgatgatgctctgtttttctgtcgtgcaaatcaaagggaagcctcttgtcttctttcttgtttggagaaatatgaatgctggtcaggacaaaaggttagtaaagataagagtggtattgttttctccccaaagattacggatcaagcgagaagagaaatgactactgtaatgggaatgccagttttgaaagggaaggagaaatatcttggcagtcctttctttgtctctgccaagaaacgtgaagattttgctttcatcaaaacgaaggttctaaatagattggagggttggaaagctaaatgcctttcacaggcagggagattgactctgatcaaaagtgtgcttcaaagcatcccttgttacactatgtctactgttcagatacctgctactatttctaaggaattagatgttggaattattttacca

SEQ ID NO: 122623 - DNA, 1066 bp, Cannabis sativa
atttcttatgtgaataattatttgattagagcaatgcttaaagtgagattactactcgttgataggaaaaaatctctaagataaccaataaattttttattttgtttaaaaatgtaagtgagactatctgttgctatttagtatatatactgatttatgtagtatttactctgttttgattgataaaatctttttctataataaaaaaaatcaataattcaaaccaatagttaagaaaagtactcaatattattacttgagattgacacaggcccggccctgggcatatagacgggctaggcctgtgcctagggcccacctagcccaggggcccaaatttttttttcccttttaaaattatatatttttttattaactttgaaaaataccatattttttctaacataaaggcccaaaaataaatttttttcctgtggcccactttatttaagggccggtcttggattgacatattactattattttaatctatataattaatagcaattctgttatttggcaaccctaaatcattttctagtttgaataaaaatagtacctactataattattgggatttcaaagtcctttagaaataataatagtaaataattaacaatagttaattgtaaaagtctactagttttgactattaagagatcaattgctagtgaaatagatagatcttatattttaattttataataatcataaaaaatagttaaccactcataaaatattatcttataataatataccattaatgtctaatatgaatttatgtatgcatatgcaaacgtgttatttaatgggaccatgcatgcatgtacatatatatatttttttttttttgaaactccatgcatgtacatattatatatagggatataattttgtcatgtgattgtactttcacggaatacattctgtgatgtacggtagccgtcagataagagacttatttgatctgacgtcagataagggacttatttaaactctgacactcatttaatgtaccccgagactcatctaatgtataacagaatacattctgtgaaagtacatc

SEQ ID NO: 122624 - DNA, 1419 bp, Cannabis sativa
aactccaaaaacagttagtaaaaatatggcaattttaagtacactcacatatctaatactttcttgttcaacatattaatcgtcaagattttgaacacattttggtttcagtactatgtatatatggaccaaaataatataaaagttaaaattcataataatggctctggttttttcttacaagatcagtacatacaaagataagacatagtaaaacaaacactatacaaagaatctactaatatcatgcatattttttgtcgtagtcatacatactaacatacctaatgggatcaaaaacacctttcttatatcatataaccaacccacatgctattataaattgaccctactactgaaggtgaaaaacaaggtttctctactcttgtctatatgcatcatctgttgagatggcacttgattcattcttccattaattaatattctcgatctaagcaactcacaaacagctccagcaatgatcattgagagttgtgtgagtacgaaaaaaaaaagaaaaaaaaattcgtaatctgctaagaattaattcataagaatcaaatatcgaaaacctaacactaaataaatatagaaacaaaatgaaacgcaaacttgtctgacaagatgatcaatggttcgatagaagtagtgaagaggaattcgtttatcgactatagtttccaacctaattgcaaatatagatagaaataacatgagaacaaagtgaaatatcaaaactctcctacgcaaagcaacaatgtacattaaagtactatctagatatacaacaatcaaaagcaaatcaaaagtgagcgagactaaaaacttcaatgaaatagagaaaatgattgtttgagaagaaaattttgtccaattggaagatgatgatcaaaatttaattttaggaaaatctacaaacccttaaatttcagaaatgctaaataataattaaacaaattgtcaaagtgagaaagataacttacctagccggagtgaagaatggagaccgacagatggagaagatcgacgcaaattttaggggataatcgccatggagtgggtattcgatcccagggggctgtggtctctggagtggagtgggtatcgcgtatgagggggctggggaagatgatagggctgatattatatattttatttttttattaaaataaaagggtatatggtgacacgccaagcgtgtgagcaaacatgtttacccacacgttttgcgcgtcgctaaagccatgtgttctcacatggctttagcaacgcgcacaacgtgtgggtaaatactttttctcacacgcttggcatgtcactaaaggccatagtttttttatttttataaaattataaattttgggttttagtatttagtgacactccatatttttagtgacacacattctgcgtaataaa

SEQ ID NO: 122625 - DNA, 1178 bp, Cannabis sativa
aacagaatattcttttatttttaggtatattctgttaaaccaagaatgttaaaccaagaaatgccgttaaataagcacttttaatatataaagatatgtatatatgaagagctcattgtttgtttatatatatatggaagtactataattatatattggtagctgcttcttttgtaggctagggtagatcgaggtgaataatttttacgtgacgtggcttagtatatatataaagtacgtaactactgttgggttctgtttagtgttaatttgagttttatgtcatccattttggcagttgagggggaattaatgattgctccgataataatcaatggtctattgatcaccactcaaaacgagtagagagtacattataattaaaacatgttaatttactctaaaatatagattgtgcacatggataaatacacacagatatacataactgtgttattgtaattatgttataatatgtgtagttaataatgtaaaaaattgttctttatattgatgcatgcatgattcaatattaattatttatttagaagaaatttcgcaagtacttattgaggcaacacctaaaagcatgcataaaggaaagagaaagttgcttatatatggtgtttagtgttccacgttttaggtctcactgaagggatatgctgtaccacaaacaattaattaaatattatatatgcaatatagttaaacattaactatatcccataaaatatattagtatttctttattttattttatttaagtttttaggttacggtggtttaggaggtctgatggacgcaagaacacatttgttttttcttattactaattattgttctttttatcaattattgatgaggtgaagagtgttcttttccaatgaatgccttcttattataaaggagagagaaagagtagctccacggagagagtgcttagggttttcatgttttaggggcttgcgaatctcatggtgggattgcattgcaccaccgatgattggaacgagttcaaccgagaactaagaagagaaaccacatggtgagagggtgaaccaaaaatgagggcaatagactgattgtgtaagaaaaatttcatttattatacttaataaaaatccctattacaggaccttagacaccgggtctagactgccttagttcaggcggcc

SEQ ID NO: 122626 - DNA, 1134 bp, Cannabis sativa
ggggtcaggtctagggctgggtctagatctgggtcctagctcggggccatgtttggagtcaggaccggggctagggtccagggttgggatcgggttcgaggtaagggtttggcgtctgggtctaggtttgggtcgggctccgggttcaagttcggtttggggtcaaggttcggggctaggcttcggggttgaggccagtgtttgggtttgagtctgggtcatggtctgggttggggtttgggtccgtggtctaggtcgggtccggggttcagttcctattctaagtttgggatccgtgtttgggttcgaggtcggggtcggggtcggggtcgggcttggggtaggggttggggtaggggtcggggttaaggtcagggtctagggtttgagattggggttcgagttgggattcgggtttgggtcggggtctgggtcgaggtttgggtcgggtgttagggttggggttggggtcaaagttgcgatctgggttctaaagtttaggttggggttgaaatataaaatattgattaacaaaaaatactattttaaaaaattttgaaagtgattttttttttttattttaaaaattttgattctcaattaaaaaattaaaaagtgaaaataattttatagaacataatttttgaaaaaaaaaatcacttttctaactttaaaagtaaaaaaacgattaaaaaagtgttaccaaagacagatttaaaaatttgaccatttatttttagtatcattaacttgtataggaggagagatcaagtgatttttttttaataacactatacaattatcatttagtatttaaaacaagagtaaaaatattatatgcagtcataaattacacctaaatttgaggtatatttatgtagaaagttaatttaagaagtaagactcatctcaactaaagatgtttggatgaaatttacttgccacatgtgtttcaaatttatgcgcgcatatagcgttgccctcaaaatttataaaaaataatataaaatatctatgagttttcaattcagtattgaatatagggtaaatactatttagaccccgtattttacaaaagttattaattggactctctgttttgttaaatgacaaaataaaccttatattttctaa

SEQ ID NO: 122627 - DNA, 611 bp, Cannabis sativa
ctctttctctcttcatcttcttcttcttttcttcttatctactttatattattctatattattttataacaaaataatatttttaaagaaatatatttttttaaaaaataaaattgaaattaaaataaatatttttgggttttgaatttgaaattcaaattcaatatccataactatattaaaacacatattgtttttaattcgattaaaataataaaaattattttttaagacaaaacataaagtgataattaagctgtcttaataaatatttatttaagaataaattgattaaaaatcttttaattaatttatggattataaaattgttttgaataaaaatatttatttgagaagaaattgattaaaattattttaattaattgaagggtctaagagatgttttaaataaaaatttatttaacaataattattttaattagttttaagtcttacgatgatcctacaaaattataaaatttctcttgcagcgataaagagaaggacttgtaatttatttagggtgcgtttagaagtaactgtgtaattactaggtagagtaattactagggtggtaattactagggtggtaattacacagtgtagtaatt

SEQ ID NO: 122628 - DNA, 3646 bp, Cannabis sativa
acgattttcaagaaaatttctttggttaacaaagatagcattgtaattgaaaaatcactgtagtgtgcctaagtatcaaggcattacaatatattttgtgttataataataagtacagatgtattccttaccgagtgaccaaagaggaagaagattattacaataggcgtaacccatgtggtgcattcacatccttttttacaattcctctgaatagagccatataatacgacgtgaataaaagaaattaaattttaagtattacacttaaatacaacaataattttatccctggatatatatttctactatttactttagatatttataataattcgtaaaaacattattttatctatcatctataccaaacagacttgtcttttaataagatttgcaaagagagcttaatcagtgaaaacccagtccttatattataaaccactgctgacaattgctaaatagtacattcaacatctttctcagttggttgttgaaaactcctgtagtcaataatagactaaattaggatcaatgataaactaattctttctctacttgcagtagcttttgaatctttagttgataattatcaattgttgttaattaagagaaattcacccaacaacataaaccaaccaaaaaactaacattcgtattaggaaagtatatgcaaatctaaaacttaaatctaataatatcaaaaatatgcaggccctcaagtcaaaaacaaaaatatgcaagcccttttatattcacattctaattaatgttaataaaatttcttttgtttttcaaaaaaagaatctaaagatatcaaaaatataaatgcatctaaaaaatttaacaaaacaaaactgaaaactaaaagaggcaaggattatttaccgtgggcggtcgccaccacccaaatgcctttcagcgggcttggcccacttcttgagggtagcaggaacaatccaacactaacatcgctccatccaaatatcattaatatgatcactcaaattaatttgattgtttaccaaaaaaatgcagaaaaaaaaaagcaaatgaaatacacaaatttactcaaagcaaaattaatccccaatttctataatctctttatcttccatggttttgaccaaaagagtaataaaacaaatttatttgaagagttgaacaatctcttcatcttccatggttgagtgttacattgaatttttcactgtaatttctctcaaaaaaaagagaatttttgggtttaagaatattgtgatgttctcaattgtagaaaaaaaataagatttttgggtttaagaatggattgaaaaattacaatgattaaaagttctcaatcgtagggaaaaaaaattattttatttttagtatatttaaaatttaaaaataggattgaaaattttcaatcattaactctccgttagtttttatttaaaaaaaaaaaaagaaacgttaaaaaaattattaaaccaaaaattctgttacatagccacattttatatagaatagatattatataatttttagagataatttaatatagtgacttaattagtgtatatgtaaagacattaaatgtttaataagatatcctgacaaaaaaaaaataataagatatttttttcttgaaattttattagattaaattttaattttttttataatgttttataatattgatagtgtaaactacctaattcattttgtgtcacacctcattttgcggtgtggtgttcacgttttaaggtcttacggtgcaattaagatttgaaaaattgtaaaaattgtaaaaactgcataaattgtttggttttaaaaatgaccaaaatttacatcgctcgcaccgtgaatactcctaatctaataaatgcaatgtaagtttttgattatgtgaggtaatctaagctcttgtttactacaatctatcataaactttgttttatttctaagtaggtacccactcctaataggatgggaaaaatcttaattccgaacatctttttttttatattttatttcaatttaacttttaatagcataatatatatttggacaacttacttattgtgttttattaaatttatattaattttgtgataacaaattgaaataaccattcatgaaacgcggcctgttacttagtctattaatataattaaaaaaaattataaaatggcatcttaaataattaaaactaataaaaaatttaaaaaaaataagaaaattaaagagaggaaagataaaattacgcgccttatatatcttcattatagttatatgtaaattataataataaaaatagcatattattatatacaaatattattcataattattcaaaaagaaaaagatacttattccaaatcaataaaatgaagcaatgcacgaatcaggatatgtctaaatgttgccacaactgtaaagggatatataccttacttgagtatatattaatattcttgtaaaaggatatattttcacagatacacactgaccagaaaaagataaagtatatacgccaataataactggaaagctatctaacaggtcatatatatacaatccatatttggcaatactaatctttttgtttctattttgctattctttcactaaagggggtgtttgctttgtgctatacagttataagaatcggaataaattagtagaaaaatataacgaaataaatgaaaaataatcgaaattaatatttataatatgttttactaatttttttagaaatagaatagttgtgatttatcttgtttactttattaggaaatgtaaacagaatgcttaaattaactaaattgcccttttgagttaaactatattatatagtagtcattttgtaagacatattttaaaggacaaaattatcattatatatttaatattaaaaaataaaataaaaataataaaaatccattacccttaatgacatttcttataaaattagtggggaaaattctccttttttttttccattatttaatcaacttctccctttcctaattttaataatgcaagtaaacaaatgtaagagaatgattactttactattgattctcattacttattaaaaaacttgccacaatgtaatgggaatggtaattgtaatatgaatggtaatgtaataaaattagaattgtaataggaatggtgttatgatgtttagtttaactctgtaatgaacattgtaatcaaataaaataagttgtatattaacaaaaatacccttagttttattatttttaatattttaaatttgaaaacaaaaagtattaaaaaagggcaaaagagatattttctaacaatgtaatcatcatttcattagttttatgatgtaatgcggattacaatatatagtgtaaaaatgaaagtaaacaatgtaatggtaattatgattccattacaattcccattacactaaaccaaacatgccataagtgagttgttcatatctcatactacatatgttccaagctgtacgtacatttaaaagaaaatagtgaccaaaaccttcataaatattttattttataagggaaatttgattttatatacttaaaaaataaaaaaaaattattattaaaccaaaaacttaaaccctaaaaaaactatacattttttttcaaaaccc

SEQ ID NO: 122629 - DNA, 1374 bp, Cannabis sativa
tagtttttctaataagagtatcttgtagtataatagaccttaaatttttatgtagaaactatagacattaatgtatatagagtcttaaaaaagttaaaacttaagtgagagtaagtcataaaattgtggacattaatgtatatgtacatcaattaagtatatacaaaagtatatatatatcaaaaattgacattactatatcagttaaatatttcttgatcaattatgaccatggtagaagcacacaattatttattatttcaatattcacaatcagaaataaattctccacatagcggcaatagtaccctactaacccaaagaaacttgaaacgttagtaacattttttggtacattctatagtatataatagagtctacttttgtagaatttgcagataccatcgtgagagattacatgtcttaagaatttgatctcagtcatccaaaagtcacacttctcttttttagcatatgaatgatgatccctcaaggtgtgtaagtgttcagcataatccttacgtattttagaatacaccaagatatcattaatgaatatcactacaaacttatcaactaaagactctattcatgagattcataaatacaataggtgcattcgttaattcaaatgtcatcacaaaaaactcaaagtgtccataacgtgttttgaaagcagtctttgggatatcttattctctaatccttaagtgacgatagcgtaacctcaagtcattctttcaaaagaaatttgaaccttcaaattgatcaaacaactcatctatcatcaattaggatactttttttaaaatgtaaattgatgattcaattttttataattgatataaagttgcaaaaatgatccatcaaccttcttagcaaataaaactagagtttccaatgaaaagtactatttatattattaatgttacatttatccattaactacctaatatattatgtctcaattcagccaactctattggtgtcatgtgataaggcgaaatagaaacatgttaagatctgaaaatcaaatcaatgtaaaatttgatctccttattaaggtagtaatcccaatatatcttccgaatatgttttcggaaagcctctaatcactaacattcaaggaaactagtttaaagtcctagacccaccatcgaatccaaataaattcccatagcactctatgtttcttttcccacctaaacatgtttttaggatgagattttgccttactacaacattgttgggtgaatattactatgaaatcattattgggagtgttggattaaacctccacttacactgatattagactcaatacactttaatacaaaggacagaaaaggaattacaagtaaaagccctaagttg

SEQ ID NO: 122630 - DNA, 1532 bp, Cannabis sativa
  modified_base (1484)..(1492): a, c, t, g, unknown or other
taactaactaggtactcttaacaagtatcacataacaatggagcacatctccttacacttagttcttcacactgagaagagattgatcaaacacacaaccctttaaattacaaccctccaataagactaatcttcttcaactaaaacttccacttaatctaactctataactgaaagaatgacccttcaagaatcgtaatttaaaggatttgattagtcattacaaagttagtcttggttaactatttataagcataactaactaaactaagtttgcgagacaagtaagagagtgccaagtgtcctatatatagtgactagacccaaatccaccttggtatagacactaggtcttgaccacatagggagaataaatggttgaaccttctgcaactagatggaataatcattcagttaccaaatccaaataatgtctgaatttgacttgagtaacacatttgataaaaatgtcagctgggttgtgatcagtgcacaatttctttacttaaatctccttattggtaataatgtctcgaatgaaaaacaactttatgtcaatatattttgacttttcatgtaacattaagttcttcatcaagtgcggggcactttgattgtcacagtgtactaccatatcttcagatttaaactctagttctctagtgaggccttttaactaaataacttcttttattgcctttgtagtagccatatactcagcttcagtagatgacaatgctactaccttttagagatttgatttccagcttatacatttacctggagttgtgaagatgtaacttgtgagggacctttttgtattaatacaacctgcataatctgagtctacaaaacccttaacttcacaactttcttttcttccaactttgtagaccagtgtttatgaatctttttacatacatcatcacccacttgactgcatctcaattagcaatgaatttgctaattatggtcatggtataggctaaatttggtcttgtgcatatcatgacatacattaagcaccctacacaactagcacatggtatgctgtccatatgctttctctttcagtctgaggtgattgttcgtttgagaatttaaagtattgagccaaaggtgtgacaactggtttgacttcattcatcataaatttcattaacactttttgtaagtatctttttcggagtaagcatgattagactagacttttttttttattagtttttaatggtgttaaatcttgtgttaaatttgattcgtattaaaatttgtattaaattggcacaaaacataacactgacaatacataaagttttttaattataaatttgtctttaattactaatactaagctttaatatatatttttgagtgattctacaatacacccctttaaaagggatatactgatgcaccctctacttgtttcgatattcagaaaagttttttgtctatttttattttcatattcatgtacgttnnnnnnnnntaagatatcctacaaaattttaagaaatttagaataattt

SEQ ID NO: 122631 - DNA, 870 bp, Cannabis sativa
agcttttcagttagtgcattctgatgtatgggatccctcctttcatgtttctcttgatggatactaatactatattagttttcttgatgattttacaagatatgtatggatttttcctatgcaaaccaaatctaaggcaaccactatctttgaacaattcaatggttatgttgaacgtatgtttaaaactaaaatcaaaagtatacaactcgacttaggcaaagaatttcaacatttgtacaagttatttcaagatctaggcatcaccaaaagaaattgatgccctcacacacatccacaacaaggttatgtcgaaagaaaacacatgcatgttgtggatattggcctcatacttttggcttaggccaatatgccattaaagttctagcgagaagctttcacatcagatgcatacctcataaaaaggctcctgacttctatcttaaactttgtgtctacatatgagaaactgtttcatcaaaaaccagactacaatctctttaaaatctttggttgttcctatttttcgcttctcagaccatacaattatcacaaagtttcctctaggtcagccaaatgtgttttcgtaggctacaacatatcccaaaaagggtacagatgccttcatccaactggcagaatctatgttgcaagaagtctcacttttaatgaaagtgaattccctttttctcaattattttcaaactcatcctccaaagcttaaaactgcccttccatgcctatagacgctgctgcatattgtgtgcctagatcatctgtcatttcttgttgggttgtctgccctaaataaaactcatttcaatataatcaagtttactaattaataaaagatcaaaaatcattttatgt

SEQ ID NO: 122632 - DNA, 863 bp, Cannabis sativa
tggaggatgcacaaaataatttaactaccaggacacaacagccacaacaattgctttcggtttctgctgcaactgatgcagccacggaacaacagccccatcctttacaatcagcacctactgctcaacaatggagacctcctgatgttgatcagttcaaattgaatgttgatgagactgtcgatacaccccaaaatgtaatcggggtaggtactatcttaagcgactcaaatggtcatgttgttgctgcattctcaaagaaactaaatggcaatttcagctcacatgaaatggaagccactacacttttccagagcttaaattgggctatccaacaacaactaccgttaacacagatcaaaacagatgctcttatggttgtttctgcactccgaggtcccttcaattcaatctcatcttttaatgatttgattgtagatatctcttgtcttttatcctttctccctaatgtaactatcacacatgtcaaacgtactgccaatatggctgctcacggtttggcaaagtttgcgttaggggtggatgagacttgtttgtagtttgaggatatccctctaccaatttactctgttattgtaaatgaatgctatttttaatttatgataacaagtattttcactcaaaaaaaatatcacaattaacaaaaaataatataactacttttaaaaataaataaattaacaaaaatattaatttgttaaatatctctcattaattaattactcacaatttttttttcctttttcaaacaataatcagtatatatatatcatatattcctctacttcttttcactgctatatatatatatatatatatatatatctatatagtcttcatac

SEQ ID NO: 122633 - DNA, 2447 bp, Cannabis sativa
  modified_base (2405)..(2410): a, c, t, g, unknown or other
aaaaaaaaaaaaaaaaagagaatcttacaaataacttaaaaataactctagaacaatttaacaaacaacattgttaactcggaaactttctcatacgtggcaagaaggatgacatcacggaattttgagtaaacccaattatatagcagttgacctggaaggagaccctagccgtacgcccaagttattgactttaggacctccgggatggaagttcgaacttcaataacttgaatccaactcactatctttcagtattttgtaccatgaagacatggagtaacttaatccaagccccgggaggtgaaatgacaccaacctacaacccggaagccaacctgagcacctagggtttcacccaacgcccaggttgacatcccgaacaagggtttcagtttctgggaccttcttagtgcaaaagggtcaaaacttgcattgggatatcaactacacataccacagacatatttctgaggcattagaatcaaaatagaagcaagttcatttttgagcactcagggcccccagcacccagcgcctaggttgacaattcgtcaatttgggtgccttccaagtatcagatcgacgatccaacttttgcatcttatttatcttcatcaaaaacagtgaaacaacttctttcgcggaagaagcaacacttcttatgtgccaaaaacatggcctagggcccaggttgtacacctggggctggccttacgcccaggttaacattttgttaacttgggccattttaattggagttttccaagaacactttcgagcatcttcttcgtttttcagaaaatattgagatttaaatatttttggtgaccaaacggaattttcgaaagggcaaaactgagacccaacgcccaggttgacatattgccaactaggctgttttcgatcaagttcaccaaaaagtgtttagagcattttttttcattatcagaataatgaagattcaagcaaatttagggagaaaaccacaaacccgagcccctagaaatatatagggcccagtgcccaggttgacctgttgttgggcccaacgcccaagttaacaatcaacctaggacgctacgttcaattgctcaaatgcaaaatctgatgccaacattgaattcagaatggtcaaaaatgaggtaggagacctcgtcctcgagttcagaagccttggaagtattaaaacgagatcacaggagctcaggaatgggtacccaacgcccaagttgacaaatggcctggtgcgctgggttctgcttatccgattctgattccattttgcgtgtccgtctagtttttcacattaactaagattcatgaagacagagaagtcaacttaacaacttcgcatttctcatttccgacataggagactcgttttgttaacgcaaattttcgttaactaaattaaaatagcctttttcgtaataaattttctacagaaatatatataagtaataaatgataggttaacaccagatatttttaagtggttttgtagttaaaatctacatactccatgagtccttcttattagggatattctttttaatacagaatacactctcagaattttaataataataattatctctcaaatttttcgtcccttatcccatggaatctgtccctatttataggaatataggttgacagttacactattttgggattgattcaaatacaattgttcatgatacgtggataatccccacttttcattaatcaaatgtgggataatatcttataactacccaactgctcttttagtcttctcctttagaaggttattactgacgtggaaggttacatctcactcaatatgagttttcctccttgtccatcttaagaaaaaatgctaagtgttgggaagtagttcatcttgtcatattcttttagtggttttagtaatgcaaggtgatcttctcgctatatgtaatgcgaggcagttaatgttaatacatttattctggtcgagtagatgaatatccctttcttgtttgtatattctgaggcatggatacgcctcattaatctaaacttaatagttattatccatgtctcgcttttgactataaagtcaataagttttgaatattatctatcaaacccctatttaataataacgagttatttaatatacatttattgatataataataatatatcactcggaattaactcatatttcttctgttggatacgtgtcaacttttgaagtgcagctaaattttgggtataacaattgccccttaaaaatactttttatattaaaaaagaactttttaaatgattacaagggtataatcatactaatccaattttgaaaaattgcatactttgagttcttggcaattcagaactttgaggcacatcatttgttgggaatattttaccannnnnnagatttactaacaagtatgtgttggaatatattttac

SEQ ID NO: 122634 - DNA, 1584 bp, Cannabis sativa
  modified_base (38)..(49): a, c, t, g, unknown or other
  modified_base (856)..(860): a, c, t, g, unknown or other
ctctctctctctctctcgtctcttctctctctctctcnnnnnnnnnnnntctctctctctctctctctccgtggtggtcaccggaggtctctagctcttccctttcattttccttttcttttattcttctttttcttcttcttctttgaactgaacgaaaaaaaaaaaacagaggggggtcggagaaagatcaaaggagagagggagaagagggcagatcgggggttgaaattttttgggttgtggggttcagttctatggcccgtctagcatggagtggtaggagaaggccgacattgtgcaccgtgagagagagtgtgtgagagggggtcagaaaaggttgggtcgtggggtaagcgactgggtgctagggtttttttagttaagaagaagaaaagaaaagtgaaataaaaaagaaaagaaaaaagaaaagaaaatactttttttatttttaaaaatattttaataattactattacgtgggccactaaaaatttgtcacgtgtacaagtgtatacgtgggcacttaactgtgatttttggacggagaggtacagagcaaaacggaatgagagtttaggtagttttgcccccaaaaaatcaatttttgtggttaagtgttaaaaatttaaaattcaggtgatttagccgctaatattcctatttttttaataatttttaaaaatacaatttattcttataatgactcatttttttttttcttaagacccatttcaatctagagcccttgattactgaaatcataaataaaagggattatttcacaaatatacaaaaataacaaaaaatttacaaaaatacggttttacgtaattttaaacatttttacgatttnnnnnattttatttataaaaaatacgattttttttatgttgtattcatgttaatttgttattgattttttgttatctgtatgttgttttttattgttgttttgatattatttacatgttacttttaagtagttttcttattattttcgtgttgtttttatggaaaaccgtaaaaatgtaagaaaaaattttaaacgtaaaaatataatttttcttacaaaaaatgttattttatgtaattatccctaaataaaacaaacaatcggcccttctaaatattatatgattttctgttgtttgaataaagtttattttgttcttaatattgctatatgttaataaaataaataaatatattacttgatgcttatcacagttaacttctagcgcttagatattgtgttatagttcctctaaatgtaaggtattcaaaagttgttcttgttataaaaagttagacgtcatccggaagggtgatctcagaagcttagcttgtccatctgaagtgagtctcgtgcaatgatagatgttgtttggaagggagttcccggaagtctcttgttctctttggaaagagtttcttggaaaagctagtcttcttccagaaaggagctccagattgtaacaccctactagtttaggcgtgttaacataattttaacttaattgtgcagcttgttgcgaatcaatgagtttattaaaaaatgtaattaattaaaactttatttaa

SEQ ID NO: 122635 - DNA, 1705 bp, Cannabis sativa
agatttaagatcctggtaaaataaattccaacaggccacagatctcgagatcatcgaacacagagtagtccatgttggccatctgaagaagtccaacatcaaagtctagggggtgaatgccatagtagataataacaactcttggatggcgcttatttacaagttcttgagcacgggaaaactccctgcaaacagagtcggtcaagaaagatttagtatcaggtcccacgctatgtgatcacggatgggaagttgtaccataggggttgtcaatgtcgtacctgagatgcattgctggaaaaaaaattagcgcagtggtccacgaggtctacaaaggcttttgcggagatcacacttctgggcctagcctttccaagaaaatccttcggcagggatacttttggcccactatgaagaaggattgcatggaatatgtgaggaagtgtgaacagtgccaaagataggccaaagtctcgcacgcaccacctaccgagatcacattgatgagcatcccatggcctttcgcagtctaggaaattgatttagtagggtccctccccatgggtaatgtaatatcccgataagcctaattgtaaataataagggtttatatttatattataggttaatcatgtaataagtgggactatgatcctactaatctatttcaacataaaatttaaattttgctataagtgagcaaataagcataatttgtaaattaaggatatttatatagcctgtgtgaatgtaatatgagctatatgttgaataaaaatatttttcaggtttggcgaccttgaagacccgataagtagataaataagcataatttgttaattacgaagatttatttgaaatatgtcaatataatatgaattatttgttaaataaaaatattttcaagtttggcaaccctagagaccggattggaggccaaaaatgttacaatagttttagttagaaatattaacggaattattgagataatgattttagaaatactgggtattttggggtactcagagttgaccaaatactctaaaattatagatttcttagtggctaacaaatgataagataactatcattaataaaatttttattaatcttattattaatattattttattattattattatactatattaactgataagtttaacttatcagtttcgtttgatgtataaatattatgtatattaagtttaatatataacagtaaagaatgaagaacaaaaccctcattctctcttcaacaaaaatttcttcccttatatccattttctttgattttcaacctgacacctagcgatctaagctctcgtagtagcgggataacatccttgaagagggaaagcttaaggtatggtttaattacattttaagctaaaaacgattagttttatatagtggctttgtgatttagagttgttatggagattctgacgtactcattaaaaattatgcaatatcattttctatatgcattattcctctagggatactgaattctatactgcttattaagttcatctgaataaatagaagacaaatctctaattctatccaaaatcgaatagagattaaacaattaagaactttctttagttgattaacgttttcagtgctttttgaaagcaactaagttatgtagcttcattgatggagcttaaattattatagatgggtttttacatcct

SEQ ID NO: 122636 - DNA, 1165 bp, Cannabis sativa
  modified_base (30)..(76): a, c, t, g, unknown or other
tgggaagatggtagtgcaattgagtgggannnnnnnnnnnnnnnnnnnnnnnnnnnnnnnnnnnnnnnnnnnnnnnagtgaaatgatgatttccttcgatgatattttgttattatatatgtataaaatcattaacctatatattataaatggcataggcttataaatatatgtacagaatcgcatatagtagacgttttttttttgaaaaaataactgatttatatatgttcagtcgcagaaaaatatatataaaaactttaattgaatctcatatacatataaactaccacaaatctctttcaatatgtatatatgtatgaacgataatcaataaaatatatatattcagcaaatattaaatacaataataatttactggaagaccaagaatactatatatccttaagaattaatttagggatgttctgatactacatgttaagaacactgtaaatctgaatttagccctaattaattcaagagaatcaaataatagaatatagattagcggaagcgtattggagtccattaaatcgtttgtaaaaagggtatgatctttcaatttgcatcaaaaacctttgaagctttattttcctgatgtggggatataggattctgaaaaatacgataggatgcacatgggaaccattacttgttatattaccgactattaaaatagttaattaataatatttattaactatttctaatgggaaatttgatattatatgcttaaaattaatttatccacttaaaatatgctagcatattttgcatgatgcaaaatatacttacaccatttttctcatccaattttacccttaaacaaataaaaatcaaacatccatctctctctctttaggatactcacatcacacacacgcacacactctaccagtcggacgacccatcaccggagctagcgttattcggctgccttacatttcaaaaaaacttctctcgttttttgtgtttttttcttctggtttaccaattttttgcaatttttaacgatgtatttgcaatgatagaataaatttgaggtcagggataaagtttagtgataatttacgatatttagcgatattttgcgatgtttcgcgatgttgtgaattggagacatttagagatattttcatgattttgcgatgttttgcgacat

SEQ ID NO: 122637 - DNA, 618 bp, Cannabis sativa
gttggtgttttgtgtgattaaatttatttaaaatatatatttataattcaatattctggcacgaataatttataaaaatagcaaaatttcaatatattaatacgtactcacattagtttttcctttgataaatttctgtcctattattatatatgctccaaaatttgtcctccatctttgagaaaaaaaaaaaatactttggtatatataaattatatatatgcaatatcaaatatacaaaggtcaatttgtctaaaacaaataaagaatgaataataaataaaatacttaattaattaacaggcattttcaatattcaaactaattggtcaatattttgcttcctatatatgcccacaattcacaacttctgcgttttgtgggagacctgatcaaacctgtttgtgatcattataattgatcatttaaaatgctaaaattaaaaaccatcttcataagatagaaaaatatttatttatgtacgtgaaccaattaaattatagttttcagtcttggcttgtcatattttatttttcaacgtaacgaatttaagaaaattggtgtattacgtaatagtgaattaaataaccacttggggctagctcaagtggccatagg

SEQ ID NO: 122638 - DNA, 969 bp, Cannabis sativa
ataatcacatgaactaaataacactctaaacaagtaatgaaaataaatctgtttctttattggtaaataaatagaaaagattacattaaaatagagttttatttagggcacaaagcccaacaaaaagtgctttatctttgtatatccgtccataattacctagataggattgtagaactctactgctcttgataattcaaccacaaagtccatggttatttctttccatttccactaaggaatttttagaggttgaagtattcccactggtctctaatgctctaccttgacctgctggtaaattaaataattgacacatactccacaatgtcacctcttatacctgaccaccagtacaggctttcacattatgatacatcttagctgtcctcggatgtagtaaatatggcgtgctatgaagctcatccagaattttctgtctaatatataccatcatcagctagtacaaaaatcttgtttctaaatcatactaattcatctaatgaaattgagaagctttatgctgacccaacttcaagcattttttttatactcttgtaattctagatcactctgttgggttgtcttgattctttctaacaaatcagactacaacgtaatattggccagctctagtcattaaatgaaatgatataccgcacgcgaagcacggcatgtttcctaatttagtataataattttaattataattttattaattaattatcattaaatacaccatttcactactgcaaaaatgttttttttttacgtttttaaatagtcatttaaagtatttctgtcggtttttataattgttgcctatacgactttcgcaaaatgggcaaaataggctaatgtggaccgttgcacataccctattatacgcgacgattttaaaccgttgagaatgtaaaaaaaaagagagaaaaaatataaattttttctgcattagttttataattttac

SEQ ID NO: 122639 - DNA, 940 bp, Cannabis sativa
tctctgttaaccatttttaagtgaaactcggattcaaaaaatcatcaacaacgacattcccagctttccaggagcaaattctcgagccttggcaccaaattgatatgaagaaagggactctggtcgtgaattgttcaaatcttgagggagttttttgttctgcttttcttagtttaattagtttagttttattattgttattggctgtgtttgtttaattatgtgtggttagtttgtgtgttttgtcatgttacttagtagtcttggtttatgttgtgttagtttgtacttgagaggtatatttttcttttttagcttagtttagcatagcgctcgatgataaaaattatccattttcctccatctgtggtatgcctttgttttgtgtgtgcttttgctatcccactatgctttgaatttttagaatgaccaacttcttgagagagtttaagcttctagaattagttggtgcatcccttgaggcgaaatcctagctggttttataacttatagatgatttaggcaatccttggacgattgagcctttcaagctaacccgataaatatgaattgtcaatagtcacccctatttgagatgaattgcccaatttttcttaacacccattaatgtttaatgtaccccacacccataattttcatcctgcagtacctgaacctaattactaaaatttatcaaagacaaatcaattactgttgagtagggaagtgagaaaataattagcaatgtatggtaaaatattcatagttataattgtataaccacattagggataataataggatgtgagcttggggtggtgagagatttaattcacattacatatgcatacctctcttgctaaacatgtataaatgcatagcccttaactgttactgttacttcataaacaaaaacaatatgtaaatatatatatatata

SEQ ID NO: 122640 - DNA, 1545 bp, Cannabis sativa
  modified_base (86)..(88): a, c, t, g, unknown or other
  modified_base (114)..(116): a, c, t, g, unknown or other
actcaaactcagaaacacttaatcaaaactaacaccttaaataaaactaataatacgtggctcggcacgtaacatttatctagtannnacgtaacatttatctagtatatatannnatatatatatattgattatttgggtaatttagcttcaattttaagaaacttttaaaccaaaggcattttaggcaaagcacaatgggattgagaaaactgaaagcgaaagggccctttatgtctttggttatttactaataactgaaactataggtaattttcttcaggttgtttatatatttttttaatttattttctatcaaatgaagaatgattaaaaaatacagaaagagtcttatttaacacaaacaatccaaatcaattcttcaaatgatattaacagcccataataatattaacacaaacattattttcttaaaaaaaaaataaaacattcacctgcaaaaaagaaaatgatatcgtgagatcacaaaaaaatcaagagagaaagagaggaaaaaaagagagcttctaaggttgacagtggtgggttcttcggggttgcggcgtgatcaaggagttggctaggtatataagttagggtttctttagggttttattatggatcgaagcccatttaattaggagtttagaaacccttttttaaaaaaactgaaatcatagggtacacgcggtaccttataacttcggttatttctaaataatcgaaccctaaagtgtttcacaatagttttttcctttttacctacggttttctaactataatgaagctacatgtgagcaactaaataaatgagagacgcaattggaaggctatattcttttttttaaaaaaaaaaatgatcgaaaaaaattaaactaaagcctaatattgtagtagtgtttgatgacaaggtttagggattttggccatgaacattcttttatgggtggtgttaactataatcatgggtgatccaatgtaattcttctagatttaatttaaaattttgtaaatatttttacaaatcaaagtaaaatatctgaatcaaataatctaatgattaagagtaatcgattcaatactcacatttattaactagaagattttaatattatttcattgtctaaaacaaatatttccaagtaatgcattctttgatggtagataatatttaaaaatgattgatggttgattataataaaactaacaaattgtaatggttgaacatgtgagaaataagaatatgtaagaggccatgaatgatagttattacttgagtaaggaggtctccggtttttaaatagtgaagagtgcttatcagttattataatagtttaacggttatcgggatgttgatccaaactctaggttttggcataatttggcaactcaaaatcccttcaaaggtgaaagatcttatatggtgtgcttgcacttagtgtcttcccatgatgtatcagtttagtttgaaacatgtatcagttcaaagacatttctctttgtttgtgtgatgatgagactattattcatagtcttattctctgt

SEQ ID NO: 122641 - DNA, 1554 bp, Cannabis sativa
tgatctaactgattcccttaacacagcagcacaattctattcagtataagtacattctcatgaagtggtgttcatagtccagcccccaccacttcatatactgatgtccacttgtatcttactattacatgcttcatataataacttgatagagaaccaatagtttttaagtactacagccttttttatttatcttaggcatctaaagggttgtgtttatattccattcctcagtcaatagttatcactttactgggttctatggcatgggcaacctgcacaaagatgtctccagcaacttttataggttggttggtgaaactgcattgcccagtgtagttatactaaacaatcatattaaatgagttatattattctgacactttaattgatttcaagaataatatggcagttggtttaattttaaatatgatacatgtttttatactgtcaatcaataatattatgtatttaccattatgtattaaatttcaatggtgagaaaaaaaattaaaataaaaaattaaaaaaaaaaaaatacatcacatatattgaaggaagttattcatcaatttagtaaaaattttatactgaacaaattctatcaattttaaataaaatgtttatgtacgtgttcaaattaagaactttaattttcattcaatactttcactatgagaagtatttaaatgagaatggagtgttttttttttcttttatttggcaagataaatgagaatggggttgagaggcagttagaactaagggtgtatgtcggtcggtttagtcgagttatattatatttttattaacccaatataaatatcgggttgtaaaaatttaatcgtaacccgcccaatgaaaatttagaaaaagttcaacccgccaaaattttcggggtcaggttaacccgtccaaaccgttcttctttttttttttataattattggttattatgtttaggaatggaaattggttttatgaggtggtagtagattgaggcaccaacacctatttatatttgtttttaggccataaattctatttccaacaaataatttttactttatttttatgccaatgacaaatagcataatgtcatgtgttattcacttactccacacatgttgaaagagttcttcattataattatcagttattgtacatcatttcctgtatttagttaatattatgtcagttttgtaattagttcatggctaactctagttgtaaaatgattgttacctttccatgttagtcaccactattccaatttgattcggctaactaaattcttcaactgttcaaccaaaatagctttgtttgggtctagttaatgttgcatttattgatcccttaaattcaggggtggataacctcaacaagaaaaatatatcctgtcaatatcagtgattggcagacatttacactcctttatagatcttatttctgacaaaggtagaggtgttcaataaaatttacaaaccgcccaacctgaataaaccgcccaaaccaaaccgaataaaccgacaaaaaatataacccgaaataata

SEQ ID NO: 122642 - DNA, 2009 bp, Cannabis sativa
gagagagagagagagagaaacattgagatgagtttagttatattatttgagggatataattggaactaacactcctacaaaaggagctttagctacaaattttttcaatcactaaaaaaaaagcgttgctatagctaaaagagaaaaaatatcttcaaaccccaaataatcgcctctaaaggggttgtgaacttctaagtgggctttagccaatgcattaatctcggtagctacaccacccacggaatataaagaaccataagaaaaccctaatgaacccctataaagccctaacaaaaatccggccgcctctaccataaataaaactctaaagaaacacccattttctctttctctctctctctctctatctctctctctctatctcattttatctctttctctttctctctttgtttgactcgccaaccaccgcaaggcgccatgaaaggttttttttttatttcttcttttcctctctctttctatgtgtctctaagctcaaccaccaccaaccctagcattggcgacgcctcaaccacgaagatcccaccaccgctggtgaaaaactctctctctaacattgacgacactcaaccaccaccaaaggtcccatctctctctctctctctctatctttctctcttccctgccatatttttcattttgtgttttctcttaccattttattttagttgtttgtaggtggttcttgcggctaactcagatttgtggtttatttatttttttaagaaaaaaagtgttattttacgtttagatctatgatttcagtgtcaaattggactctctcccgctctattcatcattctctgtcgttgaactgccattaagatataaaaaaaatataacaaaaataaaaaaaaaaccatggtggcagttattagaggcaattgttagcaaataactgccaccataggatccctttagaggccttttttttaaacccttttagtgacccttagaatgcctacaattacgaatttcgctaaaaccgcatctaaagggttttaaaaaattgcctttaaaaaccctttttgtactagtgtaaataaatacactagcatattttctttgatgtttcgtgtgttggtatgcttagggaccgtgcttcacattcaagcatgataacccaaatttccctttatcaactactatttaccacgtcactcgttttatggtaaaattgaatagaatatgatagaaggaccacattattgtaaacgttatattttgatagatgttatcaacgagtggtataccataaggggcaaaacttggtaatgtaaaaaattcagaaaaataaaaaaattaagaggaattttatttgcaccttaaaaatttaaaaatacagctctttcaataatttttattttacataaaatatatatttaattatattagttttttttaattattttcttataattcatattcttaaaaaatatacatctcaaacaaaaataaattatattttaaacatgataacaaaaaaattaaaataaaataagaaaatttatacttgatttaaaaaatattatgaaaataaaattaaaataagtattgaaactaacacaaaataatgtgagaaaaaaatttagagatatattaagagtgatttttgaaaattattttaagcttaatttttataaattttagggtgtacttattagggatgggcatccgatttaatctagtatttttttcttcatccggtccaatccaattagtaattgaatttggaaaattatcatcttatcaaatctaattagactttaaaatccaatccaattactaattagattggatcaattttttaattggatatcttatacacctaaattttaatattaatttaaaaatatgtagaaaaaaaattcgtaaaaactaaataacacaatttatttaggtttaatactccatatggtacgggcatggtcattagggattgtcatgggaagttaatcgaagctagttcctctttgcattct

SEQ ID NO: 122643 - DNA, 1571 bp, Cannabis sativa
atatatttatatatatacatgctttatatacatacatacatataatatatatgaatatttggtgccctttttgcttttaacaggacgtggagaatggttagataaaggacataggaagtgtcttattctctggcatcgaatccaagagtgggctgacattgttcttaactttgtgagtaaaaacttgagtctacaattgagtgctggaatttgttacttactttcaaaataaatttgcttgcatatctgattaggttaaagataatgggctggaggactcagttatgaccgttgaggaaatacgttcagggattgaatccagaggaacaggtactcaagttgtacatttaatgccaagttaaattatatctttgaattgactgagggagctccaaatgtatagatactattgcaattactgatgatcagtttgactttgagaactaatgattattaacttttgaacctcttcgtttgctttatacaagtgtgaaatagtccattcccaaacttcctaaatttattattattctccacaagatgaattacatatcttcaatgcaaatgtttttcatgatgcttaattttgcactaaatttaacttatactccaattcacaatccatttgtgattatataaatatataaatatatatatatatatacatgtatgtataaatttatacttatactgaactaaaggtgtctagtccagaatgagtccccattctctgataagatgaggaaagacagaccttaaaacccaagttgcttcccagaatttgctcattagtactaactacttttttccaaaccatttgatgatgcgtcaactgttacacaaacttattttagttttgcatgctaaaagtttggttcaagtgatactttgtataaggagattatgaaaaggcgattttttttcgggtttaagagctcactcttgctatctttattcctcagagctgcatggtattgatcgcacaattctgatgcgagctttgaaactgctagaacagaaaggaaagctcgccatcttcaagggatcttcagctgatgatgagggcgtaaaattctccttataatcatttcattccggtgacaagttgggttttctacaatttccttggttgcctgatatcatgatcattggaagagtgtttgctggccaaatttgattgttgtttatggatgaactttgtgtagacattcttttgtctgaaattaaacttaaacgacttgggaaaataaataaattaaacttggacaaatttctttcttctagttttcttttctgggtcttgctaattttgttgtcttgctatgttatggactttgaattgttacaattatagtttcacattggaatgtgaaggtagctcatatgccattgctaacacaagcaggagatcatgagtttaggtggaaatatttacagagcgttcttggttatgctgtaggaatgattattagacattttattacaatagaagataaatcaagatatatacaactcaattgtaaaaataatacaaggactaaaataaaagactgattaaatatatatgttac

SEQ ID NO: 122644 - DNA, 563 bp, Cannabis sativa
attgaagccatatgtagagctttcttatggaagggacaacatatgtttcaaggagctggtgcaatagcttgggaccaagtgtgcaaatcaaaaacagaaggaggattaggcttcaaaagagtaaaggaatggaataaagcagccatgatcaaatatgtatgggccattgcaaagaaagaagaaaatctatgggtgcaatggatccatagtgtttatctcaagaacaaagattggtggagctacacatgtctaaaccaagggagctggtattcgaggcagctggtggctctaaaagaccaggtatgctcctcacctgatatgcagcaattcaagggagtaacttaccaaatctctacagggtatcgaattctatgtcccattcaagagaagaaacaatagagtaaattggtttggggtaggttcaattctcccaaacatagttttgttttctggcttgctgtccagtggagattgaagacaagagagcgactgcacagaatgaatattattggcgattcttcatgtataagttgcggacaccaggtagaaacaattgaccatct

SEQ ID NO: 122645 - DNA, 3989 bp, Cannabis sativa
gagagagagagagagtttatcaaacacttagagtttagaagcatgtttctagcttagaggcaacttagatttttggctagaggttaaggcctttatataggaggcctaaaaccataggtttacaattcaaacccttaacattcgtatagtttgttagatatttacaaaagaccaaagtgcccttggttctagatattatttagccattatgttgggcttttagggcccaatttgcagcccatccctgttgtccacgtgtgggagggtccatcaaggcctgcaatgcattccttggctgcccaggcccttgtggtggccaggctggttagccatggtgccgtccctaggctggccgacctgtcacttgatccccgtttgagtgttggggtcttcgtttgcttaggtgctaacttggccttccttttggtgacctatactgccacatggcgctgattctatccacataagcatgccacatcatgagaataaaatttgggataatatttgccccccaagtccatgtgcggacatctatatgggtagagactttaccaactgttgggtgttgttaggaatgttgttacctttactaaataaaagttgatgcacttgttgaagcactttttcttaactgtctgatctcattgtagtaatgaaatgactgctttagttgcctttgtgatctgttggtgaggtaagtgagaaaaagggacccacatgtactacataagtgaattttagggggaaaccctttttttacttttactttctctcactagaaattttctctagaaaagctcctccttctctctaggtagctgaacccacaaacaccattctcctcgggatttttgcactatttcaacgatccaagcttcctatattcatcttcatcgaaatcttgtagtgggtaagctttctattcccgctatatcacttggtttggttgattttgccatgaatacatgtacattatttcttgttttgaacatgctttgattcttacgttagattatagtccatttggtatttgatccgcatgataaccttaggatagacaatgtgtgatttctagacaaaaaagaactaaatctgaccttcgttgtgattcttggctctttaagtcacgaagaacatgtttgagctcttgagaaaacatgtgttctgatccatgcacatgttggtcggccaaggaggctttgtttgaagcttggccagccataggtggctttcatggggtctggttgaccatggggactatgtccctaggctggctgacctatgcatggaattagggttcctggcttgcaactagattgggtcttggggtctggctcaccactaggacttagaaccatggccgaccaaggccaatgttccaagtgggcagccaatttttctccctcttttgacctcggctagggtctcataacgtccttggaggcatatacaaccttggccttatgcgtggtttcccttggaaactctgtataaggctaggtaatgagtccattattgtcaattgtgcaacttaggacttagtgtatgtcttagtgagtgtatctaagacggtaccgggtcgttagttgaccctgtacactttgttttacctagaaggtatctacgggtacggttgctttgaatatatctatagctttgttaggttgctcacctccccttatttcttccatccaggtagtccgtgttgaattgggaggtgacagttgtgtaggtctcttgttcgcctcgtacttatggcaagaacaaaatagactctacgcaaggtacccccgtatgatcctcatgtcgccatggtggccacaagggcttgagtttttgtggaggaggagactacccagccccctattaggggtgagcctgagatggacttagagacttggagttccaatgtagaatctgagctggaggaggttgctctagtgagaaggaggaggtatatgacttgttcttttctctctgaccgtcctttgggccattatgatgcccgaggtaatccactgaacgggattggcaggcctttagaactaggaatagatcacgtccgagattagtctctagagccgaagatactagatgtgaaaccacctaaagcaaggtgggtttcacctgcttctactctctcaaatgaggccttcagtaagatccttactagtggcctaataggggtgctcattgtgagattccccgtggaaactgtagggtgcacaggctcccttcaggctgattggcatggtttgggcaccacattgaacatggggcagtgctactgcttcaccagtattttctagatgtccgaacttactttaggatgtgcccaacatagctcatgccaaagtgcataaagtatctctcggtggtatttgtcttgtagagggagctaggttggcctccgcctaccccttacgagattgggtactatttcgagttgaagtgtgcgctaaagtagagaagaagatactatttttatttcagctagatttgtcaccaatggcttaatgacactaactgtgtagccatgtcaaaggttagcaggtacgtcaaaaatattttattgcacaaggtcttcatgggattgagcaccacaaattccagtatgtgtcgctcttcagacgttccatccctactttgtaaataagggatagagcaaatcacatcctttctttgttgtctgagcagagaaacattatccggttgactagtgtggataatttctgaatgtatggcttgtaccctgctgctcctaaagctgcaagagtgccagctgctaatgaggcctgccctggagatgggcaaggctctaacttggatgatgaagaagtccctttgtctcgtattgcacaaaatttagagaggagagagagggctctctttaggcgcttggcctacaaggatccattaggtgatgcctcccttcatatcgggcctagaggccgagtttttgagggacctacatgccctgtgcctacatctagaggcaagggcaaggctgtagttgagggctttgatagctcctcttctgatgatgatggtatttgatagttaatgacaccatgcttttattcttgcattgaatatttatgaatgctttctaacttttctactttctttttgcagacatgtcttccagattgagaggtcttgcaggcgaacctttggatgagcctaccgcatgggtgaggcccaaggtggccaagacctcttgtggtgaggatgttgccagaccatcattgcctccccttccacaagagcctgcaccacctggacagcctgtagtacgacctgtcagccaaggcacacggaggcccactagaggagcgggttcagctgctagatagaaggttgttgagtcagccaaccggtgcatagagagggctcctcctttcttagatgaggctctgaaggagctgggtgacggtggacctgacaggctttactgcgtcggacttcaggatctttctctggtgagttatactttcagctctgttcatcttcttggcactataaaggatggttggccatggtgcttcttacatgtggctggccgaccttagaagcctacatggttgtctggccatccataacagtccaaacaggggactgtccggctagagttgcgatgtttaacattgatgttattttgctttgtttttaggccctaatgaaattgagctttactcatgattactctagggggtcttcaaatgcttttcaggagcgtgtgaagatattggaggcttcccttgcagcaaaggaaaaatccaattctgagctaaaggcctttttggtagagaggcaaagaatggtttctagtttggagatcatgcttagtgtcgggaataccaaaaacagcaccgaggctgccctcatctctgggttgcaaactgaccttgaggatcacaagaagaagttgcaggaggctcttgatggccaacatgccattaaggatgattactgttgggttttatgcc

SEQ ID NO: 122646 - DNA, 1363 bp, Cannabis sativa
gaagaagaagaagaagaagaccacttgggaaagataagagtgtggttttttttattctgatttttcaggattaggcttgtaaatatagtcgttattacatctggtgttgagattgtatagacgatagttagtttttttaattctttttttcttttgtttttttaatttattttagtattgttttacagttgtcttaccataatttatttatttgacgtcgatttcactattcttacttaatctcgccgaaattaataattgttttcctgatgtactcatgttgttgtggtagttctgtccctgggtgtgaaagataaatatatttcttcttccttctctatggttgttacatttgacgagctcactggcaaaataattttaaggtgtgtggttcttttatgtttttctaagtggttatatctacttcattattttacatttatttttgtgttgtgttagttttgttttcgtagtttttttattctaatttttcaggactgaccttgcaaatatagccgctattgcatctggtgttgagggtatacaaaagatggttaatttttttgataatttttttttgatttgttttagtgttgttttacaattgttttgccatgattatttatttgacgtcgatttctctgtttttgctcaatcgctagaattaatgattatttttcggatgttctcgtgttgctgggtggttctgtccgtgagtgtggaagatagatgcttgatatataattttccgtgtcttcaatataaaagaagaaaaaaggcaaggacaacataaatgtaattttttccgtatgatagtataaatgtaaacttttacccaaaatacaatatttttgtaaaactctttttttttagtattttcttatgatatttatattataatttataataattaaaattgtgctttatttttttataaaaactttttgtttcagatgattattttctttattaaaacgttcagattttgaaaaagaaaataaaacaatcaattttaaaagaattttatgttcttattaataataacttatcccataatcttaagtttttctttataaaaaaaaaaaaaaccatattttagtgtattaagtttttatgctataaatatcaattttttttttctcatattttttgtaaattctccataataattaggaataaattaagaaatacctcttttttgtattcgttaataaaaaatactctcatattatatttcatcaaaaagtatcaacttttgtgagtaagttgtctaatagaccctcatccttcaccagtgacggagctagaaattcggttcagtgagggcttgaataatttctttttcaagggcttgaataaaaat

SEQ ID NO: 122647 - DNA, 1164 bp, Cannabis sativa
ttcttatggaaacaaaggtttctagtggttctctttctagatttaaaaagtatttatattttaataatggtttagaagttcctcaggctggtttaaagggtgaaattatgttattgtggaaagaaaatgttgatgtaaccttattatctatgaatacaaatcactttaattgctatgtcttgtttgatgacggtccttgttggcatttttctactgtatatggttttcctgatgttatgaataaaaaacacacctggactcttcttaaaagactggtcgatgcttttcctcttagaccatggttattaattggtgatctcaatgaaattttttcatcatctcataagaaggggggtcctcttcgaaatgataatcaaatgcatactttttgctctacactagatcaatgtagtttgattgagcttccttttattggtgatgattatacctgagcaaaaaataaaaatgatttagcatctctaaaggagaggttggattggtgtttcatcaaccatgcttggcaagacaatattgcttcaccaactgtaacacatttggactactttggttcggatcacagagcaattatggcagatattagtttttctcagcagtagctacatcaagaacgacatcgatcaaggtttcattttgagcgtctttggctgaatggagcagactgtgctggtataatatctgattgttggtactatgaaaaagacaataatctctctcttggcctagtttcttgtcttgataggtgtgctgaccgcctacagaaatggcatttcaataagtttggaaaaattaaaagggatatagcagtagatcaaaaaagagttaaatctttgaactccaaaactattgctaacactgatcacatccaatcagctaaatcaattttggatgatcttgcagctaaagaagagcaatattggcatcaacgttcaagagtggattggttgcagtcaggggatcgtaatactaaattttttcatgccaaagcatcagctaggaactccaacaataaaatcaaggctacctatgatgacgattagggttgttcatccgatccaatccgcaacttttttggtcaaacaacatccgatccgcactaagtgcggattttattttttggatccaatccaatccgcacaatagctc

SEQ ID NO: 122648 - DNA, 658 bp, Cannabis sativa
  modified_base (601)..(612): a, c, t, g, unknown or other
acgtggcttggcacgtaacaatcacctagtatatatatatgtttcaactgattgaaagagatatgattctaacttatgttaaatattacatacacttcctcaagttctatgcattgtggcacatttatttcttcttgagttagatatagtcaaaataattcgatgaaatgtggttaaataacgaatgaattagtataaaggggtgataaattctgatttgaacattttgtgtattttatattcacagtgggatcaaatggctttgaaaggagaaatataatgtagaagaaatgaagcaaatattgttgactataaatctatgaagtaaacaccggaaggatttttctaataaagataatcgcactaatttcgtgataatttctatgccacaaattagtctagttcgaagaagtcaaatgatcattagttactatcttcaaaatattatattgtggggcggctaattaattcaattaagaataaaattaaacacaacaatattttccaaaagttccatttttatacgtatatataaatgactttatgtgcgggacttttttttatttttttttttacaaagtgattagaatcactcatgaannnnnnnnnnnnacgtccgccaccggcgctggaacttcctcgaaccaggatagctcat

SEQ ID NO: 122649 - DNA, 1459 bp, Cannabis sativa
  modified_base (832)..(839): a, c, t, g, unknown or other
ttataattaataaatttatataattatgattattaaattaaaatatatgagattcgatattaaaatttattaattaataataatatgatatttcatagtggtactaaaaactatgagtaccctttaacataaatcataaaatatgtatataaatatacatacacaaatgaaaaggcacccacacacattttgtggataaatacttgattttgcataaaggtaagagaacattaacacaagaaagaggccctccctttggatcatttgagtttattgcaagtggttgaaaaggtcatccattattgcccaaaggaatgaattcaatcaaactattactagtatgtcatgactaaattcttttacttttttgaagaaaaaaaaataataatagtaaacctcaccttctaaatccttgtcaaacaaagataaattatatgcctacttgctagtaattaattaagtatatatgtttagcataaaaaagacaccaaaaaccttatttttcttcgatgtactttaaaaattgaccttgttattttgattcaaattatataatttactttaaattacaaaaccagtccctaaaaaattcaatagtaaaaaatagtaaatattaatagagtgaatgatggttaaaataaaaataattttttccgacaaaaccttctcaattattatttcacttgtatttaactttctaagctcaaattttagtgataaaaccctccaaattactgaactagtagcaaatttaaggtgttattcggttaaccgtctatagactgtttatgtgtacacttgtatacacatgacacgtttatattggtacacnnnnnnnnattatttaaaaattattttcaaaattcatttttaaattaaataaaattataaaaataaaaataaaatattataaattttgaaataatttttatatttttaaaataatatataaggtgtaccaatataaatttgacacatgtacaaaagtgtacacataagcaatctatatcgaccattactgtaaaaaatggatgacactttaaatttgcaagtgattcaataatttggagagttttaccgtcaaaatttgagcttagagaattaagccgcaaaaaactcaaataaaaatgttataatcttacccatagtatttttttaatcaatcccatttgtttaaattggtatccaatgttttacaaaaatagtatcatttttgtaatatttgggtacttatatcattatttattaaaagaaaaaaataatgattatgacacatttaaattatatatattttactcatatgttattaattttaaccataaaattaaaaaaggatcgatatcatccctactcaaagttattaatatttaaaattaaatacacatcacatgtaaaaaaaatgtataatctctagatgtaatatccaaattaaaatagtatttaattttttttttctctc

SEQ ID NO: 122650 - DNA, 2181 bp, Cannabis sativa
  modified_base (2143)..(2143): a, c, t, g, unknown or other
tttgataaagtggtcatatgttttaaattttaatatgtattagtttaggcataaaatattagggtattttatgcatattttttcaaatttatattaattttaaatttaaatgaaacacaataaaaaaaatttaacatttgatatttcattttgggttcttcctttaccaaaaaaaaaaaaaaatcatgggtgttcttcataattttgtttttctgctgggaactcatatcacaaatctattttatctttgcaaacttcaccacattaaggttttactacaacattaattatttattttttttataacttaacattaaaggtattttagatgaactctctaccagtaaaaagaaaaaactttttcagtctcttttgttattaaaaaaaaacagaaaacaaaaataattgggtctcttcaaatattaaaataaaataaatagatttattttctttttttgtaaaaatttttaaccataaaaaagactttctaattttcatagttttttttttcttttacaatattacatttttttcttctcatagttagctctctattgaagtattgtctttttgtagattgagaattttagataaacaaatagaataataaaaaattaaaattaaaattagtgcctgagaaaaaaatttatcagtaatcttcccactcttggcagttggaggaggcgaatccaccgacgcagtccagaagataaccatagggagaagcaatgcggtcggtggatgggaaaattatgggagctctgatcgaaaatttggataatgatttacatgtggatgatatagttgaaaacggaagccatacaagtgcttcaatggaagaaactagaaagagaagaggtgagagagagagtaaagagattaatttattttttgattgatttattaaattattatttatttttataatattattaaaaaataaatttacaaataatctagtgtagtcaaaatattaactattgttatcgagtcatctatttatcaccattagatttattatctatagttgtaaaaacttcccacaggataaaaccaaagtgcctactatagatatatccaatatattataccatttagtaacttttacatataaaataacaaaagaagaagtcttcatagtagttaaggttaaattttcttaatattaaagttaattatttttctttttgtgtatagtttttaatcaattaatttgtgtcttgcttttcaaaaattaattgattaattttttaccttttaacgtttattgaaaattattgttttccataaagttttgtgatgtatttttgtgttgtaactttttttttgtaagtttagtagtatgtgttcagtgtgttttgtttggtatcattttttttggcggtgactgttttatgtttatcgtaagaatgtcatgaagtagcagttacacaagatttgttccgcagtcggtaaagataaatttttcttcataatataatatttttgtttaaataaaaattcttatttgaatattaccagtaagtagtgtactaattaaattatatatattttatataggtatatttttattttactaattaaataagtttcattataattctctttcttcaaaattttactatagtattaatttatatgataattttaaaattgttattttatcgtttatttaggaagttactaaatttatttatttgatgtttttgtgtaggtatcaacttttctaacagcagttcttgctttcttagttggattaaaatggactcaaggaaatctcatagttattcaggcagaagttatagctcttataatggttgcattggattggttgctagaattggactccctctcatttctttggagcatgattgtttagatttaatctctatcttttttaagagattttctttctgtaatgatttagggactctattttttttttttttagtttactgtccaattttcttaaggcgtctcttattcatgcaaatcattcggctaatatgactatgcatgaattagttgtgcatgtacttaaggtggatggtgagctaatttgaatggaggatcttcgatctcttctttatgatgtactcaacacttattttttctccataaaattttgttcattgttaaaaanaaaaaaaaaaaaaaagcacaaccattaaaatgggataa

SEQ ID NO: 122651 - DNA, 568 bp, Cannabis sativa
aatgtatgatatatatatatatatcttgtcacgcagtgaataaaacaaattaatgtgtcttataaacaatttttttagacaatttgtaaacttgttagttaattaaaaccttaagttgtgtttcagcataaggagttgcaattcaaattagctttgctgtggcctgttaggactgggttggaaagctggctgtattgttagaggacaggtgacaatgtagtttgttagcatagataatcatgatagggatgattctagagtctgttaggaatattctagtacagatgcattgaggaggaggaggagggaataaatagtgaagggatgagtagacaggtgaaaattagtaaatagagttggagctctcttgggaggtcccaggctcctcgaattgcatgtgttatctttctcttttatttcttatcttaatattgcaatacgatatttcttttgcatattcttcttagttttctctactgttacgtgttctttctatttggattgctatcatggttaatttattttctttctttctttctccatagcaccaaaaaaaaaaaaaaaaaaa

SEQ ID NO: 122652 - DNA, 2110 bp, Cannabis sativa
caagcgacaccaaaaacttttaaaaaggcataatcgggtttctttgtgtacaaagcttcaaaaggtgacttattatttaaaattggtgtaggaagtctatttatgagatagacagcagtttgaaaagcttcccaccaatattttagaggcatgtgagcttgagctaggagagtgagacccatttcaactatgtgtctatgctttctctcagctctaccattttgagctgaggtgtgaggacaagaatggtgaaaatcaatcccatgtgtaataactgtttctttgaaggcttgatattcacctccccaatcagttctaaggcttttaatttttctgtcaaattgtgtttcagcaaaggttttaaattggatgaaagcatcattggcttcagcttttgtttttaatggataaatccatgtaaacctagtgcaatcatcaataaaatgtatgtaaaacctataaccattattagccatgattggtgaggccccccataagtcactatgaattaagtcaagaacgtgattagctttgctggtggagtttttaaatggtaaagaatgagattttccaaactgacaagcatcacaaaaatgattaatttcattctttgatagtttaatttgacatgaatttaagacttgactcaatactttaagtgatggatggcctaatctcctatgccaaacatcacatttagagacattggactgactactactggatttagacttgacagcaacaccagaaaacatactggtttttattgactcgattttcttggaacttctaggatcgggtttggagtgtggttgaaagttgatagagggccatctttaagcatcccttgaagaagaaccttccttgttgctttgtccttcacaacacaacaatcagaataaaattcaataagaacattattgtcatgagtcaacttggaaatacttagtaaatttttggcaatttcaggcactaataacatttcttttagcaccagattttgaccagtaacagtatgtaaaactccatttccaagatgagaaattaacaatttattaccatttccaactgtgaccttttcgttaccaccatattcttgcttttgtgtcattgaagaggagtcaaaagtgatatggttgttggccccactgtcagcaaaccaagcatcactctccaaagtttctggtgcagcaacataggcagatggagtgtgtttgttctgagtgccaccaccaccaccattcgggtctgttcccatgtagttttcatcaaatctattgtaacaaatggcagctgagtggccatatttgccacatacctgacatgttggtttagatccagttgtcctaccaccaaatctgcctcttccacgactccctctgtttcctcctcctctgttgggatttcttcctcctggatgttggggatagtgattggaacctctcccatgtcctccagtttgaggtgtttgagctagattagcttatggatctgtgaggctgctgttacttttggtgttgatgttggatcgagcatggagtctctcaatcttgctgtcaaaactcagcagcaatttctggagctcctgccatgtagtttttggtctagcctctatctgcagcacaatagagagataactgaaatctaaaccagacagaacattagtaaccagttgtgactcggaatagggttctcctgcaagagagagaaggtcagaccaatttttcttttgtctgagatattcagtcataggagtatttcctttttgagtgacttgaatcaatgttctagtctcatccatcttagattttgagtgagcaccataaagttgttcaagtgcttgccataagctggcagcagtagcaactcccatgacttccaaggctatggtttctgtcatggagctgtacaaccaccccatgaggagctggtcattgatgacccagttttcataatctggatttgtagatctggtgacttcggatgagttttctgcaatgataaactctggaggacagatagtggttccatttaatccatcaagccgatggcctctaacaatggttgaaaccattgttttccacagaccatagttgtttctgtcgagttt

SEQ ID NO: 122653 - DNA, 827 bp, Cannabis sativa
gctgcacatgagttagcagttcatgcactcagggtggatggcaaattagtttggatggatgattttcctccatttctctatgatgtactaaaatctgattatattcaatgaaagtttactgtcaaaaaaaataaaataaataaataaataatatactattaataactaaagacaattatttttctcttctatctttttttctccatagtcatacataagtatgtttaggttttggatcagatagtagacaatcatggttttgatcagctagcaagaaagagttgggtcaccattacaattgcttctttcaacaagagcgtccactatcatctcaggtatttaattatctatacaatatatcaaaatatttatctatatatatatatatatatattatatacacacattagatattacctccctatattatttcccctatattgttctctttgagtaaattttttaattatttatttattttgtaggtggattatctcacaaattaagaaggtggccgaaattcttcatgcactacctcatcgtcatattcattttaggttttagattaacgataaactttcttttgtaagaaaattaacaaaaaactttaattctcgattcaaacgctatttttcaattttatttttctatatttaaaattctcattccataaactttgtactaatatttttcaatcaatgcaatgaaaaataaactttaattcttgtatggaaaatcaaactctcaatcccaataatcaacaacatcaaagttcaagttctcaaaatctataaaaataaattaaaaaaaaaaaaacagatctcata

SEQ ID NO: 122654 - DNA, 1190 bp, Cannabis sativa
aaaaaaaaaaaaaaaccttaatattattaatataccataaataacgctactcattactaattaattttgtgataaaaccatatactttttaccatatatacatccaaaccaatattaatacaactttaatttaaacactattatgttataaaaagatgcatcaagttcaataaaactgtgttttttttcaacatttttcttctaacaattagaacatgaaatgatcatgaattgaattccaagctacatcaacttgccacctatctctctcaatgagaatatatcgaatttcaatataacttgagcatgaaatgaaatccatgcaacaattccaagaaatatattccaataattgaacacaactagcactagcatcaacactactcattgtaagagataaaaacaattttgatttgatacccttttacagcatcaaaatggccttgttggtttggtgttcctcttgttcttacatatcttgtcaagaaggaatctatcacatattttggattgaccaatctttttgtgtaaattatttataatatttaagggaaataaataatcagatgtaatgaaggctggttagctttggattttcatttttttaaaaaattaaaagaatttagtgtatatatatgacatcatgaatgggaaattaaactataatttgtattgaaattttatgaagctaatacaagatttaaaaataattacccatagtaagagggtctttgagtaatatacaaagttaaatacaggttagaaggctggttatgctaattcatattttaatgaaaaaaatctaaaccattcactttaaatattgaaaagccactaattttgatcacaaatgtctaatctaaaacgctttatatatatttctagaagtgtaaaattgaacagaaaaggattgaagccttcctagttgctcattttgaactttgttaagaattcaacaaaaattcttcatcaaaaaaaaaaaaaaaaaaacaagacttcaactaaaatttacttttttttttttccagctagttgaactagatacaaagaaaaatattttcctataaaattgaggttttttcatttttatggtttttaaggccaaaaaaaatgaataattacataatgcactattttttttgtaaaatatttacatttttacgttcaaaaaatattttttttttacattt

SEQ ID NO: 122655 - DNA, 1420 bp, Cannabis sativa
gaaccaaatgacacacaaataagtgatgaaaatacttctgttttttctttattgatatttaaatgatagggattacattgacatagatttttatttagggcataacacccaacatactcctcattctcttgatatatatttgtcttataataaactaaccaaatcttacaaagcttttattgttgcagtgacctctcttaaggaaccacaaacataccaacaagtcattcaattccaacactggttggatgctatggactttgaattaacaactttatgcaacaacaagacagggattgtcgtgccactccctccaaataaatgagccattggatgtcgttgggtttacaagatcaagctcaatagtgagggctctgtagaaagattcaaggctcggttggtggctcaaggctacacacaacaagaagacctttatttctttaatactttttctcctgtggccaaaatggtcacatttaagttgatgcttgccatttccactataaaacaatggcatatgcttcaaatagacattaataatgcctttctaaatggagacctcaatgaagaggtctacatgactttaccacttggtcttaacttgtttgcctctgctcttgtaggtaccaatctagtttgcaagcttcaaagatccatatatggactacggcaatcttccaggcaatggtacaagaaactgactgaggccctcatccaagaatgatttcaccaatctcaagctgattataccctttttactaaaggccagaattacaacttcatcggtcttctcgtatacgttgatgatatagttatcacgggaccaaatctcaccattcttcagcaactataagactctctacatgacaagttcaagctcaaagctcttggtaatctaaaatactccctaggctttaagatagctcgaacaaaagatagcctactcctctctcaaaggaagtacacgttgccacttcttgaagatacaggatacattggcagcaaacttgccaaagccccaattgatccacggcacaaactcgatgaccaacaaggtgaaatgttgaccaaaccatccaactactggcaactcataggaaaactcctatacctaacattatcaagacctgatattagatacgctgtaaatgtcctgagccagttcatggcatctccaaggactcctcagaagcaggccttacatcatctcataaggtatttaaaaggcagtcctagccaaggcattctatactcagccaactcatcttttcatttcagaggtttttctgactccgattgggcttcctgtccaatcacaagatgatcgacaacaggtttttgtattttcttaggcgactgccttatctcccggaaaactaagaagcaacctactatttcagaagcttagcaaaggctgaat

SEQ ID NO: 122656 - DNA, 1680 bp, Cannabis sativa
  modified_base (173)..(173): a, c, t, g, unknown or other
ggtcgccggaccccaaaatattttgattcaaaaatagtatccatgatacctacatattttgatataaacttcgtaattaataaattacgctttatttaatcatttaataaattcacactaattatcctaagtaagatcataatcttaattcattaccaaaataattacatatntaataaaatatgtccaattaaataatatattaattttcgggatattacactacgagtccatcttattaaggataaatatgtttgtatacagaatacaaaatacaatgatacaatttaggaacaatatctctttctctttgaaattggccgtcccctttaccctgggttctgtctctatttataaatgtatggggtgacaattattctgttgggatctactcattcataaccgttcatgaaacgtgtatatttctcacattttattatttatgcatatgggataatattaaatgaccgttcaactgctttttgtttttatccatagatagttatgctgattgtattggatacttctcgtcaattacatgttatctttcttaatcatctttgtagaaaaaaatactaagtgttaagatacaatgcatctcgcaattctcccttgccttttgaaaggtactagcgaggttgttacttccatacgtcaaaagcgaggtgaataaatattgaagttatttttcttccttaagcatactcacgagtatgtggatcaatgagctgcaagctcttactcatgagtatgtggatcaatgagttgtaagtttattgtttactcattctgaatagccttcattgttttctgtttatcccgagatggacttgtttatcttgctggtcacatctcgttattgcttatttggtggcgagtttcaaatatttctattaaatatactttcggaggtgagtcatttaatgtgcatttaataatgcatggtttgagctggttcatattccagctctaatacacgtgtcaacttcttattgctagctaaaatttaagtataacaatatcgttattagggtgctaatccatctttcattattttattttgttttgtaaatgtttttgagatttcatgatatgttattacgttgggcgttctttgctcttcttataactgtgttgtctaaattttctagggatagatttgacaatgagtgttcacaactttttatttgtagttttgatttggctaaacatatccttcggttagacaatcaattattttagtctgaggagatatacgtctcgtgaattcattaaggccgcgcttagaaagccactatgtaattaaaattgagtgtaattcaaaataattacaagattggcgtatttatttttgctagtttgctttctagttttcctgaggcatccttagttgatgtttgtttctcatgaattagttgtgcatgcatttagggtgaatggtgaattagcttagattaatgtttatccatatttttttattgatacgtaattaactctggttctaattaataagagtttaatttcaaaaaaagaaaaagtaattaagaggtctcaattgcactttttaattctcatctcccctataagtgtatgagaaattttatttacaccccaaaaatttataagtacaccccattttaataatttttattttatacaaaatttatatttttaattgta

SEQ ID NO: 122657 - DNA, 757 bp, Cannabis sativa
  modified_base (614)..(618): a, c, t, g, unknown or other
acttacggtttgggctgagttatcaatctatagctattgggctttccacttgtattgactttcatcttgctcaattgggctatcagcagatatggcagaacctctgtaatgtttgttctatgaataaaggttactttgaaaaaataaaaaaagaacacaataagtttggtaaaaataataaatacataaataaaccaacagaaatcattttattatttgatatacatgtatttaaatgctaaattccaattcattactggtcagtgctttaaaaaagtattttagaagacacaagctgtaaacaagaaaaagttaccaaataagaaatcaaccgcaacaataatcaacggttattgtcgagattttcagaaactgatttaaaatataaaaaaaattaaagaaataaaaaaaaatgaagaatgagaagaattttttacgtggttcaaggattaacgatctctagtccacatgtcattattataatagggtaaatattattttggaccctgtgtttagcaaaagttaccaattaaaccctctattttgttaaataataaaataaaccctatattttctaaaactatacatataggaccctgaactaattttttgtnnnnntaaaacttaataataatctgatctaaagatgttatgacaaaactgattatagttttcatatgtgttcgtgttagaaattatcttaaagtttcgtatattaaaaaataaaattgttgaaaattaagctcagggtcctatt

SEQ ID NO: 122658 - DNA, 1534 bp, Cannabis sativa
  modified_base (1504)..(1504): a, c, t, g, unknown or other
tctaataattgggctttaagcccagtaagcccaatttgaatgaaatgcaatttatcactattattatttttaaaaagtggtgttcttgtagtcttatcctatatctatttctgttatataaatcacatttgagtggaaacttctacaagcttgggtgagaagtgagaacaatgaccaaatttaattaggtcatataaaataatttaacgtaatcatcacaaattttactaaatgtccaccatatatacttatattaataacctaagtagtaggtaactaccaatgtaattattaatatcccaacataattattgttcacactctttcttttcctttttccatccttttattttattttattacattaactaccctcattgccttcaaacacgacatttgtacatcattatcatatttatagatttgtttttacattttttttgtcttttcatgttgagctggagatggatccactaaattatataatttcaattattaacttggtcgtgggtggattccttctcggattgtcgttagatatttcgaacaacaaccaaggaaaagaaaacgtggatcaaatctattcatttcaaactatattattacaattaatgccaaaagtaactttttgtgaaaattctgtttaagtatctattattacttggcttctaaaatagatttagtgaaatagatctttctacacacttaagatatattagtgatcattccataataagatacatcagagagaaaacaaattcatcttatattgtgtcttcgatctgtctttctacttttacaattttgctacaatttaatttgtttatttcttaaactataatttgtaaaatctactttcttaagttaggattatgtgaataatttatataaaggactagtatgtgtatttttgtttaaaacttggtaattaaattattatattggcaaaaaatttgcttttattatattgatgtggcgagagtattgtggctggactaccggtatttgttcgaaagtgactgcatgcaaatgcgaggatgcatatatgaagtgcttgttagagtaaattgcatatatgctatagcactgttgctattatacgggtatttagtataggcgggctaggaccgtacttaaaagactacattattcaaatgttcaaaataaaaaatattattagatttttatttaagtaaaatttaatgtacaataaataataaatattcataactttattaattgaggtgtatcatatagtatacaatttcatgagtttaaattctataacattcttttttaatattatatataaatatttttgagggccttaaaatctaattcttgtgctgctgcgttattaatagcagatgtgcctagtgttgcttagtaataaaagtattctttcaaaaaaaaaaaaaaaaatctaattcttcttagatctatatattatattttatttattttttaaactatatatattatttatgtaaagaccgcttagttnaatttagaaattagcagttaatcacgttta

SEQ ID NO: 122659 - DNA, 794 bp, Cannabis sativa
aaagtaaaaaagtaatatttaatgagatgataatgaaataataaaagctagttaggatttttgtttttttaattttgacgtgtatcaaatcatatttcttaaatttttttagctgttaaaaattctctttgaattattgtgattgttgaatttaaggatttttgtccattttcattcaatttcactaatttggtgattgtccaagtattaaatcatgctcttcagatttaaatatgtaacaaatcacaccgttctaactttgatatgtcttttgaattttcatttatgttagacttattaaaattggacaaaaaattttaaatctaacaatctcaatagtttaaggaaaatttttaatggttttataaatttaggggcatattatttgttacatgtcaaagtttggagagcagaaataattagctaataataaaatgtgacatcaaagtaaattaaacgttttaggatttgcaaaatatattatcatgtgttttaaatttggcacaattttttaaagttgtcaaatttgatattttttggcacactattaaagttttttcaagagagttatattttagcaattaacctttttttttttttttttttgaagagagcaattaacctttttgtttgatttgtttgtggaaattactaaattagatagtaaccttgttgaatttctctttgaacggttaacttccatttgatggtgactggtcatccttgtcaccatttaatgaatcaagactattcgaattactattttgccgattacaaatataaaactttaagta

SEQ ID NO: 122660 - DNA, 904 bp, Cannabis sativa
ttcttgtacaaactcttgtgaattttttgcctatataatggaaggttcagctcttgattcattagagcttttacaattctttgcgttcagttttaattgttccagatagggattgtattgataagctactcttttatatagtttgtacataaactaaagttgtaaacatgttcttacttcagcaaaagtatggttctgaatttattaacttagtgggtaaatgaagtgaaatccctcaaggttaaagtaattataaatactaaagttataattacaacatctaaatatgtattaatggcaaatactaaagttatagtagcattgtttatgatatactataaagtaatataaaaaaaaaaaaaaactcagaattataaattcaaattcaaattcaaaattatgtgataggaaaaaaaaaaaaaacctaaatgaaaacaaagaaaaattaataataataaaatatataagcttcaacaatcttagtgttatctcatttatttgcaccatgacgtggcaatagatatggatgatacgtgttccatatttccgatatctgggcggaggaaaatactcctagcagccaattatggttggtcaatatctgtagcgctcgaatgcccgagcaagttggtgaggtagatgtcggaccaagaagcaaatgtgcctatgccgggcaaggcatagaagatggcaatatcggagattaatctcgttgcgtccagactcaaagataattcctataatcatgagatcgagttagaaaataaggacaacatattttagtttcctatgtcttgaattgtaattatagaattaatgtggtttcctattttattcattataagcaaaagagaaaccatccctcatgtaataaatgttggaatatattttaccaagacctaga

SEQ ID NO: 122661 - DNA, 756 bp, Cannabis sativa
gaccaagagctatatagctaagtatataggtatgtttcaagggctaaaaaatgaaacaaaaaatattatattaattgcccggcatcttggaataataaacgcttaaaagattattaataaatagtatatatattataatttatttatatatatttatatttagtaatacaagtcaatatataaatattaatttgggcttttgttgcaccagtcgcggtcattaaaaagctaaaatgaggtccaaattaaacaaagtgtgtcagctacacagtccaagtaaattatttttttggccacatacattattatttgctttcacacattagtatagttaataattaataattaaacttgtttagttaataaattaataaatggtgaaagatcgatgaaagaataaaagctttacgttataatgaccggccatcatcgattgcataacaactaattcatcatttttatatattcatcgtaggactccactcttcatgacatatttatatatctccaaacacttacatgttcggtacctaaaaacctaggtatacatacattaattatatttaccctcatcaaataacttgatattaattaattataatgggtaaatattattttgagtgttgtgttttatattttttttaaatggtacaaaaaagttcgatctttatgcatgttcaattttaatgtgagttgctatgtagattttagttgcaatttagattgttctggttggttgttatgtgagttgctata

SEQ ID NO: 122662 - DNA, 884 bp, Cannabis sativa
aacagactaacaaaacattatcatcactgtgtatcaatgcaacaaacacttaaaataaagtaccaaattaaataattaactagttcgaaccagatgaaaaataaaataatcactattcaaaaagcaacaattaatatgcataaacagtaattattaggaaaataaaaaatgtttttaaaaaataataaaaaataatttaggagcgacaaaagtcttatctaaaaattttaaaggcacccttgataacattatttccacacaaagttttttttataattattaataatgaaatatttattgccctaaaaatattaaacattgtccttaccaaatttttaaattgaaataaaaataaataaaaaaaagacaaatattaggggctaaagaatatggacaatattttgttgctcgcaatgctctctttttcgtagtgaattgtctttgctttatttgtagttttgtacattggtgaatatgactagttcacatgagaatgagatatttattttcttgtgaaataactaatatcattgctttatcaatgttgtacatttatatttatgcatattaattgttgcaattcttagaaatctacaaactaaacaattcttgatcctttgttataatgattttccagtagaaatgaagttttcattatgacattatgggaactaaccaaaaactaacatgactaacttagtgagacagcctttaaactaaatgcaatattagttgcagcagcaagcatttttcatggacgaaatatcaacatgtttggttcagacgattacagatttcacaatgatcataacaaatctctcttgcagttagctcttgagacattcatcgagtttttcgatgacattatttgatctcgataatgt

SEQ ID NO: 122663 - DNA, 1751 bp, Cannabis sativa
gccaaaatcgacgcagaaagggcttaaaaactgcctctaaagccaaagattgtcgtagtggagattgtaaccaaattcttgctatatcccttaaaaaaaaggaaagacgtaatcttatggcatcatcagtaacactattcatcttcacagtagttcatacctctagaaatataactagataaatattgagatcttgagtagccaatccaccaaactgattctgttgtaccatattgattaaagcaggtttcagttaaaaattatttgcatcgatgattggattagcataccaaatagattttcattcaccacttgtaagaaatagtcacgaataacccgtaattgtgcatcagctgcaataggtgccagttggttataattaaggccattattgttattattgttaatggatgtcatggtgagatctagcttcttcttcactttcagctgctttaaagtcttttgaaactcgagattcaacggtgtgagtggtgtagcacttcaatttctttgcataaattaaatcacaaagcaatgaataaaataagaaacaaaataaaatttaatttaaagcaaatacgtttagtaataatgcaagtaataatttaagaactttcaatctccagtaatgacgcgaaaaacttaatacacaatttttactgcaagcgtacaatgttgttatagcaattttttaattataaaaaggttatcgaatccacaaggatcaactattaaatttcaccaattattatacttttttagtttatgctttaattagacaattcgaagtaaataattaagatcaaattaataaaatatttgaaaaaaaataaactgacaaacaataattttaatcagaaaataataaagacttataatattgacttcctttttcaatttatgaatcttagtataccaattatctcaatttattctataatttgtagtttcaagaatcttaatgtaatctattaacttctcttgagtgatggtagaattaaattaattaactaaaacaatatttctattcaatgttaatcaatcactaataataaagtaatatgattctctttaaatgaaactcatatggaatgtctcaatctcatacttttctatgtcatgcaattctaagtctgattttaaattatctctctcaagtgtaaaacctaaagtctttatactgattaatggtaatcaagcattaacaagttgataattaacacagaattgcataaataaatatgggaataatctaaaagatttaattcatagtctaaaatagttccatcaacactgtaaaatgagtgttgagttcacaatcataaatatggtaaccacaataatcaagtttaataaaagaataaaggaggaggaggaagaggaggagaaggagaaggagaatgagaatgaggagcagggtcggccctgagggtaggcaggctaggcgtgcgcctcaggcccccgaacgctcagggccccaaaattgtgaaaaaaaatattaatatatagataaaattttaaataagaaaaaaatataataaaaattatttggtgtagtggtaaaaggtttaaattctctctagaaggtcatgagatcaattcccaacctctacattttaatttcttttttttttttaaataattaatgtgtagcaatgagggattgaacattggagctcttaagagtttttaaaagctttaccattaaactaagcactagaactataatttttataatagttaaactatat

SEQ ID NO: 122664 - DNA, 1821 bp, Cannabis sativa
aaaaataatttattatatttttataagaaactctaagttgacgtggtttgttaataataaaaatattaatataaaatactttttaaaactaataaaaaaataagaagtttaaatattatttatgttaaattaaatatattttccttcaaaaaatctttttattttctgtaatatggaataaataattaggtacattttcaatcaaacttatgagcaatttgatctacgcagttttagatataaaagttatattggctattcttaaatttaactaaggttgtgcgctcggccctaagtatggtaggagaccaaccacaaataccaaaattattacctcgggaagcaccttcttaagcttcccgaggggttgtgtttttcaagaaatggatacgagccacttagtccttatcttcctcgttagcagggactggaacctgttgctacttagaatattttggattcttaaagtcctaggtagcttgtttgttgctgatgagattgcaggttttcatgttgatctcattcagtagaaaatcagttgatcgcaatccaaatggaggatccaaaagggttttgtgtcgtttttccatctcaatagttggaataagcctcttcgaaaccgttgtcaatacaataagaaaaataaataagtgcctgcaattaataagttaaaaactcaaaaccaagtttttgagacaagatagtagttacgtatgatgcgaaatatggttgtgttgattggggcgaggctagatgtccacaagaagtcatctttaaattttgttttgttgggcaacctcacgatgatcctttgatcattcgtgtaggtcccaagataatagaaaccacctactccttgcttccttgcaggacaaaccttaacggagtaaaaatataaaatttctagtggagttgggcactcccaccccaaaatttggtataaaaccttcaggcaggccaagattccataagagctcagaatcaattgaaaggggaaaattccgagataattgcaaaagtccttgtaataatctttgagagggagtactgctccggctcttttatgttctaggctccaagcgcctatactagatggcttgccggtactgcaaccttcttctcgaatcaccctttcagagggaaaacaactaaattcctctagggcaacggacctaactcgggacctttcttgtatttgatgccacaagacctcaatacctcgccaacataagatcttatagatctgatcttggactcgatcaattcggtctcaaaggtgaatgtagggtcttgaggggtcttggattttcgaaccaatgaagtcatgattttaaagtttaagtcacctagtaaaagagcaacaatgactagaggtaaaaaacaaaggtctcgctaaaggaatagtagataaattttggggttcaggccaacctagttctcattgaaaatgacgtttgccctcagtaatttcttgcaaaaatggcctatatcgagttgaaatctcatcctgattggttctaataagttgatctctaatttttgcatcgttaatctcaaggatggtttgaggtatgtttgttgtgggtttgaatagagtggctaaattctgaggacaatctgtttctaagaattctggaattgtgaattctggaataaattgggtcatacttgtgaacaagtgttatcccaatttctagaaaagtaaaatacaatttaacccaaaaatctatgaactgaataacctagaattttccctaaaagccctagaattattcaaactgttgggattttatgccctaaataaaattcatttcaatctaa

SEQ ID NO: 122665 - DNA, 1569 bp, Cannabis sativa
tttttttttcttgcttttgttgaaattgttgttttcaaagtgggttttgaaagttaggaagtatatatattgattgtacgtactttgaaaaaagatatatgatctttagtcctccaaggaaagattctcttgtcgatggaattatgtactaaatatgagaaaacacttctagttcattagtttcttctaaatgtttagtaagaacattttaatttatatatataaatcaattaattggtgattatatattaatattgatgatgatgagatcatgacattcttttttgaatatgtaatgaatgaaagttgcaacgtttaatttactaggtaggaaataatataaatgaaaaaaagaaaagaaaagaaattaaaattaaaaaaaaaggtatgattggaaatgttaattctctcctatattgtcaacatcttgatttaaagatgtggaccagtttatcagtgattgaagtaaatgggagggaacattattcatgtgaacgtcgttaacttacaactaccaaattcagatactatatatatatatatgcttcccaactttattgtcaaactcaaataacattcactttcatttcacctctctgacccatatgtaataaattaaccacagctaatttaattatagcacagcaaaataaatgtcatatatataatatagctgcgtcaatggtaaaatttcattgattaacatatagaattgataatcacatgaactatattataaagtaataattctttcttttgaaaaaaaaaaagaaaactcgtaataataatgtaggtgtttaagggagaagatctaaagaaaagatatgtatcatgaattattgtttatttgtttttattatagagaataaatttaattagtttgtctgcaccctaatgtgtataccacatttagcttatgtctttttctatgtatcatatcattaactcttctattattggcaatatttaccaattttaattgacaaccctaatatcattaactgaaacagttttatgacaatatatgactgtatactgtcactgtatagttgtgggaactgagattcacatttctttacatctgtgattttaaatgtatttttaattttcacaattggccaaatttattgtaattatcaattggtatgaataaatcgtatataatacatgtataccgtatatatataaaagtaaatatatgtatattcacaaccccaattgatatactttcctatatgctgtaagtccatgcatttacaaaattttcacatgttacttttaactgtatatatatttcagtatttaaccttgaatatataagtatatatatttatggttgtacgtatgtaattatatgattaaaactatacaaatcttataattgaattttaacttttgtgatgttttgcttggatgtaatgtcttgggaatagtactaaaagatagtaatatatatgcatgaaataatttttaatgggtattatacctctctacaacaaatattatttttagtgacaattttttaattagttataacaaaaaaaatttgtgactaaatataacttttag

SEQ ID NO: 122666 - DNA, 1989 bp, Cannabis sativa
taattaataggatattctgttaaagttaacgtagaaacctaaaaagaatcgttaaaccaaaaattttgttgcatagccacattttatataaaatagatatataaagaagaagtatgacgcggtgacgtgacggtctaaaaatattttaaagtcatctttcttttgtctccttaattctcccaattttttttatttttttattaattaattaatgtcatatttttttctaatttttttaataatattattaataatttttttaaaaaaaaaattacataatataacataaaattattcaccacgtttttattttctatttttttaaattaaaatcttttaaattatagaaaaaataataataaattagaaaaaaaataacgcttgcatacgtaaatctatatatctatatataaaggaaatgtatgagaaggtggtgtgttagtctaaaattgctttatttaactctatctgatctctctttaattttcacattttttttatttttttatttgataaaattactttatttgtctttatttattctctgcttaattttctcatctttattttttattttttatttagtttaaaatttctctaattttcttttttcttattttttaaattacatatataacatttgtttttaacgtataatcaagttgaagcatttatattttaggtttattaataaaaaaaaggtaaaaaaaaataatatataatatctacatatttgaaagaaaatataatatcaatgtataattttctttttcatgaatgtatttagttacgatatgtattttacttgataaggatcgccttaaaaaaatttcagatcacatgatagtatatatatttcttaaacacttatatatatttgatttattaaatttataaacacggaataacatattaaaaaaaatattgaaactaaatatatatactatgttatcatatatcatggatagcataaatatatatgtatttgatttatgaaatttattaatatgtatttctttattttttttatgaaaatattttttagtgataagtttgaatttatatttttgatgatgtatgatttaaggattattatagctatttttagattttaaaaatgtgttgataaaaatatttaaaattcaggatataatctgcgattaatattgagatttgtgaaggacaatagtagtgactaagagatatacggtgatgacaacgtgtaagatattgtgatgagaatcggtgagatatggtgataacaacgggtgagataaaatcaagggctgccctgaaatttagtgggccataggaaaacaataatttttgggcccttatatagagtaatatattatatttttttaaaattagtaaaaaaaatatgtacttttaaaagaggacaaaaattttttggccccaaagctaggtgggccctaggcacaggcatagcccatctatgcccagggtcggacataaatgaggtgataacaacgggagatacaatgataagaacaactttaaaagatcaaaatataaaaagaaaaaaaaaacaaatacattataagaaagaatgtttatataaataatgatgttactttaattttttctcacaccactctataaattttaaactttttaagaaataaataataaaacacactaattaactttttaacatttttaataataataattaatatctaatgaatagatttaagatatttcttcttagagctttatttttaataaataaatttattaataataatatgtaattaaataatataattttatatatgagaattattattttttgaagttttatatattatgttaataaataattatgttttattataatactaaaaaaattaaaacagccgcgcaaagaattaactaatttacaataataaaaataaaatgggcattttacataaatgtatacattttcttaattaattacataaaatgtgcaaaaaaaattaattg

SEQ ID NO: 122667 - DNA, 1078 bp, Cannabis sativa
cccggccggtaatgtatggcttgaccatgaaaagaaccacagcatgatattgcagacagtagtggatgccgatatgaaatttcgggacatagtcactggatggcctgggaaaatgaaggattggttagtgtttcagaactcaaatttttacaaacttagtgataaaggagagaggctgaatgggaagaaagtggagatttcaaaaggattagaaataagggagtacataattggtgattcaggatttcctttgctgccctatcttgtaatcccatatgaaggaaaagacctcccagaatcaaaaattgagttcaacaagcgccattccgcaactcgaatggttgctcaacgagcattggcgagactcaaggacacatggaggatcattcatggagtaatgtggagacctgacaaacacagacttccaagaatcattctggtttgctgcttgcttcataacattgccattgatatgcaagatgaggtgcaagatgcactgtctttgtcttccaaccacgactctggttatcatcaagaaatatgcggaaccactgacgtggatggtgtgaacctcagagacaagctagccctctacctgtctgcaaggttaccaccttgattgtttttcatttgggatttggtcaaattaattcttgtttttaaaagattgctgcctttcgatctattatttactttttcgagacaggatcagctcttgaaaatcattgagatgaaattatattaaattctgtttttcagtaagactaacttgttaatttttaggcagacattgcaagtttgagtagagtagatctttcagaagttaccgaaattatggccgagacaaacaggtgatagattaagctactgttttattcatttgaaatagcttgtagacttgtgtacttgtgtactagtttcctatgtaaacttatatcaaggcctatgtagtatgtgcatgcaacaacaactataactcagagtcattcaacatcactattaacacccattagggcatctccaatagaaaaactcaaatttagtgttaaatcaacaccaaaaaactactatttcaaca

SEQ ID NO: 122668 - DNA, 2187 bp, Cannabis sativa
tctttttatttaatcactctaaatataacaattgagatagtgatttaaatttattctgttacatatttatttgtcgaataaatttcacataaaaaatgtgtaatttgaagattgaagatcatcccatccactatatattaattttagagtaataaattacacaatatatattatacactgttttttattttttgtttttgtttaattttagcatctcacgtttagcatcctaccatctccaactttcatcaaagctctacacaatgatttttctttttgcttttttttttttcttcttccaaattttatgacctataagaagttcatttgcaaaagttctaaacctgcaatagcgagtgttaaatcgttgaagataatactgatgactctaatgaagattttgttgaactaacaacgaaacccatcatggtcttttgaaaaagaaaattgcagagaaaagagtttgattccaaaagttaagatgaggacccacctcgatcctcctcttcttcttcttcttcttcaaagaatttatcaattttccagcatcaataaatataattaattaaaaaattattattcagatctaactcataacccacaaatctctcataaactcaccataatgttgatcgcatcaaaaccatggctacagtcgtcgatgactgaaagcaatcccaaatctgacaatggttcccttcaatttcgcaaggtggttaggctccggttattgataacaaaaaccaacccagaattggttcactgtcctctaaatttcaacctcccagtgataggctctggagcgacatcggcttggtcccaatcttaaatctgagcatggtgtgggtgagaattttttttttttgttcttgttgtgggaaaactgtaggagaagaaataaaatgggggtgaggcttgacatttttaaacctctctctaaacacctattttgctcaaaatattttagatttgtgcaacgagaaggacggcgtgtgaaagggaagtatgggaacgacgttgtgatcttgaggtagtctagctcgaacggatttgagagaagtggagttctcagggtggtgatgatggttgtgttgggttgaaggaaaatgaggaagatgaacaagaaaagaggctggctaagttcatgaagaagaagacgaaggggagagagaaaagcaagggtcggctatggaggttttaggggacaacggtttgagcttcagactatggtggttatggaggttttggcacagaatgaagaagacgaaggggagagagaaaagtaagggtggctttgtgaaaaaaataaaaaagaaaaaataaaataaataaattaattaattttaaaataatttatttatttgttttttactttattttaaaaattttaattgaaattattatttgggccgataaaaaattgacacgtgatattttattttggtttaatcgattagttagaaagagggattaatagactagcaaaaatggtgaccttagggattattacggctaattttgaaattgggaactaatttgcatcaaccctaagatttttaaaaaaaaaatcgcaattatcccgaaaaagaaaaaaaaaaattaatgattttttattttatttttttttaaatgaaaaaaaaactcaaaagaaaaaaattatttacaattttttaatttttaaaatttttaaataattttttacgtggaccaataaaattgtgctatgtgtacactatatcgacgtacacatggacagtccagcatggcagtttacatccaaaattggatggaagtcttaaactgttaatagaacgcgagtattgagagttttgccgtcaaatttaagttttgggagttaagtgcaagcaaaataaaaatattaatggcacgtttactacacaatatttagaatcgaaataaagtaatggagaaatataacaaaataaatgaagaataatcagaatcagtatttgtaatgtgttgtttactaaagctgattgaaaatagaatgatagtgatttatcttgttactttatcaagaaacgtaattagaatacttaaattgactaaattaccccttttcagttaaactgtagtatatggtagttattttgtaagatatattttaaaggataaaattgttagggtgattctacaatgcatccctttaaaagggatgtactgatg

SEQ ID NO: 122669 - DNA, 905 bp, Cannabis sativa
tctttaaacataattgaaatgtaattagtagataatccagaacctacttatatgacccaaaatctaatactgacttgacttttatcatttacaagacaaaaacaaatatgacactaacacttagaccttcagactttaggaaacttgtacaaggaatatatgtttgacctctgagtagaaagctatatgttgcaatatatagtctcaaggtgacaaaattatcaaagatatttggtgatcttatcaaacactttctttgaaagttcatgtgttatttctatatgactaacgattcgcccactcctaatttattgacaaaagttaccaactattttgtgtaattaatcttctccatataattgctaaaaaaattgactatataattagagatgtagacctagctttaaaatattcgtagctaaaatatgatatagtgcctctgtgaaaactgagaatgtaaatatttatatcactattttatgccctggataagctaattcacatcaaagaaaaaaaaacgaagaaacattcagttgaagcaaagcaacaatatgcaagacacaagtagaaaaacatgatatgttaagacatttctttttcctgtcagacatttcttactaacctgaatgtgaaagcaaatagcgaaggggcgaaaggctttgggatttttggggtcggcctacgattgtggcgctcggcggagtggagaggcggcagtggtgggtcactggtggtggcagagctgcgtcgccgtgagagagagatctgtgagtgaaatcgagtttgagattgagagtgaaatcgatgatgaagaacaaagcaaaaaccctaaacataaatgtgaagatgcaaaaataaagcaagtcctaccgaagaaaagaaaaaagttggagagagagagagag

SEQ ID NO: 122670 - DNA, 804 bp, Cannabis sativa
ttagaattatgattgattaattaaaattaattaactgagtcttacaagaactattgtctcaactaatatagctttactaacaaaacttccgaaagagtaccaagttttttgtaacttttttccagagtaacatagcttcccgaaagagaaaacttgtagccataatcaacaataaatataaatataaaaagttatgaattacattaatgagtggcaaaaaataaataaaaaaaaagtgatattatgacttagtaaaatttagtctatactatattttgtgtaatttttaacatgcattaaatttaaaccacattatatactattattaaagtttaattttataaatatgaactaaaaaatatatatacaccacatttataacactctatttaggatgttcttctataatacaaaattcagactacgttttgtactattcttttatttacttatgttattttaatttttttttagtagagtgcagttttttaataataaaaaaaaaaagaaaaatagaaaaacaaataattgattatctttctttttaatttatattctatttttattattttacatatataataaaataaaattaataataatattactatttttatatgtttaataaaaatattaattaaatattgtatcaaaatttattattatacattaaagtaggataataaaaattcatacaaatatattacaaaatttattttttgtattaaatataaataccacttttattaatcaattgatcaaatttatctctaattttatatttaattgaaacatacctctttt

SEQ ID NO: 122671 - DNA, 920 bp, Cannabis sativa
gtggagacgaatcattgctctgattctgggcagaagacgatctagacctccgtcagttaggatggatttagcacccccctccttccatgccctattcactttaggtattattctctttttcttttctatttaaggttaagttgtcttagttcagtttaccacatatccacttctttctctttccctgccctgtgttttatgccatatttgttcatcactatgtccactctccctgatacccaatcccttcaactcactgaggaagaagccctcatccacgactttgaccatgtatctattcaccctgaacctcaatccaattctttctgcttggttgttaagatcttatcccccaaacccttgaaagccgattggattcaaaaagcaatgaaagatgtttggattgcctgatgccctttctccttttctgaatatcactccggaatgttcctggttcagtttggttgtgagggtgaccgttgaagggttatggaaggccagccctggcacttcgatcgttctctcatgattttcaccattcctgatggttttgataccatcctttccactcaacttcgctatatacctctctggatccaggttcattatgtcccgcttggctctcgctcttatggtctggctcaatttgtggctgacactattgaagatcttattgaggtgcacctggcctctctttatgatgctgttactccttttctgcgtgtccgtgttcttctcgacacaacaaaacctctccaccgtggtttgaatgtccatttcaggaagctttccctcaccaagtggctcaaacttctgtatgaaggtattcagaattattgttaccactgcggcaagctggatcacacctttaataagtgtgagaagtttctccatcactgtgaccatcatccttttcctcc

SEQ ID NO: 122672 - DNA, 651 bp, Cannabis sativa
tgtttattttaatataaatgtaaaatttttgcttaacagagacaatatgtgcgatttatttcttgcaattgcttcaatattatcctagtgtacatgtttaaaatcaattgctgctgccactttgctagacaattataatcaaataagagcactttatttaataatttttgtttagaagtgttatcatttctttcaaagagtcaagactttgtaagattaattaactctaaaccacatgaaacttatgcttagtatacctgtttatatatgatatgtttctctaaagtagcttgaaaataaagtttaattgtcatctctttttcttgattttcaaatgtatttggccaaatcaactatgagcaaatctattgccacacgaaaaaggagtaccaatgccataaaatttcaataaaagcacctcaaaaaactaatataagctacgagatactgtgctaggttcacaactaacggtatataatcaaataatttaattgggtagttaatttatcttttttttttctttgggttagaatcaatttttatttaatcagcaaatacacatatatatatataaatatggaagtggtttcaatggttacatttttattttaaccatcatggttacatttttttaaatcattggattactat

SEQ ID NO: 122673 - DNA, 759 bp, Cannabis sativa
tttgtatatattaaaaattccatgtcatcctccaaatagttaaatcacctttgtgccacaatgagtggatcatatcacttcattcgtgaccaaagaggtgtcatcacctcgtccccatgccaagatatgatggttacttccctcaattaaggtaacaattagagaggtaattctaaatctatgttgcaagtcctagaaaaagttcaaaagtattacttgttgacttacgagtatatttttaggggtaagtgttattatacgttgattttgtaaaaatagaaatcacaatgatagcatttcatcacctttatttaaaaaatattttatttaaatgaggaggctttaatttatgaaaacgttgtaaggttttttttacagcttgattgtgtgaatatttaaatttatatattttcgtgttaaggtttatgttaattctatttttagcatatttaattgacaaaaatattttattatatattatatatttcagctgaagtgtttaatttggttaccatatgttgtgtatctaaacttggaacgaaagttgtctagctttcctatttatggaaattgaggttaaaatggtaagttttgattacacatttattcttatctaaccagctgtttattctgctcttgtgtgagttcccattttcttagatcagatttcttgaagtgaaaaccggagctaaactttccctttctataaaaggaaagttgtacttactacccacaattctgcaggtacagaaacagaaa

SEQ ID NO: 122674 - DNA, 771 bp, Cannabis sativa
gcaagtttgtgctctcacgtttctgtgagtgcaaaagccaaatccaacatgtcattctcctcatctgttggctcctctaatttattatagtactccatatcctacattataagcttcatagattagcattgaaaagcaaaaatttgcggataaagaaaagaaaaacaagttaacaaagcaggaatatttatatcgccaaacataccatcacaatcacatgacaagttgaacatgcaagtgagccttcacaagctcctgatatcaaatttgaagtagattgttagacttatatacatgaactaagaacatgctagcattagaataagtcaattcttatggtggaaaacaagggatgtgcaataactaagaactcgctaggattagaataagtcaatactatggacaatagttgttgctgaataaaccaaagtggcaaaaaaggaacaatgcactacactactttagacaggcatcagaaagacagaaagttcatgccttcaagttcaatgtcattttgatgagcagcttctaacatagacattccaattggaacctttatatgcttttcctctccatctttatccacaaatgtcacagaaatcctgagaagacatagagaatggggaaaaaaactaagaaaactgcaaatctcaatcagacaataatgtgtttcaccaagaatatttatgcaccttattgaattgatgtatattacagtcagggacggacccattaagattgatgtgggctatagccccactaacaaaaata

SEQ ID NO: 122675 - DNA, 1292 bp, Cannabis sativa
gaagttgcccgtaatttctttgccccaaatggccaacttttcagcacataattttatttttgaatcaatatcacaggcacttggagtgttccagcagtcacttacaatttcgtggcataagggctctttgagccgggcattttcaaagcgaaagcgacgaatagggactgaattatcaggtactataaactcaagcaacagcagactatggtccgaaggggaagtctcaagatttactaaccttgcattagaaaatttttggagccaagctgaggagacaagagctctatccaaacgacattcaatccatgttgcagttcctcttcctttttcccaagtgaaagggtgactaaccaactcaagatcgaacaaatcacaagcttgaagagtttgctcaaagccttctataaccatctaggatatgcattacctccacgtttatcattttggctcaatacattattgaggtctccgatgacacaccaaagcccaatattagtgttgacaagagatcgaagtaaattccatgaagcctcccgttgacatcttctaggctcaccatagaatccaataagcctccatttatcactgccttctatttccaccatagcatcaatataatgttgagaaaaacccaacacagtacactcctctttatttttccaaagtaaagccaatccaccactccttccttgggcctctaccaaaaacacaccctcaaattgcaaatatcgacccacataagcaattctatttttatcacattttgtttcacacaaaaaaataaaattgggtttcttattagacacagtctctttaaggaattgaatagtccgctggttcccaagcccacgaccattccagctcaggacattcataattcttggcgggcttaagaaccagcacccaccacaacagagttttttggcccacttattgtatcagataccaatagcccatcattaccataagtcagcccattaccatttgttttttctaacattttcctctttgaatctgatatcattaactccccatccacgattgattcatcctcaatcacattcctaatatcatgggaatttattgtatgtgagtcaaccaaaccagctggtgcaatatgggaattaactcccctatcaccattcaattgaaggccattaaatcccatagaatcagcaacatgatagcctttgccaagaatttgattgcctaaagatctccccggagttgatgaatccgccacctgactgtaacaccctaactagcatagtcgtattacgtgattttta

SEQ ID NO: 122676 - DNA, 865 bp, Cannabis sativa
acaaaactaaaatttggtataaatttatcacaaaattattttttgtgccaaatataacacaattttttcatctcccattagatatgatcttacgtgtgatgagcaacagtatactgtaattaagaagtttagcacatgagatttttctcacaagtttttaccttttttctttttgaataatttaaataagaatttattgcataaaaaaaaaaaaagcaatctattaatacaacaatatatttaaaaatttataaagaacaatcttataactacattataaataatcatcaaaaataaaataaaattaaaactatttactaaaattttcggaaactcaatatattaaaatatgaactaagaaaataaatcaaataaacaaaaaaaaagatagaaatttttacgtgatttggagatattaataaatcctaatcctcgaataagttgtattgagctaaaacgctttgaagtattatacaatagagttatttacaagcttaagaaccataactttttgttatagtgtttgtgcattgaattttccaacccttatctggatatgaatatacccgtaacctgctaagatttgcgtgtaacatggcccactaatagcgtaaatcactaccaaaaaagttacatttagtgacactattttagtcacaacataaattttttgtgtctaaatgtaacttttagtcacaacaaatagttatttgtgactaaaatattgtatttagatataagttgccactaatttagttttagtcacaacaaatattgtcacttgatgtcgccgatttgttacattacggtcgctgttaggttatttttagtattaattttagattaagtttagtatatttttaat

SEQ ID NO: 122677 - DNA, 1131 bp, Cannabis sativa
  modified_base (1104)..(1106): a, c, t, g, unknown or other
aacaatatgtaaacataaatgacttctaattttttattgataacaaattagattagattggaatgggttttatttagggcataaattcccaacatgatgaacatccctatttgaaatacaaggcggagttactattttctttgtgacagttactatttctttaattttacaactttttcatcagttttcttccatgctccatgtctctcatgttagcattattggaggatcttaggtgtggttaaagcagctatctacaatactttccttggactataaaaagtggatactcaaaatatgctaaagatattgtcgtttcctttgaacggtcagtgtttcgtcgtctttccttcacgagccaatgtacgccaccttagccaaagctgcaagtcctcaacttccttctttgcctctatatgcccctttgtcgtcgctcccaacccaccttaaagatctcgtatacaaatgcagtttagatctggatcgaacaactctagaattgtgttcatcattgatcatcattgttcttaattgaacaaataattaaagtttatcttaattatttgtaagtttttgtatgctaatgatgtggtgtggtaggtgttgtatggtatggatcccactgccagtcgtaatcaatatctataatgtcattcaatatattaattacattttggcttctccttaacaaaggttctccagttatctctactgcataatttacccaacttcttgtttcatcaaaaagtccattataaaagaacaaagtaaaacacccacttgagatattgggataatatctctttccaagctccttaaatctcccccaagcagaatagaatgacaaaattcacaaggtatagcatttgcatttacctagaaggtcaaacacattcagtaaaacattagtaaaattaaataaaaagaaactaaattagaatagaattcaattatatttatattaatttaaacagtccccgacaacggtaccaaaatcgttttgtgataaatctaacacgcaagtatacatatcgtttacaagtaatagactcacaagagtgaggtcaatccgacaaagactttgttgggattttatgccctaannnaaactcatttcaatataatctgatt

SEQ ID NO: 122678 - DNA, 724 bp, Cannabis sativa
aatctagatcctggtaaaatatatccaacaaagtcacctctacacaacactgtacaagggaagattttatttgatgaataaatttggagtgagaattaacttctatagaaataaattcttaaggacaaaataataatttatattttttttgctctattatattttattattttgcaaaaatcttggtaaatattagttgttttagttatttgttggatttttaataattttagtttaaatttttaaaatacgtgtttataaataagataaagtttaaaaatatttgttttaagaataatttagggtttttttaaagtaaacttggtatttttttttttattaatttactacttttattagttttttaataatattttttaattttttcaaaattaatagaaaattataatttttaatattaattttatttattaaaatatgacaaaatttcgtattgatcaaagctcagacaataaaaatgttaattttaaatgacatgattaagtaatgttaaaaattcagagagtaaaaatattaattatttaatcaataagcaaaaacataacgaaaaattaaaggagaagaggagaagaagagaagtagggcataaatcatttagggctcgtttggtacgccgtataagggtcgtattatattaaataataaataacactatgtttggataaagcaatgtattgtattaattattacgaccaaaattttt

SEQ ID NO: 122679 - DNA, 1349 bp, Cannabis sativa
taaaataaattccaacagtatattcataatcccagtgaaacatatatacattcatcacatatatgatcgcaacaaataataaaacaaaagaaacatatatagagcaacagataaaaatttcaatcgcatgctatatatatactgattgaaccaggaataaatttccaccactttcaaagtaaggaaacatatatatacgatatgattaattaaatattccaaacgcaaaaagaataatttaatgaaagcttaatactaccatgaattttcaaaaactaatttagggatgctctgataccaaatgttagaatactataaattctgaatataaccctaattaatttaagagaattaaacaatagaatatatatatatatatattagcagcagaagcgtatcagcagaatcttccatagaatcgattttgtaatgatctttaattggtatgatcttccaatttgcataaaaaatctttctctgaaagcttatctcttggtgatggggatacaagagtgaaaaaatacgatatgatgcaaatggggaccattactgtttatattaccaacagacaaaactgttggtaatatttattgactatttctatttggcccctcatcaaaatggattttgtcctcatggtattcacatattaaaatcatgacaattatgcccttaagtcataaactttattctaaaatagactacacaaatttgacttatttatttaatgacccaacacacattttatatatacaattgtgacactaataaatttctgacaatgataagatttctagtggattttcgattggaccagtggtaggagctgtaggtagagatggatcgttaaaagatgatggaccagtagaccttgtacgcgccatgaccagagtgaaagaggaagaaattagttcactactgatagaaagagtttctttattattggtaataacccattacattgaaatggagggtgaacctctttacatagacaagtccccaagttgagtaagttagttggagcatctaagtgaataataaactatctaactaatatatactcactctatttctctaatacatttcttattaaaattggaaaaaaaaaatctttatatctaataatgaagaatttttaaccgccttcaaaaataggaagcatgattagaatatattaaagttgaagagtatatattaaagttgaaggacaaatatcctaatttgctattattatagagtgttcacaaataatgcggttcagcaggaatgccgagaccgatctcgtatgccgtcttctgcttgaaaaaaaaaaaaaactataatctacacattgattcttttttttttcg

SEQ ID NO: 122680 - DNA, 1034 bp, Cannabis sativa
gtaaaataatttccaacaggaagaacatcagatgccttactctgattaacgtgtataagggttaaaacccatcatttccagattttacgaaccctcagccgtcaatcaacgaatacataaatgagtcgtcaagtaacaaattagggataaatcgcatcccaccaaacacatatagacagcctaaaatccctcaaaagtaagcaagtatgccgtaggtcagagatgggaaattatgtcaagtataatgcaaacaaccatgtcaatggtgacctttataccaccattgagcctataaataccctattgaaaaacagaaatggagatcggccaagtgaaagtcctgtaataaataccctcataaatatagtgactcatggactaaggctcattaatgccctaatcacgtaaaaatcttctctcttaacttctattaaatctttcatacagctctaattattgattgtcgaaaacctcggtcaacatatactataaatgctaaaatataaaaatttgagggggctagaattctctctagcaattatatgagtctgctagtatttatactctttttttcttattaataataaatatatgaataaagtatattttaaatatttttttagaaaaattaaatattataattatatattatattaatacttaaaaataaaaataaaaatatgagtataattatttttatcatagtattaaaataatataataaaattatttcaacttaacacaaaaaataaattaaagtatgtaaaataaataaaaatcaataaaaatgttaatatctaagagtgtggacttaatgttgctcaaaaataaaaatttggaaactaatatattaaaaaataaaatttgaagactaacttgctaaaatttatatattttgaggactaatttatcaaaacaaaaataaaatttaaaaaccaaaacttgccaaaaatacttatataatttagaggcggtacaaataaatctcatttatagtagtgtttaaaaaaaaaaaaaaccaaacgcgattcaaa

SEQ ID NO: 122681 - DNA, 1199 bp, Cannabis sativa
aagatgcaaattgaatatcatattcttaccttttctcttattaccattttttcgcctctgcaaacacaagactacaacaaccgaaaataccacaccagaaaccgctacaacaactccaaccatgatcttaatcttgttatgattatgtcctaattaaaatcacaaaacacacaacattaaacaacaataacaataataataataatggtgatcaacaatgttacattgtacttacctggtttttgtagtggcagttgtgattcagaacccgaaaggcgaaaaaagagatcatctccagtagtattggattcaaactgtgtaatatcaaggagtgtgtttgaatctgaccaaaccaaacacccaattccattgatgaatgaataagctatgcaagaacagttcttcaaacacaatgcatgacatgaatcaatggtgtttccaccattttcaatgtactcatagaaatcaggaacacaaacctctccaatcacaccaaacacatcaccatcactcttattatggcaaagattcaactcagattctctaacacaaccgccactccaattcccttcactccattcctccattgattttggcttaaaccctttcaaacacttacagattggagactcagtgatcttacaaaccccaaatggtccacaaattccgtactgatcgcattcgttctgaccttgatagctagcgtaccagtaaccgccgactctgtctttgagcatgatcgtcaccattccgtccggcgaaagcaaaaccttggaaacaacggaatcgttatacccattgttgaaataaaggtaagttgttccttcttcaacctcttcaacaagattgtacggacttttatacgaagaacccatttcaggtacgcctgtgaatttcagcttatcccaaggaccgctcctagcgtaaatctcggatccgatccaaaccactgcttccggcggcttcttcttcgctataccgaagctgaagtttcccggagacggatcggtttcggatttccaggaaatgagtttgtagttgtctccggttttgaggttgaaaccgaggactgagcttggtaagaatgtgtctccggggttatggaagctctgccataattctgatcctgaaatggagtctttgaggactaagtttccattgtttaagagtatagcttgtgtggtgtttgatgaaatgtc

SEQ ID NO: 122682 - DNA, 2037 bp, Cannabis sativa
ttatcagaaaatcaattatttatttatttacttaaatagaaatttatttctttaaataaaaaaatatttccttaaataaaaattattcttataatacagtctgtatatgtaataagtaattaactgtaaaagaatattttattccttcagcagattgaagggcacacaatctgtgatttgggtcttattaggcattttagagggaattcctagatagaggcttagatgtctttcagctacgtactagttctgtattcacttcctgtaaagctttaaattaaattcagcaatttggattctcttattttctttctggataaaaaatggtgataaaaagtcctaatttggaatgctgaatcagaagactgttgtgtttacaaggaaaattatttgttaaaacttcacataaattcatatggacatcatccttagttcattcattataatcggaatctttttcttattattgctcttgtcgtataatgcctttaccttactaagaagaaaacctctattgtttgtttgtttgtttgtgttggatgtgatgtgataatcgattaccgctgcaacattgaacactaaatttatatcctaaatccaaatcacagtcctctgttgattcttcttctctcgccattgacaaggtttgggtcgctgaatatgtttgccaggtttacttaatttattctcttagggtgtcctcaactattggaagccatggatgagctctcttgaagggcccaatctttgcttctcttaacaatcttcgccattgaagactcacccttttactctaaatcaccaggcgtgctttttcgcttctgctccattttatttattcatttattctatgtattattattattattattttcgtgaaccataatcaattaactcttgtctaagtgtcgtcaccaattgggttagtggaagagtgattaccaactattcttctggctaaattagaccctcttgagtaaagagctagcaaaataaaagaggaacgatctgaatgaaaaattttggttgagtcgtggactaggacagacggtgcgcgtggtgggtcaagtgtatgtgtcctcacccattcgcacaaaactgggtaccccttgaggcccaaacccaaatgccaaggttgcactctttatacccttataaatgagggttcatatcccatgtgggactctttccacttcacacacactaggacacttatatatttttcttaaaatattcataaactttccaacagacccttagttccattctcgtctattcaataaattaaatattaggtaattgaacactctgtaattcgttacagtcatttttcctttcattggtcttttcttttgtaggtaatattaatttttaaatttaattaaaatggtattttattatttgggcgaattatatgttccatgatttacaatgtgtatgcatttatagacgaaaagattttaataataatactaatagtaattataaataatttgcaatgttagttatggcaatggcaaagacaaagaaagctgattagttttcagtagatttcgccattggaggagttgccgctttgatattaaagagtctagcagcacccattgaaagggtgaagcttttgttgcaaaatcaaggggagatggtcaaaagaggacagctgaggacaccgtacatgggagttggtgattactttcaaagggttttcagagacgaaggttttttctttttctggagaggaaaccaggctcatgtcatacgatatttccctactcaggtacatctttttgttctgttgttttatttatgtagtttcttctctttaatatcttttttattcattgattatgaattgttagtatgtttttaacatgaatttttatgcttaaatatcactactaggcatcacataacatgaacttgtttcatgttgatgacatctttcacttaacatattaatgttagactttttatttgggcttacattaacttttattggttttattaaaacttgggttgattggatagttctttgct

SEQ ID NO: 122683 - DNA, 868 bp, Cannabis sativa
ccacttaagaaacccaaaccgtaaatttgaaaaaaaaaatagtatatggggtaatttccctagaagaaattcatttccagtgaagaaattattattttctaaattaaaaggaaaaaaaaccatataattgtcgcctgaaaaaaaaaatggataattacataaaaactctaatttttataaactttttatatttttatgtttaaagttcctttttatatttttatggtattttataaaaacacaagaaaataataagaaaacaacaataaaacatcaaaacaatataaaaaaaatatataaataataaaaaatcaataatataataataaaagtacaacataaaaatacatcaaaagaccataaaataaaatctataaaaccgtaaaaatattaaaaatttggtataaaccgtatttttgtaatttttttttatttttttttttgtgttttttgaaattatcccaaaaaaaagacttggcccaaacataagccagccaggccatgaggcctatcttggctactttattatgggctcaggaagtaaaattttcttacaaaacctgtttttttttttttttttttctgaaaaggagtagacaaatagtttttattttattatcataaaactattacctttgtagaattttatcactagcaaaaatgcacccgagctatagtaattattacaaaagtgtccattctagtgctaatatggtacaatctgagagtcacataaaatacagaatatgtatatataactttacagtttacgatttgttgaattttaggcgaattactaatttttcctccgaactttgacatgtactaaatcgtgctccctgaattttttggccattaaaaattcccc

SEQ ID NO: 122684 - DNA, 1474 bp, Cannabis sativa
  modified_base (1421)..(1423): a, c, t, g, unknown or other
atacaaagctaggagactaaatatctactaaatatctactaaatatttaattcttttacagctaatatatatctaatatctaacactatttaagaaataactcattttattttttattatattcaaactaatactcaggctataaagtacatacaagacaaaaaaagggttttttttctatctaatgacccttttgctcttaccaataactcaaatatttaaatcatccaagggtagtttggtcattaataattcctactaatttctgacactctaaagaataataatgatgccctgctattaataaaattctatatcacacacaaaacgtgactctctaatggcctaacgtcactttccactgctactgagcacaatcacagaaaatgagaaattcacatatatagcataattaatacatattaaaattaaataattttctacaaacatgcaattcataattaataattaaatctcataaattaaccctaattatttactaatccaacatataaaactttggcggtataatataggtataaatattttttaataataaataagtctccacaaaataaaattctagatccgtcactccgagcctctcatgtgactaccaatttttttttttttttaaatgacatcatattaaattgtgggaaatttttatttttatgatttttaaagtataagtttacaaaaaaattattttataggaaaattttagaaaaaaattaaacattatgaaaaaataccgtaaggtacatggttatccccttatggcaactggttactcatttggttaccataagagtacctaattacctttacctaattttttcatatttttcaacattttcttcaaatttcccataaaataacatttttgaaaaaagaaaaaagaaaaaaaaaaaagagaggtatatttttgcacaaaaaatataaaaattcataaaatttgtaatttcatcttaaattattaatcgaaagaagagagtcttcccatgtgtacaaattttgattttaattgattctctttattggaggtttattcagcaaaatatatgtaaaaaatattacaaattaagtaacacaatatttttggtaaggaattaagggtcaggcacaattatgttgtgggaaaaaatagttgtaattgtgttggtagaaaaaatagctgtagcagaactgtagaaaaaagttgagctgagtgtttagtaaattagaaattttaacatggtcgaattgttaagattctattataataatgataatgttataatttagttcactataatcacaaatatatatatataaaaatatattatataaaatttttatttttttatatattttttaattattttttcttgatagtataaatttatacgtatttaattaaaataatttataatattttnnnattatatttttatcacttgtaaaaaattgtaatttataaaaaatttaagtt

SEQ ID NO: 122685 - DNA, 2438 bp, Cannabis sativa
  modified_base (1848)..(1852): a, c, t, g, unknown or other
gctccttgatattactttctttttatatctttcaatttttcatgaattttacctgtattcatttattgagcctttcctacatttctaacaccatggccttttgttggcttattgaaatttcctccaaacaattatttgttgtagattatcattattgtccattactaaatgcataagattcctagtcctttgctataggatccaaaaaaaaaaaattataataaaaataaaatgattataatataggtcttctaatttttttgttgaaattttctttttaagtagattatattgaatcacataattaagttgtcacaatgctaatgcgtcagcatttgtgtatgcatgatcttctttttggccattttttttaataataaataataaatagaggctaaaagatggtcatgaaaaataatgaaaataaagtggcattcttcttttcacaactttctcaataaatctatagataattaataagttgaagaagaagaagaaataattaataaagaattgattataataaaaaaggtgaagaaaattttcaataatgaaaggaaaaagtatgaatctagtttattgccacttgaataagaaataatgtgtagaactacgattctctttagcttaattaattgcttataataatataagacttaagagtatgaattaaatgtaaatatttttggacttttcttctatataattttgcacttaatttaaacaagtcaactctgtccccacacttgcaaatgtttgactaataataccacaccaaaatttctttttcacataaataaatgaatggacgtaaaattaggatgtagtctctttcaaaaaaataaaataaaatttatttaccatatatatattggacagtaatatatagcaatattcatgtaattttgaatataatttcatgtatacaatttcttaaatagaatactcaaaaagaaaatttcattaattcaatttatataatttataaatatagattaaagtgaaagattgtgatatatattaattttgcatatttatgcttgaaattggtcaatttaaaacatcatatcatgagatgaccaaataatgaagtgtgctattttgttaaaaaaaaaaaagaagtgtgctattttatatgtataccattcatattttccatgtgagaaatttatgaattaatttgttttttttttaaatcaagaattaatttgtttggacttttaataattgtgtacattaaaaaagacaaaaggtaacaacaaaaatgaattattgttgaaagaatagtacttctcaagaggggtggtccttatggttcactcaatgcatcataaaattgaataattatgttctcatattaaatttcaaagagtaattaacccctaaaattcaggtctctcatcacctatagtaattttctattttcaaatcaaaatccttaacaatatatcaaggtgcaatttgatagaattgtatatataacaatcaactttataattttcataaatatctattctatataaaatagttcgtatacagttacataataatttatctataattggacgactttaaaaaaaacataattaaatgtaaaatcataacactgttgttgttaaaacataaaaaaaaaaaatgaacatattataatggttaatgtcaaatatcctaaaagtttataaccagttccagaatataaaacgcatagagtacctacaaacataaaaaaactaaaaattgtctaaaatgaaaatcaaccaaggacaacaaagattccctaaaaatgaccctattttttcaatttagaagccttgaaagacttgctttgcttctcatcctcgctatcannnnntttcatcatttttcctttgaccgtacgagaagaagagggcagcaagtcgagtgtgataaacttcaatgtcaaaattaccaggaacatctttcccatggatgaagaactcggcaaatgcagccacaaatgctccgcaatcactgttacctagaaagaaaaacaaaacagttaaacaactattatacaacataaaataaacttaaaagcaacaactcaattttctgctgagatggcagaccagcaatctccacaactcttagaggagttttaaggtcagaacctaaatcaggaacatgggacctattcttccaaaattcaagcagataaaaaaacaaacgaaattaagacaacaaaataaaacagaaattcagactaaacaaacgaaaatgaaaaactcataaaaagaaaaaataaattaaactaaaaaatagaagccctaaaaaaccaaacaaaatgctaaaatgaaaaacctagaatagtaaaattaaaaaacacaaatggcaaatacaaacaaattccaaaaaggggcgaaaccaaaaaaaaaatcgaaatcaaacctgataccgaagaccaactccatcttgat

SEQ ID NO: 122686 - DNA, 1661 bp, Cannabis sativa
gttgggcatttcttcatctctgggaagacggtgaaagactttggatgaagaaggcttgatcccggcaactgtatctatcttctccaattggtgggcacaagtcaaagttgagtgcaactcgttcgcctcccagccagtggatcgataagtgtatttctcctggaccacgagtcctttcatcacctcctctagagttggtaaggtcttggaccctttgcttgaagacttcgctccggttgtaaggacagacatgcttggggattggtaaaatgctgaaatttcttgatcaaagctaaagaagccatgctcgtcaaggtcgcggagaacctcactcatatgaaaaagagaaattcagcagttagcccccaaaccaaaccctaacgtaaaaggagggaatgggggtcccctaatcgctggacggaggccccctccggatgtctgccagaaatgagaaattcagggattctcctaggcaaacatcgggtgcaaatatcccaaaggcaatgaaaacagagaaatgcaagaaaaaaaaaggaggaacctaagtatgaaaatagtttcatacactcgacagtccctaagtgaagaagttgttcgcaaaattaaaaaaaaaaagggaaacaatggaacacagacaagaaaccacgacgcacaacggtcttcaccatgaccgtttcaccgtagaaatcaaatgcgactaaaggcactgccctaaaccttgtcctaacatgcaaatgaataataaaagcgaaatgtacccagaaaacttacacaatggtaatgagctagaagtcgatgtcgtctgacggtagaattttgactggcaacgacggaggaacagcaacaagaaatctatgatttctggaatttttttaaatgggttatctagtttgaaatggtagaatagcgagagtaactcaatgaagggaaaatgctagcttttataaaccaaaaagggtgcaaggcaatggtgatcagacaccatcgtacggtggggattggaacgattcacattctatgatccaacggatgggatgaatgggggtaacgaggagaaaaagcggttaaaaacgtttgagcacctctctgacaccaggattaattaaatgcactggtctatcaataagcgggaagcgaatcgttgcctgcaaaaaagaaataaatagtaatgattacagtcataaaagtagcccacgcgcctagggcacgtgccgctatatcaataagctaaccggaggcctcgtacaagcctcatttaccctgcaataaatgaaacttggggggtaaatgttgcctcagatctttcccaaaatacgtgacagcggcagagggtgacacgtggacctaaaaaaggatccactcacgaaaatcaattaagtcttgagcaaggaagtgtatctcatggagtgagcctcccggaggaaagcataagacacgcctttaccctttgggaggctagaactgtaacaaggcatctccgggaaggaaagagattgttcgaacagtcacttcgcatttaataccgcatggggggaaacatatccgaacctccataagaggatttgacagatggagtaagccctttttacggcgattacacaacaatcgacgagtctagtgacgactacattatgagaactcacattaatcaagggaggata

SEQ ID NO: 122687 - DNA, 1120 bp, Cannabis sativa
  modified_base (27)..(30): a, c, t, g, unknown or other
actaatcagattgtaaagagttttatnnnnggcataaaacccaacaatgccttggaaattttttaaagaccattgggcgacagtgggtagcgatgtggtggccacggtggtccaattctttgagaccggggagtttgtgaaggagattaaccagactttttattgggttgattcctaagaagtctagggccaattgctttgatgagttccgtcccataagcctctgcaactttacttataagattatttcaaagattttggcgaatcggctacgaccccttttgcttgagctaattttgccttttcagtcggcctttgtcccggggagatggatcgctgagaatagtataatggctcatgaagtcctggattccttcaacaagttaaaggggaggtatgggtttgttggccttaagttggatatgtccaaagcctatgaccggattgagtggagcttcttgaggaagaccatggaggcttttgggtttcagcccagattcatccagatggttatgaaatgtattagctctgtgtctttttcgatcttactaaatggtggaccgttggaacagttctgtcctggtagaggccttcgtcaaggcgatcctatatcgccctatctatttattttgtgtagtgaggtgctatcaaggatgcttttgcgaaaggaagaggcaggattggtctcgggttttaaggttagccctcagagtccctctatttctcatttaatgtatgccgatgatatctttatattctgcaaagctaaccttgaagaagtgggggccgtgttggagtgtgtccaactcttcggatcatggtttggtcaatgcctgaatgttcagaagtctgcttatatttgttcgaaaaatgttaacgaagatactcaggctgagttgtcgcagtttttgggttttcggaagcttggcaaggaggatagattcctggggaacccgattatttgatcgaatagtaagactaaagatctgaggtatatcaaggataagatttgttcaaagattgaagggtggaggtgcaaactgttatcccaagcgggtagatccactctgattcgtgctgtggcccagagttcctgttggataattattttaccaggatc

SEQ ID NO: 122688 - DNA, 845 bp, Cannabis sativa
ataattattaaaatttaaatatttcctataaatattaaaattattattgttaatattattaagtataaagtttttaacatgttgggcatttaaaataaattatttgtatcatactaatttgtagtattataccgtgtcgtgcccaaatttatattttttcatgtctggtcgtgctcgtgccgtgttaaaaactccagcccatacttacagcacttgaaagctacgaagcttcccatgaccaaatctaaacaagtccttttcaagtgccgtttcctaatctaacttttatatattagacctttctccttcactaaaacaatgaaacatattgcttcaccctggatatggtcaaacttctcttattttactttctcctaatattaaagttcaattcttgaattgaaactaacattccatcaataattgttatctttaataacaataatatagactagttattattacaaaatacattactatttctttttctcgtgaaagcaatgctttttatttatttatagtttttcaaaacggctggcttatatagtattagttgaaagtctcctttttcatgctcaccaaacttcccattataagaatatcatgaaggattatgtcatcaattaagagggggacactattaacatcatttataaaatataatatgactcgttttgcatgagattcaatgggaaaaaaaaaaaaaaccattttgactttaaattttaaaatttatggtaaaacttaataaattcagagaaggaaaggatgtactatttcatagaactttttttttttaaaaaaaaattaaaaaaactaaaaaaagatcgccgtcagaatagaat

SEQ ID NO: 122689 - DNA, 1911 bp, Cannabis sativa
  modified_base (1812)..(1821): a, c, t, g, unknown or other
ctaatgtccatttctaaaaatggggcccacgaataattaaattcataagtaattataaaattactaataattagtgctaattgcttttactaatccaaattaaaaatttggtcattacattcttcatctttgccatggtcaccatgaatggtggagagacccactgatctcctagtatcccttgccccctcaggggaatagcctcggtgtactctttagtaacgtagtcttcaccagcctccaaaacctccctagcctcagacacgggctccctttcttcattgaagccactgaatggaaacacccaagctactccttcttcctcatctccttcggctttaggaggagtagcaggacggacctcaccctggtcctccgtctcttggactttaatgtccctagttgtgtcctactcttcaatacgaggctgagcctattcatcagtaggtagggcagcgagacaggtgatgtgtgggtcggacaatgatgatttccatacagtttgcttggttcgcgccatcattctacgcctgggtagaattttgtttgtgcgcctagcaatagtcacaacaaacgtggcaacaagtttacctgcaacagtagggtttggatggccctcgggcaaagtgtcaatgatgtctggacggactatatatgtccagtcagatggaagttagcgtctccatcccttcttgatttcccaaatgaagggaccgtacccttgaccttggatctggccgagataaaaatagtgttgcacctcgagttctaaagaaggtgtgtgtttactacttacttcccaatcttcaaagctagaattagaaaggttatcactagacgaggatggactagcacggagacgaggatgattctcgtacaacagttgaagcagatcctggttcatatggtatttgcgtaccaaaaacgcaccagggcgcatctacaaaaagcaggagacaaaaaagatgataattggtcagggcaacgattaaaaaataggtagattatacaaaccaggtccgattgaggaatcaaaaatagaaattttgcttagaaacagaattttgaacccaaaagttcaaaattttgaattgaagtgtgattcccactaaactgcaaatggataagtgaaagtgaatatcgtggggttaaaatcgaagtgcagttagaaccaaacaacgtggttaagcataatcgagatttctaaatcttaaacctataatttctatggttatcctagaacaagttcaagaacaatccaaattcgcagacagaaatccataaaattaagcatgcaaatgtataaaagaaagaaatgaagaacttactaactgatttgaggcttttgatctcctcggatggtgctggcaggagtttcctggaaattcttcaaagaatttgagagagaaaaatttctttgctctggtttttcaaggatgaaagtgactaaaatgattaattagggtttcaatcctatttataggcagttcaaaaggaagaagtaatcatttcaaattttaaatatctcgaattccccccaaaagtgtacgttatgtacttatcgatggcaaaataaccttcttcacgcgtagacattaaaacgtaattcgatgcaaagatcaatcaatattaataagctaaaattgaagacacccttgggcagggtcacgtcagttcgtcaatcgatgcctaggacacgcgtcacccgtctggacaagactccaaattgagttaagtctacgtgcgaccaggaaggtcccgcgcagacttgggggcaaatgtaatctagttttttgttgggttttatgcccnnnnnnnnnntctatttcaatgtaatctttatcttttaaatatcaataaataaacagaagtatttttcatcactttctgtgtcatttggttcatgttatc

SEQ ID NO: 122690 - DNA, 1015 bp, Cannabis sativa
ttaccaaacgacaccataattaaatgttaaaaaatataaaatttaagtgattttgccaaaaaaaaaaaaaaaaaaactaataaagtaaaaaggtttgttgtgatccataaatgtggtgggcatatcatatgttattactcataaactcataataattaataaatacattgtacgacgaactaaaggaaagaaagctcccaagttgacatgttctgtaaatgagataccacctttaatatctaccactactacataacctacctatatatctatatacacgtactgcatagaaaataatgaggcagcgatgaataccgttcaaattaaatatttttctacattaggtcagtgtgacagctacgtatgctataagctaattattaatttaataaactaaaattatgccattttcattttctaattattcaacatactatattaattaattaatatacatacttaatgtatattggcctgttgctttagttatatactgtatatgttaagatataagtcaaaccctttgtccaatgaattatgaatttaacgtttgtcattttccacttggtacttggttttaataaaaccatcaactttatttacatgtgaaacaaaagagtacgatactataaattggtaggtgcattgtatgtgttctggataagtgtcatagtttttactctttaagcatagagatctccacttgatttatttatgccaaaagtctgacatttatgtttaattataattataatagtgatatatgggtttattaatataatacactatttataatgttgattaaaataattaaaaactgtaatatcaggtgttgaaataagttaagttataagacgagtttgtaacttaagaaaatattataacgcatgccatgccatgccatataagcaggtataattgatatagaatatttgtgtaacaactcaatttctaagttattttgaaggactttgagggcttcaataaatgagctaaaatagtttaattttcaaat

SEQ ID NO: 122691 - DNA, 1303 bp, Cannabis sativa
  modified_base (1269)..(1278): a, c, t, g, unknown or other
gttgctctgatgattgctatgtgggttgctatatagattcgagttacaatttaagttgttccgttgattgctatgtggattttccataaaaatgtaaaaaaaaaaattactttaaaatataacaatgaaaaaaattccaatttattacatgattagtttggagggttttgatgttagttgaataatatagttttaacaatttaaataagttgtagttgattttcttagggcatgcttggtatacctattgcattaaataagtaaaataccatgtttggattgaattttgaattatattaattattacaattataaattttaatacaatatgaaacaaattattaaaaagataataaataatctatattagcttgtattataatatttacaaatacatgttatgctgccgtaaagttagagttggggttgagttcagagtcgaggtcagggtctagatcttaggttatgggttaaaaggtgaggtttgtgtttaggatcgagattggattaggattttgaaatttagttttttaataataaaatattcatatttttgttttatttctaaaactaattagattttaagatttttaaacaaattttccatctattaagatttttgacctcgcttttagccaacgacaatgagtcaattaaaataattagaaataattaataataatatataggcaaatagaacaaaaattattatagaggctcggccccgtaatggtggtaatagcatactcccatttttcttgtattgacttgtgataaaagaaccatttttttttaactttctcgaaagctcttacaatagttttagcagcttacgtgctctataaaatgaatgatttcggatccctgaatagtgaaatcattccacaatttatatggatgattacatcagtatagtttcctaaaacaaataagaaataaattaagaaacttaattactttcttaaatcaaggaaaataaaaaggaaaattaggtaggttttctcttttctcctatcagagtgaatctattccaaaaaattagtgacttgatcgatattttcattacttgaacatttagaggatatccttgaagatattctagttgcatttactctagtcggtacatgcaagctgactacaaaatggatgttggttggacggtgtaacgtaccttgtctagatatcctagcttcttttcaaaccaactatttatgtaataaatcaccctggacggtacaccatgaatcgaactgttgggttttatgcccnnnnnnnnnntccatttcaatgtaatccattttat

SEQ ID NO: 122692 - DNA, 1340 bp, Cannabis sativa
  modified_base (688)..(698): a, c, t, g, unknown or other
ttctagctgaccaaataaacaaatacacagcccaaataaaaaaaaattacacaaataccacttacacacaccttcaacccaagatctatgcttcctggtcaactatctcgcaaccatcgtgcaaccacgtaacaacccaacgcaactgaaacgaaaattcaaccagaaagagagtcaccattaattctggcgacttcacctgagaagacaaccagaatcaatcaaaacaggggctgtttcgaatacatgaaaaaaagtagaaaaactactacgaaactaaaattcaaccagaaatccagtttaatttgcataaaactaatgtcctgactttaatttttaaatctatgaaaggcagatctcaaaaatttgaattagagttcccaaacaatccaactcaaatataatctaaaaagaattacattaatactatagtaaaatgtttattctggtgtattttccttattttctaaatttctaatggtgaatttgttcttattaaatcataaagagacatgtatatagagttacgtacgtggaaatacttttatgatttttaatgtttcataacagttgcattacaattgcattagagttgcataaacattttgttaacaattatttcgtctgattaaaaccgtctgatgcaaccaccacgcaaacacacaacaaccaccctgcaaccatcgtnnnnnnnnnnnagtgatagtgtaagaggtattttagtaattaaaattacataaaagatataaatgttgtccacaccttgtaaatgtatttttgtaaataaagtgtcaatttatattttctatataattattctaaaaaaaattcactcttgaacccctattttcttcaaaaaaacaaatatttaaatatttgtaacatgctcacatgttggaaggagaaataagctaaaagggagaggggtggaaggagaaggataaaaggattgttgtttggcaaaaaaaagacaaaaaattaaataaattatattttctgctgttcacaaaataatatataattgtattaaaaaataataaaatagtaataattttttacatttattttacacttcatttgtttaattttactcctaatatcaaacaacacaaaggagatcaactatctttaactctactccttggtgttgcaacaacacaaaagaggtcccttgttgatagtttgtatcttggacttactcactatgaggcctaacaaatcaacgatgttatcttaaaggtgaataccattttagaccatgtgttttgtaaaagttactgattggaccttctgttttattaaatgataaaatagaccatgtattttttaaaatggtaaaa

SEQ ID NO: 122693 - DNA, 1423 bp, Cannabis sativa
  modified_base (1391)..(1397): a, c, t, g, unknown or other
gatttttgcttaaatcccactactagggtaaattaaatgtaatgtaaagttgactagatggtcccgtaggtagcattatgcccgtgcgtgcagcaattggatagtagggaccattttataccacttgtacacatgtcacgcaaaggattaacttttaaaagcaggggacacgtgtcacacaaagcttgttcctttacaaacaggaatccgtagtattcgtctagtaaaaggataatggtggtctgagcactaccatgctcagatgtaggagacaagatttgattctattaagaaaagcataatcgtcactttagtgacctggcatgtgggaaaagtccacattcgggatacccagtgaaggtcgacatttgctttaggtcctccgggtacttgcttggaggtaaatcaaataatcttccctagtaggtccttacaggtctgagagagacgctttttttttctgcctttgggaagtaaggctggcataagtaggcttccgcgtgtcccttcgtcctggatgattctttgttcgtggagacctttcagcgatacgcaattttaaagtacttcaagcgatggaggattaatttgaccttcttcaataaatgtcacttgtcatgtcttgcaaaaaactcagataacatttactattatagcacttttgagtctcaacctctatttttcttttaaaagaaaatatcaaagcccttaattttggttacagtgagaaaataagagagaagtgagaagaaatttttttttgacaaataattatatataaaaaataaataaaaaaataatattaaatattgatataaaataaaacaattactcatattacaaaaaataaatctacataaaattatttttaatatatctattagggctgtacatcggtcggtttagtcggtttatactacatatttttcaacccaacataaaaatcgggttgtaaaattctgcatgcaaactgcccaattttaaaaaaaaaaaaattttgtacccgaccgacggtttgggcgggttgggcgggttaacccgcccaaaccgaattaagatttttttttttttagattcaactaaaataaaaattaataacatataatatgtatacataaataatttggcaattcaatcaacctcaccagtcaaagatttatccacaaattataaaaaaaaaaattcactgtgtcgaactagcttatatatctcataaacaaaatgaatgaaaagggtttaacctttgaaaatagatgtctgtcttaatctagggcaacaagcatgtaataatacaagtaattggcacataaaaaaattagggcacgtatactaaattttatgctagttttctatgttatgttaaagtaatacaattaaaaattaaagaaaannnnnnnttagttattaggtgagattattatta

SEQ ID NO: 122694 - DNA, 1114 bp, Cannabis sativa
  modified_base (169)..(179): a, c, t, g, unknown or other
tggatgtgttcaagttggtttatgagcatatttgatgattgtatgaaattgcaatttatgatgataaatattttttatttcattttgaaaatatttttccttggatagtagatgaaaaattaataaatttaggtttttacaaaattcaatttggattttttatgaattnnnnnnnnnnntttgaatttgaatgaaaatatttgaaactgagcaacacgcatacgtgcgcggacaagggcttcacactactttagacagcccatgaccgagttttctcgaacaaaggctgtcctaagcccctcctgaatgagctttgcacctcaagaaggctgccaacagccctttttcacgcaatttggccccttatgcgtgcttgcaatcttgtttttgtgatatcttttgattcaaaaattatttttcatttaaataaaattcaaattttgatagaattttgtgtagaatccaaatttttgaataaaaatctaattatcagaataaaattaatttttattaatttcttaattaattaaacttagttttagatattagtagcctttaaatttgaaaatttaatttttccacaaactagccttatggttaattttgaaatttttgattatttttgtttattttatttattttaattataagataagatattacttattttattattaaaatttaaaatgatcttatgttgatattaaaatattaataaaatttgtaaataatctagttaaagttttaaatttgctaaccatatcagattttcaaaatttgttattttttgaaatttattttattaaattaaattataagattagaaaaatgttagatataacattgcatcttattagatatttatttaattcaaattttatttttggcaatataacatgaaattttgaaaagtttgttaattttggtttgaatagaaattttagggtttgataaccataaaatttttaaacttacgatattttattttatttaactattaaataaaattgataatatcctaaccatcaaaatatcttattttgaattttgtttattttattaaattataagattagaaatatctaaattctaaattaagatattatattatatt

SEQ ID NO: 122695 - DNA, 526 bp, Cannabis sativa
ttggaggttgaggtacgtactagttactactgttgaaaatattattgaagctgatgatcagctatgtttgtgactgattctgtaactttgctctatagcagcaccatattccctcgttcaatcatgttaggaaaaagctatggttacaagatatttgataagctgagaatatatgtctctttttcttttgatccatgtaaataaaaatactatttattatgcgttgcctaataaggcaaacagctaatgtactgtacttagaacaagacgccgatatatataaaaatatttatatgaaattttcttcttgttaattcgatgagacatgaaattattaattttgttgcattataagattgtaccacacatgcatgcatacccctatcaaaatatatataaatatagacatttttcataatataaatatttatatacattagctaaataaatatatttttcttaatttaatgttttagtaattaggtactatatatatactaggtgattgttacgtgccaagccacgt

SEQ ID NO: 122696 - DNA, 603 bp, Cannabis sativa
gtgtttatttagtcaactaatcttttttcttctgctttacatattttaatgcgttattgaaagttactactgttgtttattttgattgtaatttgtttgtatatgagattttttgttgaaataacaatgggatagataggttaaaactaaaagtgaatggtgtgtttttaagtgaagaaggaaaaacaaacacataaatataagagaattctacaataatctataaatagaaattattaaataaatagatgatctattatatgatctatatatgattaaaggtttcagtagcagcttttgctacagcccttgctgctatatatgatctattatatttggacaagaagtagcaataaggtactttggtattagaaactgagtacaatttcatcagtgatttcgtaggttcaagagaatgtaaagatgagcattacaatgattttgtcaaaaagatgtagataataaatatagaatggtttgactaattctatagagattatattttcgagcttttttaaaagtgatgttttggttagaaaaagttttaaaagcttgaaacaatacaatcttcttaaaaaaaactatgtacttagattgtataat

SEQ ID NO: 122697 - DNA, 969 bp, Cannabis sativa
aaaaaaaaaaaaaacttaatggggagttaataccacaaaaatagacagcatgtgaaagagaaagtgaagagtttaaacatgggaaagtgtgcagccatcacacgatctcccacattgatcgacgtaaagttaatgattgttataaaatcacgtaagctgaggagaccaatatttggccatgtagatctgcacggtaaagggtgtcacaataccaggcagaatgcaaaagtccctatctggatagacgttagacatggacttgggggcaatgattatcccaatattttcccacctagcgtggcacctccatgtggcaaaaattagaagatgcattggagacagatcagcactaacggtcaggttagtgtcgtgcaaccttccatccttcaagatcccatggttgcatggtgtactcaaacaagaagatcatggagacttatcaagatccacatcttcaaagttttgacgcaagtgcatcctgatatcagggtcagcaacaaagacagaaatatataaacactagcagggtcctggccggacctctagctagtcggccaagggtgacaaccccatgcatcgagtagcccccaaacatggctggccgtccaagcgtgcatgtcatgctccaacacttgtgttttttcccataagccttccaaatcgtccttagcactcctacaacttcagaacagttcaaactgcccacgaaaatagggattctttatcgataaatgacaaccctattctttaggggttattagtaatctatttcaattttaaatatacgatgtaactttcctattttctatgggaatttctatgtaatagcttgtaagccctaacattataaaaagggcattaaccctatgtaaaaagggacctaacctcaatctcaacctcaatctaaattcattcatgcacctaaaagcttggaatcactaaggcatagaactctctctctctctctct

SEQ ID NO: 122698 - DNA, 1789 bp, Cannabis sativa
gaatgctctaaatgaatagacatgggttttgatgtgaaacgagagtattcacatagcttatgtgacttttaaattattgcttaatgcaaattgtatgttgttctatctctgagatgcagtagctggcatgcaatttaggacctttatgatctgaaaagagtttagattaatttataatctgtcatcacataagaggaagaagtgttaacaatcggtaatcaaagcaattgaaatcatctccctaatttcacatccattgttaaacattttatttatttgttttatttaattttatttagtttatttagttcaaaattaatttattcgattgccaaatagaaacaagaatttatttgattggtacttaactacagtcctcatgggaacgatctcacttacctgagtattacttgttaaaacgatatgtatacttgcgtgttggatttatcacaacataaatagaataaaaaatctttcctcttcgctgccaaagtactacaccaatggcaaaattactagcatcacacatcaactcaaatggcaaagtccaattcgaagctacaataattggggccatcaccattgcctttttcaaagtcacaaaagcattattacattctttggtgaactcaaatggtcggttttgttccaacaacgaacaaagaggctttgaaatctttaaaaaatccttcgtgaaccttctatagaaccccgcatgtccaagaaagcttctaatatccttgaccgtggtaggaggcggtagcttttcaatgacttctaacttagccttgtccacctcaatacccttgtgagaaatcttgtgacccaaaactatgccttcttttaccataaagtggcatttctcccaattcaacaccaaatttgtttcttcacacctcttcaacactttctccaagttagctaaacaagtgtcaaaagattccccaaatactaaaaaatcatccatgaagatctcaagaatgctctctgccatatctgaaaaaattgccatcatgcacctttgggaagtggcgggagcgttgcatagtccaaatagcatcctcctaaaggcaaaggtgccatatggacaagtgaaggttattttttcttggtcctccgacgctgtagaaatttgattgtatcccaaataaccatgaagaaagcaataaaactctttccccgccaaacgatccaacatttggtcaataaatggcagcaggaaatgatccttcctagtgcattgtttagcttccgatagtccatgcacactgtccaaccagtcacggttctagtagggatcaattcattattattgttggccaccaccgtgattcctcatttcttaggcacacattgaacatggctgacccattaattatctaaaatcgggtaacacaatactataatccagccactttattacctcttttcgaataacttccttcatgacaggattcaacccctattgatgctcaatggaattactacaactcgcttctaagattatcttgtgtgtgtaaatcattggactaatgccttttatgtttgccatagtccacccaattgctcttttatgtttcttcaacacttccagcaataaaccttcagctccagcttctaaccacactgaaataattactggcagtgttttattctcccccaagcaggtgtattttaggtgactcagcaagggtttcaactctagctttggtggttcttggatggaaggttttggaggcttgaaattgctttccttcaactctaaagactcaaaaggtctcttgaattt

SEQ ID NO: 122699 - DNA, 590 bp, Cannabis sativa
ttcacttacaaaatttaaatttttgtttccaaaacacatttttaaaaaacacaatttttgaatcacaaaccaatcaaacaactgtcatatcatcaccctaaacaactgcattatagatatatgtagattggttcgcccaggttttagtgtcaattgttgttgcatgtccatgatatttttaggctatgattgtattgagtctctccaacatggttaaagcgatctctctttgaatctcattattttttggtataaacagacttactcaacatcatgttgttccttgacatattcaatgtcttcctcttcgttaaaaagcttaaatcaatatatggtaattttattattatttttcctgctattaagataaagtcactttttgtgtgttattttatcactttttgtgtgttaaaatagtatgtaattgattcataataggattaattgcttatctatattttgttgttttctattatgattgaacgttttctctaccacaatgcctgatatgccacgtaacctcggacattaacatgttgtcaaagtttaagattaaaacacatagaaatccatctcaaaaaaaaaaaaaa

SEQ ID NO: 122700 - DNA, 691 bp, Cannabis sativa
atttgtgattagtatttttttttgtatttttgtgtgtatattttcttttagcatatagaaaccagttcttactaaacatgtaaacattagagataacattgatcaactaaaattattatagttcacattaagaaatgagcatgacgaattagagcatgtattgtgttgtgtttgtataggaactgattttaattaatgttatctttttgatcaattacgtttatagtgtttgatggaactagtttcaatattttattttgatttgttattttaatgtgttatgtctttcttttaaaattaaagtggtactatactacgcttgtttatcattatcttttattattttttgcatacaattttatgacaattcaatcaatttaagtgtgggtttgatgattttaaactacatggtaaaaatttttatattatttcacgtaattagttattatgtgttagtttgtaatttgtttattttataaaaatggtttctttttgtttgatttttaatagttttttaatgtaattggtttctataattaaattttgtaagtcatttgttaaaaattcacatgtaatatatgtatatttttgagaatttttctgttttaagctaaaattatttaaaataaacctttatactattcaaagaaaaaataaacatttataatatttaatatttacaaaaatatta

SEQ ID NO: 122701 - DNA, 2394 bp, Cannabis sativa
  modified_base (156)..(159): a, c, t, g, unknown or other
  modified_base (2291)..(2291): a, c, t, g, unknown or other
aaaaaaaaaaataatataaattatgggagttactctttagtgacacctcatatttttagtgacatgcattatgggacactaacactgaatttgtagaaattttgtgcgtcactaaaaatcacctcaatttcagcaagaaaatatcagaactagtcnnnngactacccgagaacaattctataaggtccgcactttcataactattctaatcggtaaaacttctacaggaaacaaatttttttaaacttaaaatggattaaaccttaccttaagctttctcgctctgagaattcactatcctgctaccggagcttaaatcgctaagtctcggattgaaaatcaaaaaaaattgatagggagtgagttttgatggaggacgagagttttgttttcatttataagtttaatttataaacttatattatatatattgttacgttcttatatatataataatatattaattatattattatagtaataatataatataataaaataatatattaataataataacagtattattaataataatcatataataatattaatgaaaatattttactaatgtcctattaattcttagccactaaaaaatttctactcttacaacactaagcaaaatctcacaaactcttaattacgctaatacctatattatttacataacacaatattccaatcaattatatcaattaaactctttgtgacattattgccccaatcaagtctccaaggtcgccaaacctaaaaatatttttatttcacatgtagctcatattacattcagagatgctatataaatatctataatttataaattacgattgtttactcacttatagtgaatttaaaatttatgctgaactaaattagttggatcataatcccacttattatctaattagcccatactataattataaaccctaattatttaccattagacttatcgggatattacaaccatccctcccttataagaattttattctaaaaatttacctaaataactcgggatacagttcctacatctacgactctaattcctattgcttcctaataaaataagttttctagagttcaatatcatcgtaactcaaaatacgtgttggatctgacacatactttctaaacatagaaatgtggaagacattatgcaccatggacaacacaggtggtaaaactaatcgatacgccaccaggcctatccactccaatatctaaaaaggattgatatatctaagacgtaatggtccattcattcctaatcaaagcacccttggtgatgctaaaagaaaactgagtctctggctaaaaatttaatatccatacatatcaaatcagcatagttgtttctgtgtacttaatgaagcgagtatatatttgaactcactctatgattttacaagtttcttggaacttttcggtccatcatgttcttctaccacctgtgttactctagtgaacatgtgtccaacatctttctcgtaccacacttattaaagtacctaaccaatggtacatttaatcatcgctttcaaaccaacacttcgtcaatgaaagaaattattcgaagataatctaacccttattaaatatgctcacattatgtttttaatattcgattgatcctcccaaattagccacctttcaagagtaaagcattatactatttttactataattctcatagttctcgataaccttcattaattcttaacatcatagccaaagaaataaaatttaggatatcacaagattaaactattccattgtatgaattccatatactcaattctcttatagatcggttgcactgatagacaacatattaactcagtatgtccaaccgttactactcggtcaaaaccataagatcgcacaatacatagttcataattttttctttctgttcctcctataggatctcctaaacaaatctactcacttgacttattaacaagttaagtgttcctttctaatcgacatacaattagagcacttcttatttcttctcattaacatatgattatctcgataccttgtaaatcattacttattaacatatgataatcttggcaatgactatcaattcttcattttccatcttgagattacccaagttttgtatgcttaactccaaggtaagctcatggtgggttattgttgacggttacaactcgtcgacaaagttagtggtcggaaaatgtgtaaccattaaaatatgagatcaagagaagaggtgaaatgaatgataaatgctctgtaaagaccgcttagtttantttggaaattagcagttaattaggtttaattatgaaaattatttacagatatttaaataattgtttatactgttattagtgaattctaaaatgcattttatgt

SEQ ID NO: 122702 - DNA, 1952 bp, Cannabis sativa
ggaagaagcagctaagagaggcatataagcttctgtgtaggatgaaggttaaggggtgtaatcctgatattgttcattataatacagttattatgggattttgcagagaaggtcgtgccattgatgcttgtaaggttcttgaggatatggccacaaatgggtgtttacccagtgtggtgtcttaccggacattggttagtggattatgtaaccaaggaagtcttgatgaggcaaaaagataccttgaggagatggtgtcaaaggggttttctccacatttctcagttattcatgctttggtcagaagtttctgtaatgttggtagggttgaggatgcttgtgcggttctggggcatgttctaaaccatggggaagttcctcatgtagacacttggacggcaatagttcctaggatatgtgaagatagtgcaaccataggaataatcgaaaatattctgaaaggggtgtatacagtaaaagttaagcaagaaatgatactagagcctcgtacttgtctagagaactctctctgatctgatgaatgaatcgcaagatgattaagcctaacacattttttaaatttatcaatgttggaatggatgcttcagcaaagttgttcttgataatactctgtttgttctttcattctagaggattcttcacggtggaaaatgtgaggaaggtttatgctatcacaatggtgagcacatttggtgccgaaggtattatcagctcagtgtggcaagtatctggttgagcaatgagtaccatgaagcattgctacagaaattgagctacatcaatcttggtgatgagtgatcatagttggggctggtatattgaaagccagaacacagaagaacagtgggcagatgtaagtgactctgtattgctgcattttatgatgagtttctgggaagggtagaattcaaagcaggtaatgggaagtctatactatattgtaatatatttggagtgggaatgcgcctctgtcacatgtattctctaatatgtcagaatatgttctataaagtatatttcataaaaaatgattgagaaaattcaggttggactttacaattttttaggaacttcaatgatgtagaagttccatatcatattaggctttttgagagatctgaaggaataacggtctgatcagattttatgatttttataacttaaaacttgtgggttctatgtaagtacttgattggtagagtattattgaaaattgtatccaaatcagaatgaaaaatggtaaagtcatgtttatttcactctattgccatgtcgtgctccccgccctcatttaagtagcagctctaactcttcttcagtctgtaccacaccattgccgagtcactcgtgccgttgccgattcatctgaggtgaactctttatctttctctcttagtcaacatctgaattttgtttctttgaatgtgttgtttaaaagctatcttttttttttcttctcacctgagttttaatgttttcatattgaaagaaaaataaatctggaaaagataaatgtaaaagaccaataaacctgagatttggatgctcttgatttgagcttaaatgttttttttttctttgcttttgatctgtgcttgaatgtttttttctactcttgatctgactatgactgtgtttgtttggttcttgagctgactttgaatgttcttttcataaattttttctggtggacaaaataaataataaatctgagagagaaaaaaatgtcatatgtgtgaggattggttatgcagagttatcacattcgctttgttgtattactatattggtcactttatgtggcgtttgattcggaggaatgaaaatataaatataagaataggaataggaatgggaatgggaatgagaatagaaataggaataggaatggaatgaaataaaatttgaaatgcataaaaaaaattgataaa

SEQ ID NO: 122703 - DNA, 550 bp, Cannabis sativa
ttatatatataaatctctatatatttatataaatagggttttgtaccttggttaagaatttgatatggggaggcttggaagggtattgttggggcaaatcaatagagagaaagaaaacaccatcttcataaggagagccagatgggccaaaaatcacaccttgccatttaaatggatcatcccaactcataggcccatagctacaacaaactggaaaatcaccatcttccattccttcccttttataaatccaatgcttcatcttcacttccctgtttttttttttttttcataaaaacatattaattttgatcatcaacaaaatatatatgtatatatatatgtatgtataatatggtgtagattttatatcattattaccttgtttcttccatttccaagtgatgaatatgaagtctcttatgagattgaaaggtattttaagactttatttgaatagagagaaggttcctagaaaatgaaaggttgcttctttgtaatatataatatatatttatatatatatataagaattatatttatatgtaat

SEQ ID NO: 122704 - DNA, 1271 bp, Cannabis sativa
ataaaagaaagagggaggcaattgaaactgttagggttagggggaagagagtaaaatatgtttatatatctgtataaaagtttttttttattaagtcaccacgacctgggttgggttgattggccccaaagaggccaactcaattccgacccaatatgtactgattgtaatatttatgacccattctagtttcggcccactattaaacgtgctgatcttctcattttcagtttgggttggccgggttggtcagcctactgggttaaatgcacagccttaatcatagttacattctttagccattatatatacactcactcaactttaagtgtaaattaacgtggatcaacatgacttaaacaagatattacacctttgtttaaatgcttatttcccctatctctaagcactaagagaactctcatagaaataattttaagaattatagaaacttagttctcacattctcacacaaatgagcacattagactcctttacatagtgttttaggtgatcacacttaggattcacacacaccacctcatttctctcatataaatgaatattaatctattttgtaacaactatatttcataacttttgaatcttatcatcaattttgtgtaacatcttttttattacaccaaaatgtgatcaactaatataagttacaaaagcaattaattttgtaactcctctctatgttacaaagtgtaggttacaatttttaggtaaaataaagcatatattacacaatttatttaccaaacacttaatatatattatcacataataaaatatattactacattttaatcattttacctttgtataaattatggtttttttcattagtgtacaaaaaaataattttattacaaaaattgtgcaaaaaaaaaaaaaatcaattttaaaaatgtacatatttgaaaacatatttacataaaattatacaaattattaatttaattatattagatttattactgagtcaaattaccataattagacttttgtaacacaataatttgcttaaaatgtttattattaatttttttttaataataatattgttattatttattatatattattatgatttatgtttgaaatgatactaataatattttatgtttattataacagtggtttagaaatatttaataatataaaatatttataaaaacataaaataaacattagaattagaagtgaaatttaaataaataaatattaaaggattttatttttaagaaacaaaaagttcataa

SEQ ID NO: 122705 - DNA, 2298 bp, Cannabis sativa
  modified_base (1814)..(1814): a, c, t, g, unknown or other
gagttaggttaggggaggggagagtagccaactcagatcaatgcatgctaaacgcatgccaagtgaggtggttccccaaagtaaagcaaggtaatatttaccaatatagtatattaatatttcccttaccattagtctctaaatgtatattagtctctaaatgtattgttttatatttttcagtggtgattgcagggtatatgccattgagtacatcgaacacctcatgatgaatcgatcattggagaacattaatgatgataacatgaggatgttcagagatcggtggtgtgtagacttgttttaccaaaacctgacttggtaaataattacaattatagagggttgttatatttttttagtgttttttgaactctttaattaaaattgtacagacatcgttgtatatcgcaagtaatcgtgaattgtaatcgataacattgcaaaaatgtcgctaacaaatcatgtttctatttgtaaagtgtcatgtcgctaaatgtcgctaaaatgttgtgaaatatcgataacaaatcatgttttgacattgaatggtaattgatttttgacatttattatccccgcctaaccaactacttatatatatcgataataatgtcgctagcatgttgataatacgacatgttaatcgagaacatgtcacatggtgtcgtgagttgtcgcgaaatgttgcctagattgctctatgcatgagaaacacgtgtacaagtgtgtaattcatttttgacatttattatcccaccttcccaactactagttatgtctattaaagtaaatttctacttcataagttacatatttttcttattatttaaccctagaaggtaattctcttagaagttctaaatgtatattagaaggaataagggcaaatacccaattctaactcctgaagagatcaagaaggagcctgattgtggcgaaattacgcctcaaatacaaagttctagacgactataaacgttttgaaaatgaatggctggctaacgagtggaggtatttacaacttgaaagagaatttcacaaaacaaatgtatggcttgctccaccaccagggttccccaaagggcaccgtcattgcaaattaggttattttaatggtaaaccggtgaagactggatctttatgcaagtattgcaagtctcacccaaaaggcaaagaaaattaattttttatgttatgattgtttagtggtcattttttttgtctttacttatgtttaatttgtttttctgtaatcccgaaatgtcacaaatgtaatcgttaaatgtcgcaatatatcgatattttccaggaaaaaataatgttccatccatctcgcatttcacatcgctacatatcgcgaattgtcgtgaaatattaccattataaaaatctgaaaaatagttattcttgttcttgccatgtcgacaagatcatcgatatatatcgtgaaaatgtcgttaaacatagatagagacaattattattcttgttgttgccatgtcgataaagtgatcgacatatatcgggaaatgtcgttaaacaaacacatagacaaatttgttactcttgttgttttcatgtcgataaagtcatcgatatatatcaaaagatgtcgttaaacaaacacatagagtgctttgttactcttgctgtgggcatgtcaataaagtcatccatatatatcgaaaaatatcgaaaaatggcgaaaaaaaatacacagacacaaaaaactacaaaatagatttcataaaccatattagtaatgcatgcaattaaaatacgaaaatgatgctcaaaccctggtcttgcangtagctttgttgtgtcccaatgcgccacagtttgaacatttgcgaggttccttcactttttgactgttagatggaaatcggttagtctgtgttcttcatgcattgctctttcttgaacgacctacgggtttcttctccactggtacgtcgactctcatgttctgcatgtgttctggaagcacccattcatcctcctcgccgacaagattaattgttgcattgtaagtattcttccacgtctcttttgtgtaatagggggaggacagagcgtacaaactgacattctgggtaagcgccgcgacacatgcgtggggacaaggaattttcaacaattggaacatgccgcatgtgcatgttctctcaactaagttcacatcaccacttttctcaaagttagaactgtcagaacctcttccaacgttaaacaattgtgcaccgttacgtaggacacttctacgtctaccatcctcgtgttgctttatca

SEQ ID NO: 122706 - DNA, 1369 bp, Cannabis sativa
atccatgatgcccaaatcctttaaggcaaactgagagctgagatcagatacaagcttggacacaaggttgttgttgttgccagtaatcaatatatcatatacatagatgagtagatagatagttgtagtgggagtgatgagagtgaacaaggattggtcagttttggctgaggagaaaccaagctgaagcaaaacattagaaaatttctcaaaccaagcccgaggagcttgtttgagtccataaattgccttgtgcaatttgcagactttagttggatggtcgggatcaacgaacccaggtggctgaaccatgtaaatatcttcatgaagatccccattgagaaaggcattgttgacatcaagttgcctaatggtccaaccttttgataaagcaatagtgagcacaactcgaatagtgacaggtttgactaccgggctaaaggtttcatgaaaatcaaagccagcttgttgatgataacccttggccacaagccttgcttttagtctacttacagagccatctgaattctcctttatccgaaaaatccacttgcagcctattgactctctatttggtggtaaattaacaagagtgtaggtcttgttctttttaagagccacattctcttcagacatagctgcatgccatttaggatcatctaaggcctttttgacagatgtgggaagtagagaagccatgagaactcgaggtttcttgatgccggatttagctcttattttcatagggtgtgtgtttacagcagtaggtggctcactggtgctgaaacccgtggttgtagggggcacaatatggtctgtagctgtctcagaaagagctgctgctggtgtggtaataatagcagtgtcttgaacagctgctgtagtgggtgttgtaccagtagaaacacctggtataactgcaggagcaggtgcagtagtaggggaagatggggagactgcagtggcagtacctgggagagaactatctgcaaaaatagggttagcagggacaatagtagtaggataagcaacattcaaaacaccactggagtgaggcctttgcacatgagcagttggaacattaaaaccaggtggaggttggaattggctaagtcgaacaggtagaccagatggtgaagtaaattgattagtgagagtggaagaatgattgttgtttgcttcatgagcaaagggaaatatgagttcatcaaagagaacatctcgagaaatgtaaacgcttccatccttagaaaggcatttgtaccctttgtgagctaggctataaccaagaaaggtacaaggttgagacctaaattgtagtttgactttgttgtaaggccttagattgggatagcatagacaaccaaac

SEQ ID NO: 122707 - DNA, 1949 bp, Cannabis sativa
atttgactttgattcgaatacatttttctctctctctacaggtctctgttcatcggcgttatcataggtggtttttcgggtaacgctgggtggattttgggtttgtagacggtggtcggggttggggtttaggttcgcaggtagttgttggggttggggttgggttcactgtttattatttttattattttttcagttcataatcaagtttgggtttgggtttgcgcaaaggtatttttgagtttgtacaagtgtattgagaaacaaatgtattgagtttgtaaagaaaaatacttcacgcgtacattaaatttttatgttttaagaaataaagtttataaatggttttattttttattatttttatctataaaacctatttattgattaatagggtgaaattataaaataaataaataaataaataacacacattacaaggacaaaaaaaaaaaaaagaaatacatacctatagtgaagcacattggatgttgctattataattactcttacacgtgacatgactctaaatggctatagtgacacgcgttgagggactctaacaagttttagtgatacgtagtgaagggtcactaaatactacttttccagtcacccacattaattacacgaaatgaagtgtcactaaatattattagagtcactcaaaatgagtcactgaaacctatttttgtagtagtgtacactattttagtgacattatttagtgacttacacttttatgcgcgtcactaaagagttaggattgatttttaatgaaccgcatagttagactctaaatttcggtgttagcctcctataatgtgggtcactaaaaatttaaagtctgactaaatagtaatatacatatttttttgatttttttttaataaaaaataccaacttatagagtcacaccaggaaagactaggaaagcgtatcccaactctcttggagcgtcactataagctattttaataaaaaaataaaataaaataaaagatacatagtatatttggtaattcatatgtaattatatattctggatagctgaaaaaatataaatataaataaaaataaataaagataaatttatttataataagtaaataaaaaaaaggaaaatgtaaatgatataattaggtttgcatttggaaactctacaatatcacttagcaaaaaatcaatcgtcaagaaaatcctctttcttcttcatctccctcttgcgcttttaactgagctcttgcacgacaacctccttccaacgcccaatcgatcgctattcccagcctcccaaggccaagcgatgcaacgaaaaatggattgcccagcccatacggtcgaacaaccagtgacaggtggcattgcgatctccgacccctcaaagccaaggtaaacgttagtggttttttttaaacaactctatctcgctctcgttctctcctatgcaggtcgatggtcgtggtgggcttttgctgtgggtggttgctggagtcgtcctcagctctatagttgccaaagctagaaatagtgaaaccctatttggttgtgtttcctttgtcttcttggatgtttgtttttagacttgactttgttttgaattatatttttctctctctacaggtctctcttcatcgccgttatcataggtggtttttggggtaacgctgtgtggattttgggttcgtaggcggtggtcggggttggagtttaggttcgtaggtagtggttggtgttggggttggattcactactgtttattatttttattgttttttcagttcaaaatcaggtttggatttgtgcaaatgtattgagaaaaaaatgtattgagtttgtaaagaaaaatacttctgtgtacattaaaatataatacagagtacaaggacaaaaaaagaaaaaatacacacatatagtgacacacattggaagttgatattataattact

SEQ ID NO: 122708 - DNA, 1130 bp, Cannabis sativa
taacaagagaaaaaatttaatgatttttatcaattttttttttatatcaattttttttttatgcattttaaattttattccattccattccattcctatgcatattctcattcccattcttatattttcattcttcccaaccaaacgccacctaaaatattatttgtatatataattttttttttttataaatatgtgaggattggattgaatcggttacttttatatgtcaatcaacatccaatccgcacaagtgcggattttgaattttcaccaaatccaatcaaatccatacaagtgcggatatccgcactttgcggattgaattagattggatcggttatttcatgaagtggcagacccaggatttaaattgaagggggggagggggggcgacacttttttttttataagtgagggatgacgtctttttttctttctacaataataaaaatattaagttcaataattaagacatcaaatataatattggtagaggttcaaaaagtaaaatgcaaatactaaagtaagcatgtttttattgagattataactcttgacctcctttctttatatgcatgaaatgactatactattacatcaaatgttattttatgttcatagatatcatttttatttataaatatatattgtgattaactaaaatgtatatatatatagatatttttttccaattttttttagaaggcgattgcgctaccttgcctgatttatatgggtccgcccaacacccctacatatagttacgacgactcacaagataaacaaaattattattattattatttaaaaaaaaatgaataatatatatttgttgatcccaacttggggttcaatcttcatcaacttcatatggactattgtacgacagtaataatttttatattatcgtacgtatatatatatatttatggaatgatcctgcatcatatttgtcacgcacgataaataaaaaattaatttttacttggatcatatacttttgacatgtaagtataccattttatattttaagaagaataatctttacttttaactaggggtgttcattggatcacatctaatatttttacgcatatctagatctgatccaatcatatattggatgt

SEQ ID NO: 122709 - DNA, 2685 bp, Cannabis sativa
  modified_base (493)..(496): a, c, t, g, unknown or other
ttaataatttaacattcatgcatatataaaaatgtttctctttattaataatcataaatatctttataggtttttcagggcataaaccctaacaacgagaagacgtcgattatgacaaaaccttctcacttgtggccatgcttaaattcatctgcattattttatccatagctgccacttatgattatgagatatgataaatagacgtcaagaatgcttttataaatgataatcttgatgaaaccatttatatggaacaacctgaagggtatgtgcaacctagagaaggtcaaaagatgtgcaaattgcttaaatctatttatgtattgaagtaagcctctagatcttggaatatcacatttaataaaactattaaatagtgtggctttgaacaaaatgaagacaaaacctgtgttaggatttatgccctaaaattcctgtaaagacatttttgattattaaataaagagttaaacatttgatatatgtgtgnnnnttaaattgttaatatttattattgaataatttatgttaaatatcgaaaaattccttatgttatctgcatttttaccagaatgacacgtggacattaattaaagagagacgataagtcattaagccccctaagtgcctcgcctcgcactccacgaagatagcagcatgaacctcatagaatgagtccccgcgagagaagtcttcccaggaagaggccacgaaaggggtgttcgcgagccagcgacattccccattctagaagacggaaccatttgctcctgtctaggatatagaccttccatcaggatgcattggtctgggacactcttttaactcgcagaccatcagcccgcgcgtaccaaattacgggcccaccaaccgcacctttcctatgtatgatgtcaaaggttgtctctcacgccatgctaccatgcagagcatgcgtgtccttgcgttctgtgccagaggatccaatagctagggatgaggtgaattcaaatgacagtggctctaaggtgacacgcgtccaaagcaccgccagtacagccagtacaatttgacatcggtaaagaccacatggaaaatttgccacctaccaatttaacagtgggggttcatccttatgtagatccatcaaaggtggcccatgcaaggggagcgacctataaatacccccgaagacacacaaggcaggggattccaaggcttgacttctctcttttcctccttcggctcttcaccttaaaaccgaagactgattctctataaaacacattattgtaactcattattaactccaaaatattcctactaagcttcctcttcttcaagagaaacacagtggattggagtaaaagtctatctttcctgtatttgtataaacagtcaccggccaaagagcctaataaaatagactcatggaataagaatatttaacgcctgaaccacgtaaaaatcccccatttattattactttgattatgcctctattaatttcttaagctctataaatatttggttgccaaaaaactcggtaaacaatttggtgctttcattgagagctaaagaaagaaatatgcacgacggctaccggtgcaagaccgtctggaataaggtctatgcaagaaaagaaggtagacctcctgatgacttgtcgaggttcggccgaaggccaaaaaggtgcaaatcgaaagtgttgcctagaaagagacttgatgcctcagtctactcaagagtgacaaaagtgaacgcacgcgatcttaaaacacctactgcactaaaattcatccttaaaagcttagatctggccagccgactccctgagggtaagaccaaccgccgatgtcctcaagctcagatccttcgctgtttcgctacgcacatacagagcagtgcgagaggcactagggccagacaaaggagccatgatctgatgcagttacgatggctaactcagaaagggtcgtcaaatgcaacagctctatccagctagagactccgacaccagtgctggtgtgaaggtcagatttttcttttgacaaccacttctcatgccttgtctccaggtggtgaattttttcgaaaaaggatcctgtgatgacgcctactgaaaggagaccatcagtaccatcggcgtctactgggttaccagtgaggcctggttatggtattgttggtaggaacatgccatttttagcacagttcttagtgccatccttgtcgccggtgtagctacatccctggagtcacatcaacaggaagaaactcgagacattataaaccagttagggagtccttgcgacatgcttatcccgatagaaatctgagttctcgctttagagatcctcaaatgcccccacacttcaccagaggagacagactacccaggagatcttgaggtgtaaccatgcacctcctagactttccctgggcctgggatacgcatgctaacccgctctccaagtgtggaagatcattgggagtgtcgcatgtcttcaaccatctttctagaaagggagagataacttgaagtctgctttactcccaaagactcttccacccattgatcttttcaagcgaagtctaagctttaatttttatacaacttcagctttccttcttggaagtcgaagctagttacataaaaatacaacatgactctcacatgcacattgttgggttttatgccct

SEQ ID NO: 122710 - DNA, 2414 bp, Cannabis sativa
tagaaagttcttatttaggatgttaataaacatacttgtgagttgatctaagatcctggtaaaataattccaacacaaacaccctgagatactatgtcatctggtattaaagggacttgacatcctatgattttgagatctggtaagattgtaaagtgtgaagggctctctataaatagagcccttgaactcactgtaagggagactctatggtagaaaaagtattgatgaaattgtatctttactaaatagtgaagagagtaatatttacttcaagtattcttctattaagatcttgaaacaacatcttaagttcttgtcattttgttgactagttcttaccatcaataattcagcattgtttgtgagaacgacaagatctagctacattagttcctaaaccattcactataatcttcaagacgtcaagaaattcccatcgtctctgagaaaatggggttcactcatgtgaaaaccaaccgaccaccataataagagaacatctacctccaattgccagagagggccagagggagagtaaccaaagtgtggaccaccacgcaaatactcaaaaagggcctaggacactacgtaactcaataatgacatcggtggctaaccctatcgatagaagtattcaactatcgagaaggccatctccaataccgtgccttcaaccatttatgccactgaaccccaacactttaaggaataggcctagaaaggaaaagtgagcgtactcggtgagttcaagctccaaggaggaaatgagcgacccccacaggaagaacaaaaggttagaaactagtgtgcttggtatgaaaaaagtgttgagtagcatactcaatggcaaagccaaagcctcacactttcatcacgaaagccacagagtgggaagcaagatctcaactatgtatgctgcaaaggtgattccatatcatccactaacagcaccatatgagatgaacatggaaggagcttctcgcaagacaaaagtttaataggccaattaagacaactcgagcctacctatcatgaggggatttttttgggggaagcacccatagcctaaggaagagacttcaggcaagaggtcttatgctaggggcactttgcctatggcttcccaccatgtgcaaggtaagcagaaggccttatttgtcagctttagttgtaatttacatgttttttagataagaggagtaccctccacgagccttgtgaaaaccacacgaaagacccaagttccactcactaactcaagagagaatgagcaaaaggatgaaggagttagaggcagaaattcaagacctacttcgaaagatagtgttgaccgcaaaaagtgatcaaccaatagcagggtcatacaaacttgaggcttgccatgcgtgtgcacaaataagaatgaaaagccatagacaataagatttttgatagaggttcgacccccttgtggttatggtttcttgagtgattgaagtattcaactattgagaaggccatctccagtacggtgccttcacttcaaccattaatgccactgaaccccaacacttcaagaaataggcctagaaaggaaaagtgagtgtactcggtgagttcaagctcccaagcttactgctacaaggaggaaataagcgacctccactggaagaacaaaaggtaaaaaactagtgtgggtagtatgcaaaaaatgtttagtggaatactcaatggcaaagcccaagcctcacactttcttcacaaaagccacccagtgggaagcaagagctcaaatatgtatgttggcaaaggtgattccatgtcatccactaacaacaccctaggagatgaacacaaaaggagcttgttgtgagacaaaagctcaacaggccaagtgacacagtccctctctttctttcgtatttcgctttctctttctctcccttcaatcactcaagaaaccataaccaccaccaccgtcggtgatcatactccgactaccacctaatctacgtgttgcaccactcggacccccgaccaccgacgatctcaatcccccaagcagtgcctctgcatgcgcccctgttagcgagagatcacgagtcaaagtttggaggttgaaactttgagaacattttttgatcaccttcggtgtccatctgatgatccttgttcaccactagaattaacttcttgaggagaataatctgtactaagtcatttcgcccaactcgatactttttccgatgaactttttgtagctccgcccctttctgaagaattttcagtgataccgtgtatcattttgataaatggttagtatggttgttatctacttattgaggtggtcgttttgatatatgcttgtaacaccctaactattttaggcgtattacgtgatttttaaacatacagtgcagctcgttgctaat

SEQ ID NO: 122711 - DNA, 1014 bp, Cannabis sativa
  modified_base (86)..(86): a, c, t, g, unknown or other
  modified_base (935)..(940): a, c, t, g, unknown or other
ttgaggggggatattggagatgtaaaagtattgagctatataaaagaacatggggtactccactcattgtcaattggttttgaganggaaccccatgattctcaacagaaggtaatagtgtagtaattttaatgattcaaaaatagttgatgagaaggttggtgttagtgaaggtttattggttacatcttctgcagatttgatgccacctcgtttgattcggttaagtataatgagtcaagtgcgtgcttttatttgtataaggtcatttttatatatagattgattatgtatattattgaaaaaattgttagaaagtggaaaatgagaaaagaataaagagataaaatgagacaataaaaaataaagaaaaggaaaagaaaaaaaaaacagtattctttctttagaattgagataacacgttattgaaataatgctaacacataaaaatattagtaacacttaaagaaaagggtaaaagatatatctacatcatttttaaaaattagatttaaaataaaatatcaaatgtaaaaactcttaaaatttattatatctatctgaaaaaagctaaatcaaattatgaccgacttgtgaaattttttggataagtagcctaaaccaatttataagtgggaatattaaattatgaccaacttgcaagaatttactctaggaaaattgtacagtaaaattttagaaactttaaataaccaataatttattctcaaaaataataataataataattagagtcaaaaattataaatgagtaagcttttactaaaaaatgaaaatagaaataattttgatgtaatttagaaattagatctaatttgtctagatagtagaaaggaaaatcaaaataacttagagcatgtttggtattgttttctagttttttgttttataaaattgtttttagaaatgagaannnnnnatagtttttgaagtttttaaaacacaagtcacgtttagttagtgatttttaaaaacaatattgactaaaagtga

SEQ ID NO: 122712 - DNA, 1487 bp, Cannabis sativa
agatccattcgaggaacacggggatatcaaatttagatatttgtatcctgtcgaagtaaggaaccatggcatgtatgtttagaatatattccattttgagagagttcaaaaagcactatctcaacggaaattggtcgttgatacgcgatccaagccattcattttttttcaatctttctattcattattttctttattttattattctccttattactattaccaaatcaaatgattgcaaccaggtcatttcttcaatttgttctccatttcttcaatttttattttgttgttgttttatttaattgtttgatacatttttcaatcggttttttttggttgcctatcttttattcagaaccttgttggtttaaattttttttagaaccggttatatttagtaatctggttaaaaataatttatgtagatgttcatttttttatatttgattatatcaaattttttttatattattaaaaattagttttttataattacttttatataaatgcataattaatttaagtctgtatataagaatgtatttttgtctatttttgtttcatttgtttatttagctgacttttttatttatattttaatagatctctgtatattcgtattcatttactgaattcgaattttatttgatcaattgtattttcgtattaatatatatttcatatatgatagttcaatccatcattatatgatgatatataaatttgcatgtttaatgtgtgtgattaattttgtgatctttggagaagactgttgatgaaaatttattgttttgtataatcggtttttattttaaattgtcttcaagctctgtttttttgtctaagcattcatgattttttaaagtttttgttgcttgagaggacgatcgggaagaattgttgaggtcaccgtagatagagataatgattggcaatttttgttttcaccctgacatcctctgtagcagtcaacaatggtgaaaaacaagagaagaggaattatttcttggttttctgtgatcaattttctagaaaattgcagatgaaggagaggtcattgatgagagtgattcgtggaaagaatattggagaggaattagattctgttatgcttggaaatttatgaggtttttttaaggtaaatttatttatatattattttgttttctacattttgattattgaataatttgtattcgcatattttttctgccataaaaaaataacaacaacttaaatttccttatttaagaaattctcccaaatggataaacataaaatgcaatgttacttttaatagttatataacttggtaatttacaccaataattatttcctatagttaatcatttagggctcgtttggaacatcgtattaagttatattgtattatattgtatattacattgaattggattacatatcatatttttatataataataagttaaactttaatttatactaaaatattatatatttagg

SEQ ID NO: 122713 - DNA, 1775 bp, Cannabis sativa
atgttgttgtttgaccaaaaaaaaaagagtacaaattgaatcggatgaacaaccctaattctcaccaccatatgtacagccaaattaatatgtaaaccatttagttgttctatattatacaattattattattattttttaaagtgcacaatattatatatgctataattttgtaatacaactataataattaagggattggaaaatgtatatttgataataattttgtggatctttcaaacaaaaaaaaattgtagctgtccataattacaataacatcatttttaaattttatatgttttgtaaatattgtagacatctaataattttctcaataatttatatttctaaaaataattttcattaaataaacacttaattttttttattattattatttgcgataaaaaaaaatcaaatcaatagtaacagtttgagtttcacataaactgattttttttaatatatatatttagtgataaaaaattagaaaagtctaatatatttgatatgattaataaattaaaaaaaaaaagtaactaaataaaaatatttaaaaaataatattaatatcataataataatttcatcctacttgaaaatataattataataaaaatgattattaaaaaaataatcattttcaattatggttatgttattttagttgttcattttattaaatatttttgtctaatctatttcatattttaataattgaatttatgagctattgatattttaattatatgttgacaatagactatttttttgagtgaattttaattagtttcagttaagtgataaattttgtaagataaataaaaatttgttccccaatactcttacaattgtaaaatttagttctctaaatttttgttttattgcgaaaattctttcaagtaggaaatattacgatttagtttaatttttgttaccttctatcaattttttgatgtgatcacgtgtcacaaatatattcattacgataatttatttagctaattgacattatttaaaatttaatttgttgatgctaaacatacaaaaattaactcttaaaatatttttaattttttttttctagagcacaatctatgcttgtattttttgccaagactcttgaatcacaccatattagcagcacatcggtattacatcaataaatagttttaaaaaatgaacgaaatataataaaaaggcattgttgtcagaggaaattaaataataccaaatattgtgagtattcaatcacagttagaacactcacaagcagatacgcgagtcgcgagtactcacctagaatagtgagtactcaaagtataagctacaaaaatagacacaaacataaacagaaaagtaaaaaaagacaagagaattatagtagttcagtcagagcttgatctgcttagtccattttcggtaattgttttagcttagtttatttgatttggatcactcatttatatagaaagcaagtgtcccttaggattacataaccggtcagattgacagaattaaatcaagataaacgttttaaatgaagaaaaattttgtctgttcttgacttaatttatgcaacgtatgcgacttgctaagtcacggtttgtcaatccatattctacagtgtcgtactcgtaggatgggcctttgggcctatttcgttaaatgtctatgatcacccttgattaccgtcgccagaaaagtcactatcgccaaaaaagtcatcaaaagtaggggtgttcattggatcacatccaatgaatttggaccca

SEQ ID NO: 122714 - DNA, 3335 bp, Cannabis sativa
  modified_base (533)..(538): a, c, t, g, unknown or other
attgtataatatattatttattttaaataaattaaattagtttctattttattatatacaatagtggtgtataattttattgtcatgatatatataatttagttagtactgtatacacacatatattagtaattattaaacccgaaatttgactttaattcagaaagtgacacgtgtcaatctcgtgaaatatgaaccaacaaatataataatgattatatcattaaatgcaaaatagaataactcattaagtataaaattaatagagcatattcataactcgctgactatatagttttaggcgagacaaggatgcacaaactataaattcctgtattgaagagagaccatcttgcctcgaaaagtatgatcacaaggaaactacaggtaatgtatagtgagacatccaccttgctacatataaggaaatactgacgagacaaatcagctattggaacacttcgcgtataattcacattataataactaagtgtaacaacttggaaacatggaggacatgattgtccagtctnnnnnnccttatggtcaaagagcagttcttacgtttgctcagtaaactggtgctcatgccattactgaaaggcatatgaataaaccaaatcattattggccatctatgtacaaagcgagatgctcctatccatgtcagaatcgatcgcctagaaaataggagtgataacggttatgtggttttctagtattatctacacgtgtttaaatggaacatgattaaagcccacatttcgtgaaaatagttatgtaattcaaatttaaatgtaaatagttgccaacctatgttcctataaataggggcagattctacaaaaaaaaaagggaggaaaaatctttgaaagaaaagatcacaaactgtaattttgtatccagaaatatcttgaataagatagactcgttgactatgcagatttaactgcaaaactacataaaatacttggtgtcattattactattattcttctttttaatttttttttatatatatctgtgtttaatttattacaaaacaaggctcattattcgttaacaaaaatctacgttaccagtttggtgctttcattgagagcctacgtgataaaaattcaaaaaaatccctcctagccaacgaaaactttgtccatggctgatgataatcaaaacaataatagtcatcctgaaaagactaattgtcgtcctgggaaagaactaatgggttcacaaatgccacccactccatcaacaacacgttcaagaaggagccaaggtaatcatgatcaaaacccaaaaatgaggaatgaggaaacaaatactgatgttggttatgtaccccaaaagttaggatgcctatgatcccactaggtatgtacggttagttgaattggaaaatcgacaactctagtaacgtggccgagtctaaccaacgaaatgttgagttggaaagagaggtagctgtagcagggtgactcaaggaaacaatgcacaaaaccaacctgatcctggagtaagaaggccacgagatagacctcaaggttcgagaactaggaggcaggagacaaattaagaaaatccccagaacacccaggaggagcaacctggcgagactagggatgttccaaaagacaaacaacagaacaatcaagcatctcgtcgaggagtacctcaaagaccccagggatttacgaattaggggaatgaaaacaatgacatgccagaatcttctcgtaggaacgaaaacataaggtagcccagaactagagaacagaagatccctcgtaataacgagagaaatcttgggactcaacctaggaccagtgggttaccaccaagacaaccccagcgtccttctcggactgatagggaggaggcatacacataccccagtggagggcgtgtatctaacctttctcgaaggagaaggcctgtgcaggacgaggcaagttctagctcaggacattcaagatcccaatagcacagtcaatttggaaggcataaacgatgaggagataaacctcgtcgtcatgatgatcgagagagtaggagtaatatgaggagctatcaatctgagagttactcagaaacaaggtctgtgagaaaccatgaacgaagacagctagatcttcgtgaacatttgaatcgaagacaactcgatttacacgagtgcttaaattagaacgcacctgcttgacgccaataactcaatgctaataaaaaacaagaggatcccatccaattgcgaatcaatgagttggaagataaattcaggaggtaccaagatagggaatatgggaaactacctggttatgaatcaaatgaaaaacccgagcctttccatccaaacattatgaactctgaatttccctaggaattcaaaaaccctcacgtctcgtcgtacgatgggacttcggacccattcgctcacctcaacaatttcaataccataatgcgagccagcaatgtcttgaataacttatgttatattttatccccaccttgctgactggagcagtgagtagctagttcaataattttacccatcatttaataatttcttgggaacagctatccaaggactttaagaaacagtttcaggcagcaagagacacacgacgtgaagcatcttcccttagtaatgtaaagcagcaactaggcgagtcacttaaggtttacctaagtcgttttagtactgccgctgctaaagttagaaactttaatgacagtattcaacttactgctcttcaagcagggatcacgactgacctctcaacagtcgcttggtgaggaaaatcagtgagttcaatgaaagagctcaagtgtttgtacgaaaagaggaagtgaagaacgagatgaaattgttaaagactggctcgggaagtaaacctagcattgtcccgacaagtaccgtctcgacaaaggctgacaatccaggtggctctaacacaaagagaaaagatgactctagaaaattagccaaaaataagaagaaatagaaaaggcacgataagtatgtgccaatttacactatttataccgagcttaatgaaactcgagaaaacatctttctcgcaaatgagcacagggttacgtttctcacctaagccaatgagacatgcgagacacaaaagagattcaacaaaattttaccaatttcataaggacataggacattcaacagaagaatgtcgtcagttgaaagataagaaagagagccttatctcacgcggttattttcaacagtacgtaagatgacaaggtaatggacaaaactagccaaatcttcccaataacccaggcaaccaaagattacaacctcctcctgtaga

SEQ ID NO: 122715 - DNA, 920 bp, Cannabis sativa
gggtttgactgtgtgggtggctgtcaaaaggctccccttctcaaatcgtctcattagcgaagttgctgcctatttacttgcagtggagactgcaatagccaagagctacaattttgtggtggtgaaaagcgatccagaggttgtcattaatgctcttaaaggtcgttcttcatgttgggagttcgataactatatcagtaattgtcttagacttatttttattgtgttgtaattttttaaagtttcttgtttgtgtaactttaaagcttataatgtggctagctgaacttttactttaaacttaactagtatgatttggatatcgtcaataccaattaacaatttatgtatcaccgcgagatctaattttctctatctataaaatggtttattttatttttttaaataaaaataaagagagatccttaggtacattacattaatagtaggagtgttcatcaaactgcctgcatcgcaaaaaaatacggtttgaaattttttgctgtgcggtagcggtttgaatttttcctaaactgcacagtgcagtgaggtttgcagttttgaattgttaatatgcggttcaaaccgtaccgcaccgcatattataaaaatatcaatttttatatttatttaggtcaaacatgtgaaggcccaacctaagcccactaattattgtattattaaaacttgaaactttttttttatatttattttcaagccttatggtacttttgacaagtgttgctcaagctttgttgtatttgtgatagtttaattatttagtgatagtccaaaccgcaaaaacagcataaaccgcatcacactattttttgtggtgcagttttttagtttcgcggtgtgagtgcggtttgggaaattgaaaaaactgcatgtgtgagttagtttgaaaaaatagtcaa

SEQ ID NO: 122716 - DNA, 1243 bp, Cannabis sativa
  modified_base (187)..(206): a, c, t, g, unknown or other
aaaatctttaaatccaacaatcttaataattcagggggcatttttaacgaacttaaaagttcaggggacatgatttagtacatggcaaaaatcataattagtttttgttaaatgaaaaaatggaccttatattttttaaaataataaaaataagaccctgaactcaatttttaataattttattttnnnnnnnnnnnnnnnnnnnnacaatttctaacacgaacaaatattttgtcataacatctttagattatattcttattaagttttattttgataaaaagatagttcaggtacttatttgtacaattttaaaaaatatagaatctattttatcatttaacaaaatagatagtccaattaataacttttataaaaatataaaatgtaaaattatatttacccataaataaaaaaactttgtgtgtaacgataataataataacacaatccactataatactataataacaagtacttttatttactattattgcaactagcaaccaaaattcaatatttatttattttttattttattattgttgatgatcatctatgataaggttcaaaatttacatacccaaactttttaggcaaaataaatcatttattataatgactaattattaaattaattatatattatatatatgatgatgatcatgataaaaagaggatacgtacgttacgtatgcatgtgttgtgtgtgtttaatttaattttaaattagacaactaagtaataagacaaaggatcaaagctataatctcaacaacgtaggtacataatatattttttattgttattgttgttgatatgtattgaattgatttattatatatatgaattaataaataaattagctgaaagtagtatgttttgttataattatatctacacagaaacttgaaagctttcctctttcggagtttacttgatgtgagattaattctataaacaactttattaattcatagtttctttttaaatttgcagcctttgttaattaaatcttatcattaaatattaattggattgcttttaaaatttgttagatgtaagattaattctgttaataattttattaattaacaaacgctaaatactaaatgtagattgttacagtttatatttgtgcatatatatacatagcatatttttattttggctaattaagatttttttccctccgaactttgacatgtactaaatcatgtctcctgaacttttttgaccgtta

SEQ ID NO: 122717 - DNA, 2830 bp, Cannabis sativa
ttagctattattttatcttttttgatttcgtataatttaaattctaatcctagaaggtatcctataaatagataatggtagtctcttattttcataaactgataactcaaaaatttattttgtgagagaaaataagagaggcacctattaaattcaaacgtccttctcttctctcctctaaaattcaaaccctgtagtgagttgagtgcttgcccacacaattcaagtcaatacttaaatgtagtgtggaagattgggaagaattctatcatctaaggagatccaagtttagatcttggtaaatactttgcgacagaaaggaacaagggttagagaactgaatgaaatgagtcattatattctgctgctaccaatgtacggttttctacaactttatatgtgtttatttcattattttaggaaacttatatttagaatgttggattgtagatcataatcaaacatacatgttagtaaatctagatcctggtaaaacatgttccaacaaaatcttcatagtctacgagtccattgtattaaggatttataagtttgtatacataatacaatgatactattctttaggaataaataatagcaatattctctatttttctaaagattggtcgtcccctgttccctagattgcgtctctatttaagatgtctataatgatagttattctctatggatataatcattcgtaacagctcataaaatatggacattctctacatttcatctttgttcacgtgagataattataaataactacctaatgactctttgtatttatctataggcgattaagctgactgtgctcacttattctccccatctgggtgatgtctttcttaaatatctttgtagaaaaagtattatgtgttgagttacgatgcatctcacaaccttctttagttgttgattgaggtataggcaagatggctattataatgtgtcatgaggtaggtgaataaatgttgaaattgtacttgaacatgtgagtatgtggattaatgagctgcaaactcatattcacgagtatgtggatcaatgagctgtaaactcatactcacgagtatgtggatcaataagctgcaagctcattatctattcgttctgaatagttttgttgtatattttgtttatcccgagatggacctatttatctcggtagtctcattggccaatagttattaatcatgtctcgatattgtttataaggcagcgagttcaaatatttctattaattgtatttctcaaggggagttatttaagtgcatttaataatgcataaatttagggctgtttcatattctagcttacatgtgtcagctttctattgttgctcaaaatatagtacaacacttattttttttatgttttttgaattttcacttattaattttataagtaaaatttgaattaagtcatatttattaaaattaaacaaaaccaacttgtacctacttttttcaacaaatggcgaaaaaatttattagttaatggaaattcaattttatattttcaatttgtacttattgttttgagtccttccagtaggcaatgagctctgcacacacctcctgggtcaccccctatggaggtctcctatttgcctctacctctctggcatttgtgaaattctgcttccacacctattcaagtccaatctctagttgtgtagcccttttgacattgctaacaaagtgtagtccacaaatttaggattgtcaagtgggaactcaaattttatctgcaaaaaagataaacattaaagtcatatatatttttatttgtaaaataattttgcttgaagtattacaataaaatttgaatgttactgctagtttgtcccaaatagtctgaatgtctgctttggcaacgtcttgccaagtgacttactcatgggaatggtgttacgaacaaagagtttgaccatgttgttaaacttgttcccatagtcgtctattggggccacattctccgaatgccttcggaattttaattctggcccacaggctattggacaagtgcatcttccaaaattttccccttgtacgctcctttaatcccctctctcttattgttgactgcacctgcgccaaatattctacacacataacctatatttattaataataaaataagtaccactttacctttttcttttcttgcattggcagagagtcaatggtcctcttaccaataggtcgcccaacatgcttgaatataaagaatttccttttaggcaatttgggaggacatcaatattctggtctggttggttgaatcaagtttcaacttctcgaaagtatatagaatgaaatcttaatgccacggtaaccacataagctttacaaatagatccttttgattgagaataatttttgacatattttttgtacatagacattgctcgttcaattagatacatccacatgtactccactggtcccctaagaatcgcttctttagtaaaatgcatcactaggtgaaccattatgtcaaaaaatatcagtggaaaaatagttttcaatttgcaaagaatgtctagaatacttttctgcatgcactccaagtctccaacatttaatgtcttctaacaccgttttttaaaaatacttacagttcaattattgtatcccaaacttacttcttcaaaaaagtttgaataccgtccaacaacaaggattattaaaacacacggcggttgtgagacttcacttaagaaatcttgtccttattttcactcacattcttctctaaattggtgacaaatccgcctagaaactacatagacttgatattgttaggttttgtgccctaa

SEQ ID NO: 122718 - DNA, 533 bp, Cannabis sativa
aaaaaaaaaaaaaagttaaattgtttgaagaagaaaaaaatatttatccgacttaagagtttgttctttgacttgacctgaggtagcaaatttcaaatttgaaaagtttgttgggaacaattgaacagggttggatttcttcaaaacaaggcacataatcaaatttttgttttatttttagtttttttttcttcaccaaattagacttttattattaatatttctttatttcctttttttttactggtttttaatatattctattttagaaaaattattatagtaaaaaaaacatttttttaatttttatttatatttttaaatgatttttaaaattaaaaataaaaaaccaatcataaaatgtcacatgagtattgccttaacatacctacaaatatttcaaactcacaaaaagtatttttatcgcaactcaagtataacttaagggcatgtttactaatcaggattgggagtgataggtatggtaatcactcctttcatttgtttactttatttaatggttggaatactct

SEQ ID NO: 122719 - DNA, 1532 bp, Cannabis sativa
  modified_base (1467)..(1467): a, c, t, g, unknown or other
taaaataatttccaacaggaatgtcctcttttggaaataaagatggataatctctttattccaatcgccttcgtcattcaaaagcttgtgaatggtggtattgggagataatcccgggtgacgataaaggatggttccatttgtgcgggggatccacttatcttcccaaattcgaatggctcttccatttctaactctccaacgggctccttctctaatgatttgtcggccccatgtaagtcctttccaaatacaagaagctcccggagggcagttggcctgtaggaaagaggagttaggatagtagctatgtttcaaaactcgagccaaaagagaatggggtttatggatcaaccgccacccttgcttggctaaaagagcttgattgaattctgtcagacttcgaaagcctaaacccccttcttcttttggcttacaaagcttggcacaagtaccccaatgaatctttttattatcttttgtatcccccaccagaaattagcagccaaggagtgaaggctttgcattagcttttttgggaggcggaaacaactcattgaataacttgggatggctttggatcacggcctttatcaagatttctttgccggcttgggagaacatcgttgttttccaactctttagtttattccaaaccttgtctttaattacctcaaacacctctttcttccttttaccaataaaactaggcagccccaaatatttggtgtgttgagcaacaagtttaacccccaatcttctagcgagattttgacccattcggttggatatacagcttctcatacttacttctgatttttcgagattgatttgttaccccgagagccgagagtagcgatgcagaatttgcatcatagtatcacactcttcttcactgccatcaaggccaataatttgttttaattagtatattttttacactgtcaaagctcttagcctctcacattactttttaactttatcatttaaaataaattattaaaatttcatccttttaattttacattaaactttcacattcatttctgtattttttctctatattattaaaatatatatttattctataatattaatttatacacatataaaataaataaaataaacttagagcataaataatacttttctacacctaaaaaataaatactattcattgctttaaaaaattatgtaaaatacatgcatcaatgatcaatatatggtatattatatagaattaatgtaagtgctatatgtctctgttttaattctcttaagacatttattactaatcgagacttcttacaatgaagtttaaatgagcaaacataaggcagctaggcaagctagctttaagatatttataatactactagtgaaatgatactccccacgtaaactacttacaaaaataaattataaaatacaatatttgcctattatatctttatatctttatatatnaaaagtgcctatttaacggcatttcttggtttaacagaatatactttaaaaataaaagaatattc

SEQ ID NO: 122720 - DNA, 690 bp, Cannabis sativa
aaaaaaaaaaaaaaaaaccataccttgaaactacatcgagtaaacttctcattataaatccagagtcaccccaagcaagcatatcttgccttcccccagatatcaaagctgctaaacattctgttgcattctggtcaaattcatagcacaaaaattggatcaatataactagtatacatattgacaaaataactagtttcatatacaagattacctgcatttcactgtgatcatcactttgaagaactatccgaataatagcatcaaaacaaacatcataaactgcttttacgacatcaacagcagaattctgacagcaatccaaatttataattagcaaaattaaatatgattttcaaaagagagaaaaagaagaagaagaagaaaaaaataagaccatccttgcctttaataacattgtcacaagatccaatgacccggcaactaattcatcaggttgctgctggggctgacaatcatagaaaatgtatcagaaacaaatacataaccaactatcttcaataatgaaatgcattttatattacacagttatagccatacattatttaagattggccctatgtatggtagaattctggaaaccagtggatggatacaaccaggagcatttttcagtgcctgggaaaataatacaagaaaaaaaaaagaacatacgtaaaccaatatgca

SEQ ID NO: 122721 - DNA, 1706 bp, Cannabis sativa
cttcatcatcaatcattattgattaattatttatttatttaaatgggaatcgtatactgttgtagatggcggttgtgggtggtgagtttttgatatgggtggtttatgagcagagggtgaataaggagaaagaaaaaagaaagggaaaaaaagaaaaaaaaaataattttatgactatcattagtctcaagatgaagtttatgaatggtttctcgaggtttcaaagatctcgtggtggtgttccgatcgaaccctcgtggctgactgggttcatgaagaagatgaataagaaaaaaaaaataaaataaaataaatttatgattttaaaatgtttttttttagttttttattttatttaatttttttaattaaaattattatttggaccaattaaaatttgacatgtggcatttcatttgaatttaacggatccgttagaaaaaggaccaacagacaaacaaaaattgagaccttaggtattttcaccgccaatttttgaagttgaggactaatcggcatcaacctcaagtttttggggacttttgccgcaattatccctatcgaaaattaaaaaaatacccaaattacaccaaaaaactagatctcccgattttgaaaaacagcaaaacaaaaccaatgcaaataacaatacaaaaaattatttaaaaacacttacctattattttacgtgttctggccttccatggtggagtaacggcctgggcgttcttgggatggtggtgtggtcctcctctggcgtttgtggcgtcgtgatctctttggcgttcatggcatcgtggtctcttcgacgctcgtcatctctccaatggctaagtagagagagacaatagagagaaatagagaagagattgagaaagagagatatgagtgtttcctaaaaaaattaaaggacgagtaattttggtataccatcaataatatcggcataaaatgggatttattgacttcatctggcggactcgcaatgaaaaggtacacaatcattgtcctgctgatgtatttaaatgtattgactctgttcgctcttcttttgcagatcaccatgtttatttgctcccttgcactatttcacacttggaggacgtttggcggccccctccccaggattgggtgaagctgaattgtgatgtcagagtagggttggaaagcatgtgtgcagctgtagtcgcaagggatcatgttggcaaggtgatctgggttactatctctaagctggagttctctgacgctctttgcggggaagcggcggcttgctgtctagctctggagtcggcaagggatcgtggtttaaagtttattttgattgagagtgattcgagaatagtgatcaatgctcttaatgggaaagattcccgttgggagctcgacgactatgtctcattttatattagatcctctcatttttttgttggatgtatttttgaacatattagtcgacagtgtaattttgcggcccataatgtggctaacggggcgttttcccactagaggttcggttccttaccgattagctctatcccaaataaactcttttccagaaggtctaattgcttttatatatatttgcacgctttttttctaaaaaaaaaaatagctatattcaaaataaatagaaagtgtcgacaagatgttcactgtttgggaaggagtattttgtaaaatcattttttttcttttttgttttt

SEQ ID NO: 122722 - DNA, 1653 bp, Cannabis sativa
gagagagagagagagagaagctttttgacttttttttcttcacttttatagaacacatttatgaaacttgaagcagatcactcacacccagacccaagacccaaccactagagataactgtaagtggcctaaagtgttttgagtttataatagctttttatgcatatcaaagaaaaatttgaccaacatttttgcatagcaggtaatattggtaatattatctataatattataaaaacttaatcctgatttaaaccatatgtaaagaatgggacaaacctctccaatacgcgggctcacaaaatttaagtcttcttgcaacccttttaatggtggatcataagagtctataaattgaaccaacctgcaaaaaaaatgagagagagagagagagagagagagaattaaggtctcgtgattcaagtggggataagataccagagcaaactattgacataatgcaaatgctagtaaagcatagctcatgaaacaccaccgcatctaaactatattgttgcaatgacaaagaccttcgacattattgtgaaaacatgccatcacccatcatattaagagcatcaatgcatagttgtgtcaatttgtgaaaacatgtgctcttcattgcaagtataagaaataaggtttatcttctagtagaaaaagatcattgagctttcatatgacaaaaaaagcttaaaataattatacataattgtcattagtgcatatatttcatacagtagattaacaaaagctctactccctttctctttaaaaaaaattaaattaacacaagctctactgtaaataataattattgacagcagaccatcaggcaattgtaaataataattattgtaaacataaaagcaaaactgggcctaccgatgataaaaatcacaatctcgatcttctcttgacatggcatgcagaaggttgtacatttgtagcatcattttcctcggcaactatcataaacatattgtcaggtaaggtgaaagcacatcctgaaataatttcaacagcatgcacatacattctatatataatattaaaggggagagagagagtaaacaaaattttaatttcagttaccttctctgagaaaagattaacacgaacgaatgaacaaaagagatccataaacgcgtgcagtataagtgcattttgatggggctgcaaaatactgtgccaagttattagaggtatcatgtataatctacaattagttaattttcccaataattcacaaccaaaaacaaggcaatgatttatcattccttctaatattcgtattgcatatgtccattaacctatctttatggaacacaataatcaaaaggccccggaaaggcaacatatagatattgatttccatctacaagttaaatctaaatgaacaaattaataagtttttttttttttttgggaagcagagaaacaattttattcaaccacaaccaccaaactacaaagcaagctgccaagaacagcagacactaaaatgttaattaaagacaaaacatcagcttctcttttgctgagatgagaaaataaacaacccttaactctagccttgacaatcaacttgatctggttacttagcactttagcaaagctacaaacaaactcaaagatacatctatttctatt

SEQ ID NO: 122723 - DNA, 963 bp, Cannabis sativa
ttcataaattgtactctgtctcaacaaacaatttaatcttagtacataaacattaatgagctgaaagaggtttttgattgctatctaaattctaaaccaagcatggttcagttaataactagagtataaatccatttcatatggcatttcataaactggaaattaaattagagatatgtcaagcattttagatttagactatctccaatattaaataatatattactaaatttgggcaaaaaaaaaaaaaaaactagaattatatttgttgttattatactccaatccacaatacaattttaaaatacaaattagtacaaaaaaaaaaaaaaatgagaaaacacaaaattaaggctttatttttttttttttagaataggattcggttcatctactgcagtgcttaatacaccttggcttttgtctgaggccaacccttgtgtggtatctactcatcaggcactggtcaattgtaaagtgtcccaactcatgaagccagatagtagacaatgggacttagaacttattgaggacttgtttgatccccgtgatgttgagctcatctaacaggtgcctttgagtgttaatcttgcgagtgatagttggttttggaataaggatccaactggttttttcactgtcaaaagttcctataatcacttacagtcggtcaatggtagttggcactcctccatggaggatgatctttggaagacgctgtggaagattaaagcccctcctaaggttttatattttgcttgaaaagcccttttcaggttgtttgcgtacacgtactcaacttcatagtaaacatgttcctgtggatttacattgtgtgttgtgtaactgtggggaagaatcaatattccatgtcttggttcaatgctcctttgctcattcgtgttggctcagatctgcgtaaggtgttggtcattatgcagcaaccaatttttttgattggtt

SEQ ID NO: 122724 - DNA, 1851 bp, Cannabis sativa
ttgtttgtgcacaaagatggcacagatcggctacgatgaatctttgatgaaaaatagtttcttttacttgtgttataatctttagtgttgagggaccacatttgtacaagtcttctttagtgttttgagagtagagacttgtgccatctttttatgccaaaagatggcataggtcagccaggcattatggagaggctttcttgtataatcttgactttatagtcattttatacctaaataactcaagtccttaatgattttcttgtctgaatgaggtctctaggatgaaaatccttgtgtgggaccataaactctatgttgggcacacttgggtgtgtgttggtctcatcacaaaatggttggttagtattttcatgagcttcccagaggtgtcatggggccctcaagtaggatatcttaatttttttgacccttgtaagtcttggtcaaagtcgcaaggttgacttttttaacttctcaaaaattgagtataacagttccattaaaacattacccacatatataaatatatatttatatatatatatttataaacatatatgaagacataaattattagtttatataattataaaaaaaataatttaattcaattttattatattttttaaatatatttaatttaatttaaatttaaacttctatcatatttaaatttaaattctattctataaaacttaactttaaattctattatacttttaaataataataataataaataaataactataattcaattctatcattattttttaaatataaaaaatttaactcaaatttaaaattatatttagacttatattatattttttatatatattttcaaaattaataataaaaaaaataatctatttaacttttattatatttctttaatatataaatttagatgtatattatatatgtatatatttaacggtattagtttaacttgactttaaaataaaaaaaaaataaaataaaattattaaaccaataattttcgttaaataaccatactttgtattaaaagtttatctaatagatttttttttttctattattgtatttttgaactttgtaatcaattatctaacatcttaattaatatctaaataaattattttctaaattactaaattatattattatttataatttatttgggtgttgaaaacaaaaaaaaaaaaaaatatctctacaataataataacagtgataactaagcattttctatagatatattaatagagttgagaatcccattcactccaatatctttcttcttaagcttcaaaatctaatatgatatagttcgattagtagttaaattggaccagttaaattttaactcaacatttgatttttaatattaactaaaaataatttaaataaaaaaattataaaaattaaactatatgtaaattcttagagtttttttaagcatttcttttatcgtgtgtaataaaattcatgtaaaattaataaacaataagagaataaaattcaaatattgtttgattatataagaataaatataatatgtttttttaatatatattatatgtatgtaatttgatttgatcagtaaagtgtcactcaataaattaaccaatctaaataaaattcaattattcacacccaatctaattatgtatattcaattgtaattgtaatgcatctaattttttatatttagattgaattaaattagtttggatcattctcacccttagatactaatgaaatgaaataattttcattacattcctttgtttggttgcatttaaagtattggaatggcattctaatggaatgctcttttcaccattttggtggaatgactat

SEQ ID NO: 122725 - DNA, 3526 bp, Cannabis sativa
gcttgtaagtttaattttttcgtgtcgtatttagatttgtgtctttactcaggttagtttatttttcttaattatgctaacatgttttcctatatatacaagatggaattcaggttctaactttttaaattttttataattaatgaactgtgaaattatatatgtattttataattttaattacttttgtataatttttcaataaatatattacacataattatataaaaaaatatttatgatcattagaatttatgttgtgaaagaataacttaacctagttactatattaagattaccgaatttaccaaagtgtctattatcaatttcaacaacacaactcgaaaatcaagtaaatgactcaaaacaataccaaagagtctattatcaatttcaacgacacaactcgaaaatcaagtaaatgactcaaaacaaaggaggcagcaattcacaaatttcatctgcactaaaaatgaattccaaccgaatagtgtttgagttttctgaactaaggtaataattttctctatatttaaagatgtatcttataaataccagtttgcaatatggtaaacaatacaatctcttacaaaatcttgtaaatctatacccaagccaaccaagttccttggttagagctagacacaagatccccttgtgtaaatgctgagctcttcttcaacactcttcttcaatctgaaatcccttcagatctagtgatgaagacgtaactgaaatctcttcagtctaaactcaacactatcaagctctgatctgcaactatggattaacagctccaacttcaagattcagatctgcaaaaaaagtagaaagataacaaaagatactacactcgaatctaaccacacaatcaaaagagacgatatgaaagttagttcaaactttaacagtaacagctatacatacacacgagccaaacaagacttaatagaataacaaacacaaaaacagttgttaacactaatagacttaaaaaatgactgatgtggacactgatagaacaattatttctaatcacaacagactaacatgctagatataactggacataattggacataatctgacataaaaaaacttagaccttacaatctcgtccttgacagattatgttcaatgaccacaagacactatgacagttgccaaacattaccagtcacagttaaacactcaaaagataaccaacaacggaaatgataagaacataacataataattgtctttgcaacagattaacaaaatgaaacataaccaaattataagaattttaaacagatagagatttcttccccttcattgaacatgagctcaaggtgcatcattgctttctggctcctcctgagaaagtgctgctaaagaatttaggtgagaagcagtagcaactgtagaacgattggttaacactggaggttgattagttaccactaaaggaatgctagaatgaacctgagacacttgacttaagactggagcagaaatttaggctccccctgaacatgtgatgcattaccaaacccatctaaggatgcattaaacgattctcgatgaaactttggaagagatatatcaatggatggagtgaaaggatttctatactgattttcaaggatagtggtcttgataatctaaacctgtttgtacatagaggcctaaaaagccaactgacgcttttgatcctttttatatcttctcacaaatgatttaaattttgaatacatttggacctaccagcttgaattcgataaacctttgaacatagaagatttttcttttgacggtttggaagaggaaggagtaatagaggaagactttttgtgaaccacggtgaaaaaactcttgttgagaactggatttagaacttgataattatgagtcgttaatggaggttgggctgccataagcacttgttgaatgagactttggaaaaagaagtttgttccttgtaccagtgattttttagacttccatataatcctttcaaatatgagagatggcacatcaatggaagcatgagttcccatagcatagagaaatttcgcagtgtcaagagtgaccaaggacaaatgagagttagaaaaccaattgtacaatgtaacccaatgaagaaccctataaaatgaggttaaatgagtggctaaaatttcttgcttttcccaaagataaccatcccttccatttagcactctacccattatagtttgatttggattaaaatgcttcccataggttggattctttactaagttaaattttaatatgcgtgcaaggtagaagaaccaaaaggaatacgcttacctgtgagaaatgcactaacacaacatggattatcttcatctaacacagatctgtctaaatttgcataaaattcacgaatgaaaatgggatgtgatgtagacaaattagagacggtgtgaacccatgtcctaatccttaaaaaagcatgaaaatcaggaaaatcttccaaaacaatgatttttttcaaaccataaatcacgattaccaaaccaacattgataaacatatgcttttgagacatctacaaagcattgaatggatgatgggtcaacagtggagactaaggttttaggcaaagctttctttttggatttcgtagacaaaggtttgggaaatggatcattagatgagtagagacaggtttgattttggtctttttgggagagggttgataagtgggatcattggaggattttctttcaggcacattggttttggagaagatgactgaactttttctttgcctttggatagaacagagacttgtaaaggacatggtggtcctatgggtttaaatttagggttactaactagttcaacggttgacacaggtgacatagatcacttgtagatgaacgaatgacatgtttcgttgatggcttagaaagataagtggagatagaaccctttttagaaaaaacgaggagccttaccttgaaaagttcaaggcttttgaccgaccaggggtcacgaaggagactgaggaggtaaaggagatgccaacacagtaggacaataatcaacatttgataagggatgatagccaaacatggagaaggctcactgaaaaacccctcaattgtgccaatcgtgattcctaaggaaatatggggctcaagtggcggaggaatcaaagctttagaagaagtcaatggcgtaatgacattctccatgattgactgaggcatatacaccttcaaaagctcaaaagagttgaaattttcaaaggttagggttttgtggaagaaaagtgaagtgaaaaacgattcactaccctttggcttataaacgagaagaacccaaataatattgactatgcgaacaaaaaaaatgttatttttaaaataaactttgcaaaactgagtagtacaagcccaaacaacgtatttttcacctcaattatggcatatatacaaattaaaaacatatggacatgagttaacgtgatcataattaatcaatgaatgtaaatattgttgggttttatgcc

SEQ ID NO: 122726 - DNA, 1217 bp, Cannabis sativa
actttcttgaagatttactagctccttgtttattttaaagattaggtaacttagtatgagggattcttcaaactattttgttttgttgtcccactttttgtgactttgttatgaaatataggtttaattctgttggtatgtaattggagctttattatcttgctgctcagctagatatcttcttgaaacaataacattatcaagagaagagaggacaaagtgaattaaaacgacatcacaattgacaatatttcaattaaaacgacagttaatcgtaggaccacaatattaatatttcaattatggtgaggtgatagctgataatttcttcaaaggacaaattttaaccaaagacaaaccatcacctatttttttataaatattaataagcaaaagtatgtagttgttacatcatgtttaatgttcatagcataaattacttattattaattaaggcaacattttttgaatagagaaggtggttgaggaaggtatgtggtaggagagatatgatgaagcaaagcaaggagtgagaccagtaaggagaacaagatttctcataacctatgcttcttacacttgctttgctgtacttttctgagcttggtacaaataagcttgcttcaaactttgtcatctttgttgccacatatgctggaacctgcatatagtagttatactaaactttatttatgattatacaaaagtgaaagttaaagattttgtatagatgtttaaatcaatttaattcaataataataataaaaatctgaaacccacaacttgttcaaatcctcactataaacagatgagttcggtattgctattctcacacctgaaaccctcacgtattttgaatgtttcatatagtgctgtatatacgggctgaaatttttgacacgacacgaaattggtacgagctcggaaggtacgagcacgactaggcacgaaaaaatatagatttgggcacgaaaaatacaaaagacacgacatgtaagcacgaataaagtaatccaaaaaacacgatacatgacaaaaaaaattataatttaataattttaatattaataagataaatatggatttatcaattataaataggttaaaataataaaaaaaattaaatataatattaaatattatcattctataattaaaactattacaacatgaaaaattaaaattatatattaatttattgagtgtgatataaaaat

SEQ ID NO: 122727 - DNA, 926 bp, Cannabis sativa
  modified_base (37)..(44): a, c, t, g, unknown or other
aaaatattcatttatcagaaaatcaattatttatttnnnnnnnnaaatagaaaatcatttccttaattagaaaataacttccatatataaaatattctaatatttataacatttggaagaatcataaaaatattgtttgttttattgaatgggaaattatatattaaaaattaatattttattaaattttgggaaaatgtttttttttttcatttctttctctattttttccctaaaaattcttgaaataaaaaaaaaaaaaaggatacattaaatacattatcatttgtaagggtaaaaatttcaaataaatctttatctaacttaatgagccataaactataaggaaattttcatgaggtacctaaatttggaaattatttacaaaaataactttatttttgtgagtaaaagggatttttacatatcatacctttttttatttctatcttaatatcaaatataccttattcaatctaataagctatatctttgtcttttatacatatttaataacctttttttttttcatatatagtatttgaaattttcttttttcctctttttctcactctctctttttattttatattttcttttacgtttagcctacttttctttcttttttttatgccttcaccccatgataattttttttttacttatttgttcttcttatttttttaatcattcaaatttttatatttcttttctcacattttaaaaaaaatatttctgatcacattactacttagttgaatttaaaaatgattgttataatctactcttcaatatggttattcttttttattaccaaaataataaaaaaaaattgctcataataccaataaaattttatttttatttaagttaacaacttaagtttatttttaaaatttaattcattggacaactaattagtttct

SEQ ID NO: 122728 - DNA, 1283 bp, Cannabis sativa
  modified_base (1231)..(1238): a, c, t, g, unknown or other
aaaaaaaaatgaagaagccgatgatcaaaatgaagaagaacacgaagatgagaatgatgaagaatagcaaattcaaaatatattgataataacgagggagtgggttagagagtggtaactggcaggagaagtgattgaaatttgacagattggagggaaacgtgtagacagttaagtgacataagcaaaaaccgtatatgatgtaaaattttaaatagtaaccgtataaatctttaagcaaaatggtaaaaataaaaaatgaaactatagaaccgtaaaaatgtttataaacagaaaaaaaaatagcattttctgtaaaaattccaaaagattaatacaaatgtatgacataaaagtaatttgattatatcttttttccaccaaagaataagaagaaaataacttgtaccacttgtagtttaaatttttatctgggattactgagctacaagttaaggtagcgtttgattggaagtaatgaaagaaataagttttatttatttattttttttatttggttgcattttaaaatggaaagaattactaaaaattaattttaatgatttttttttaaagaattttaatgaattttttatcaattgtttttattttttatgttgttactagtcaaagagtaatatttttggcttattttttatagaaattgtgttgattttttagtttttaataacatcgagctagtgatatgggttatgtattaaattcttagtttgttttattaattttattttgaagattgttattctaatataaatgtgtttgttaatttggtttggtatatattgcgatgtttttgttttgtttttgtttttttttttttttcagttttgctagttttgacgacaaatgggaatatattatagggtgatgttttaaaatgttatagctttattgtctaaatttttggagacagttttattctatgtgcctcgcgataagtattatgcaactcatggtttggtaaaatatgtccttcggttagagttatcttggtttgagaaggttccactaccgattgtagtttgctacattgttaatcatgtgtgactttgttcatcaagtaaaaacaaataccacctaataatatcatggtgatacaaacataagaatgtttgtggcaatgcaactcaaactttacccactgctatactttactacctatttttttttttttttgaggaaattacacttagtatgggattttaaaagnnnnnnnnataaatatggcacatttaagtttggccaatttatatggtattttt

SEQ ID NO: 122729 - DNA, 886 bp, Cannabis sativa
cttgaagcggggacgttacaggcttcttcgagtttgataaagccatcagctctatcaaggaactccttcatgttgttggtcgagatccttcagatgtccttctagaagttactcaatgggagtatgcccctctgtattgtcgtatatcaccctcttctgtaggcctttaacttaggtagcctctgtcatgaacgtctggatgtaatcctttaaaggttctccttgttgttacttgacttttacaagatcttctagctacaatggtacaagccccaacgacgagaattgtgtgtaaaattctcgagggaactcggtcaaagagttgaatctttctggggtgagtttgaagtagcattgttgagctatttccaaaaaagtggttgggaatatgcgacatcgcacatcactagtaaccttctggagatcaagttgcatctcgaagtatttcatgtgtgccaatgggtccatgcctccggtatacatcttctataccgacatcttgaaattgggctagggcaaggaatttatgtatgccaagaatagtgatccccttgaccggtctagttaaagatctgaaggctttagacctgctatgccttgaatcatgtccctgagtttgtccaactgtggctgcacataaggattttttgctattgggacttcactgactggccctccttggaggggttgcacattttggtgtgatagggtctggctgaccatactctgagagagtgcatagtggaggtcagtcagacctgtgttattttgtagaccctggccggccactcccaagtatgggtgctggccttggccggcaaggcttggactaggtgttaggttttatgccctaaataaaactctttaaaatctgattagttatcaa

SEQ ID NO: 122730 - DNA, 780 bp, Cannabis sativa
atgagttttgaggataaattttaactaaatgcaagtatacaaattcaaatttccctaatatatacataaatataaaatttaataataacaatacaagtcatttaatgtaaaagatcatattaattaaaatttaataataaatattaaaaataacataattataaatataaaaacataacatttattgtgatgtaaattttacatcatgttaaattgtaatttaaatttaaatcatttttttattatgtgacatatttacatcataatttggtatactattgaaatagattttaataaaaaaaaaattatattttgcatttaaatcatttatttacatctaagatgttcctataacacattagagtaatgataataaagatatcgacacttttattttcctctcaaattacacattataatgtgtaattagtttgaattaaatgtatattgttaagtggagtatcatatttaagaggctaattgattgtgtatttgataattcatgctaattggtataggtggacctacatcagagagagtttaagcccaccctcaaatttcagaatagattatataaaattaaacatagaaacaatatataattgttgcacaatataatttgtgtaggtgtttattcgttacttgatagacttagttttgaatctaattcccctcaattttatcttttatttttatttaatagaataattagcttttttagtccctgtacttatgacactatactatgatgccccttaatttataagtgtagttaaaaat

SEQ ID NO: 122731 - DNA, 863 bp, Cannabis sativa
  modified_base (26)..(33): a, c, t, g, unknown or other
ttatcagaaaatcaattatttatttnnnnnnnnaaatagaaaatcatttccttaattagaaaataacttccatatataaaatattctaataaccaccactaagcaattctaaaatatcatggagtgtcgttgtattgaaattgttcccacggagatacaattctttaagggtgcaaagattccccaatgattttggtattccaccttcaaatccattatcaatgaaataaattttctcaagatttctcatattttcaaaagagtttggaagaggacctctgatgttataagtaccaaatatggccagtccaacaagattggtactcaaattgagcatccaaggaaatgttgtaggatggatggtattgaattcgagagagagataagtgagagaatttgaagagtttttattggaaagagacaacatatcaacttgcggaagttgacatgaatctaaatacaaacttgataaggaatgagctgttttaattgattgaaaccaatctgtggctttgcttaaatcaatgtcacctaaacgaacatctttgagaaaaggaagactagaaagccatttaagattgtgagcttccaaatgaccatcataactcccactaagatccaagtgccttagttgtttcaattcaaccaaagaggaaccaatttcaccattcaaataagagagactaagttcaataatatgatgagttaagttatcacacctgattccattccaatcacagcaatctggtcgggtgttggtccaggaggataacttattgcctttatctgttagagatattattacaatggaagaaaatcaaaatattacaactctattgtaatacaatacaaggaccaacaaa

SEQ ID NO: 122732 - DNA, 512 bp, Cannabis sativa
gacattattgctcgaaattcttatgcatttttttgccaaattgattcatatcattttattatcagtgagaataataaggtggctcattctttaacaaaacttagtctattagatgattatatttttatttcaccattaatattcttaatcagtgtattattactcatcttgttcataaggatccttgagctaggttaagaattaccttttaagatactttttttaaagctctagaatttgattgtatttttttttctttttctaggaattaaattgccaaacaacaaaaaaaatcataaaaaaagagcatttatactaaaaaaacccaaaaataataaaatttcatattgttgtgacaggtaataaggtagctttagactatggacattttgagagcatttgagagtgacattactatctctttgagattggtaggtttagaatattttacttcactaacattaagctatatatatatactagcaaaaaactacgtgcgaggcacgtatact

SEQ ID NO: 122733 - DNA, 555 bp, Cannabis sativa
gatttcaacaaaacagagcattttcttttgtaaaatttgtaacatatatagattaaaatttaagtgcatacttaactaaatattttctgctgagataacattaatggtaccttttaaaatgagaaatcttctttggtgattaggagtagaggtgggcattctatttaattcaacattttttttctaattcgattcaatctaattagtaattaaatttgaaaaattattgtccgatccaatcctgattttaacattcataaattatctaaaatttcttgaaaatttacataaaacacatgatactaaatgagtacggaccctaaaaacaatcactatgaaagtgatacctgcatattactcagatattgaacattgtaaagagatagacaaaatgagctacaacttgtaacaatatcttattatttcgacattttaatcgtcacagccactgaaaattattttgtgagaaacgaaagcgaagatgatgacatggagcttccattattcaacataaacgcaattagtactgccactaataatttttcagaggctaat

SEQ ID NO: 122734 - DNA, 2431 bp, Cannabis sativa
ccaaactaaaaaaaaatctaaaaatcacttaggggtattttggtcacttctaaaatctcgactattcccgacatttccaaccgctatactcaaaaaaactgagatgtgattctaatatccaaacattgcgttccaacgttaccgggtacaaaacatgcaaaaatttgaattttcatatataacatataaaatgcattttgaattcaaataaatctccataaaataataattcataaccaatatgcaagtttcataatcaaacctaactacctgctaatttctaaattaaagttaagcggtctttacatttcctctgtttggcgctgcccgtgctgaatgctaactctggcgaacccacaatatacgcttctatttctctctttagttttagtgtctctttgcaaaccccatcttgtttcttagggaagaacaccagagctaatgacaatggtggagactaagatcaatatttgttgcgctgttggagaagaactggtacagatctgtctctctcatatatttgtatgctatgttcgactggtatggatcttggattagttctttatcaaatctatcaatgtgtatttttttattctttttgtcttcaatgtctaagcattgagctgttggagcttgttctctgtttgtttttgggtttttgttgaaatgttgttagtatttttaaattggcttctaaatctcatgtactgttaaattcaaatatgagattaatttgaagttttatgttgttttttttttgagtatttatataaatatatgtatatataaattgattcttgaatgttggctgttcttgtagccctccattcaacaggttttcagtcacaccctttcccaacctaatctgaagatgaagatgcattgggcaagaccaagttgaagatggtgtcaattgaattttttgtttctggaggctgttaatttttttttatgaaatgtagaatatttccattgtctttttagaattggggctcattttttgttgtatgatttgctcataattcgttcatttaatgaatttttttacattaattttttattaaatttatagttaaactaaaatatattaattcataattaatatatgtggttaattaaaatattatgaaaatataattaattaaatgattattgtaaattttataatatataagctaaaattaggaaattaacattttttattgaaaaaggaaggatatagtgacactttgagtgtagttgttatcagaaaaataattagaataaataaataaactaatatagtgacacgttttttgtgtagctattacgtttacagtctatcaaggtgtgactctaaaagcttatagtgacgtacagtgagcaactctaaaagggattagtgacccacactgaagggtcactaaatagtatttttctagtcacccacattagtgacgcgcattgaagtgtcactaaaaaattttagagtctctcaatgttgttcactaaagatcgtttttgtagtagtgactactagtgctacccccactaaattgttgtcattgggaccactaccattgattcttcttggtcatttttcggttatttcattttctacttgtgatcatcttctcattctcttctacatgagccttagttcacaaggcagttgtcacacactcagtcagcttgttaaaggccaaaggggctgttggaccatgtatcgcaggcctcaaacgacatatgaactatttaataaccaagcgttggtcaaatatactaggacaggcataagatgatagctatacaaacttcatgtaagactcattcacagtcatatccgcttgttttaagcaatcaaatactccaataagaaccctcctgtgagatagactaaaatattgttccctaaaaactctctcaaaatctcaccaagtcatccatcagtctccattgtctaggacaaagtctcccaccaatctgttataccaccctctaacttgaacacaaaaaaagcaacttgatattcctcaggtgctcctattgtgtggaaatttttctttatctgcctcaaccaccttttagctaccatggaatcttgtccaacctcaaactcatgcacttggatccgatgaaatatctaaaaatgatgactctatcgagtggaaagatccatctatgtagcgggaactgctcttaatgcttcaagaagagcgttcgtagggaattaagcttgtggatgttggacattaattggaggggaatcttctccaactgttctccttgtcttttttccttctggaggtattttcttaggtttgagaatcaaaagctactcagttagtgacgattggatgcaaataatataaatatgcaattacatataaatatgaagatacttattactattattacttaaaataaaaaatctaaactacttggtgacaca

SEQ ID NO: 122735 - DNA, 1345 bp, Cannabis sativa
  modified_base (1239)..(1244): a, c, t, g, unknown or other
ctctctctctctctcttcatctcacacacatacaccattacaggtgtatgtgagattgaacaacattgtctcattatagtatctcatgagttgagtacacactgtaatacctaattaattcatccaaataagatctaatagcccactctattcctgagtgttgagggtttcttggaagattaaggtgtgaattcttcaacaaaatttcttggattggatgatcgttagttgtactaaaagagagcaagggtaccctgatagtcttcaagaggtattgttttcttttcattggtttatatttaatctatatatattatgttgagatctttgagcttatggttcatattggataaaaactatttttaacaaatttgcttttgcttttctaactttgatatggaccataaaaactaacactatttgagtagtcttcttgagaattatggcttttgcaatacttgctggagtgaatgattattgaataccttgatcaaatgagagtgtaagtagggtcgtagcttttgagatgctattagtaaatagaggtcaacttctctatcaaaggatatcagacttttgcccctattatcctcttgctaatgtaataaacaagatgttgggattttgcttcctcacggaccaagaccgcgctgactgcattctcagagacacccaaataaaggtacaggtcctctccttgcactggtttggacaaaatcagaggcttggccatgtgctcttttagttttttaagtgcttcctcgcattcttgagtccacttgaatgtttgacatttctttaaaatattaaagaacgagatatacttgtcagtggacttagagatgaaatggctcaaggcagttatttttcccgtcaagctctgtacatccttatgcttatgggagaaggcatatctagcaaagcttgtatctttctgggattagcctctacttctcgttggctgactatgaatcccatgaacttgcttgattttactccaaaagtacacttatttggattgagcttcatcccgtactttctcactctttgaaacattctttgagatcatcggaatggttcccaatggtcttggacttgacaagcatgccatccacgtaaacctccatatttcttcctagctggtttttgaatatctggttaaccaaccattggtaagttgctcctgcattctttagcccaaaaggcataactaggtagtaattgttgggttttgtgccnnnnnnaaaacccatttcaatataatcaaacttactaattaatataagatcaaaaatcgcttttatgttgcatggtttacataatttatttcataattatgtttaat

SEQ ID NO: 122736 - DNA, 1968 bp, Cannabis sativa
atatcataaaaattgtcatatcttacaaatattagttattatttgtttagaaaattttttttaaccaaatgtaagcataaaaaatcaaatttccctatatatgtataaaaaaaaaatataattagttgctcttttatgcatatgatcaatgatatataaagagggtatgtatttaagtcatctacttatttcaatattaaaattatccatatctaaaattaaccaaaaataaaaggaaaagacaaaaaaagaaaagcattcattctcagaaataaaatactttatttttttcttttaacatgtattatatatatatagatgtaaggaacttatgtatatataaataatgaatgaatgattaaatatagtataaattattttccacattttctgcatatatatacctaagcatcataggtcactttctcaactcattttaattttttcttgttgttgtatatatgttggttgtatttggaagatgaattagtacatacgtatgtgtcaccatgtttgtggctacttcaattctctctcactctcttctaaaagtattgacaaagaaagtatatatgcacaaccccactttctcatctccttattgaagaaatattctcacccttaatattaattcaaccaacacataagtctagggttgagaaaactaacattaactttttatccacacaatgaaagagacttagtacttaatttacttaatataaaagagggtttgaagtgttgaactttatataattaaataaaaccaaatattaattagggtttaatttttaattccttatatgatatatatctaaatctatatcgaaattaaccaagaacaaatatctttatcagaatgaaagttccaggtttgaacacatatgtactagtcatagagtttggactaggtggactaggtgggtctatatatcttgggaccaagtttattatgtaataaccgtactttatacattatactcaaaagtctagctaatagctataatatacacctatatatatgtacatatatcaatatcaatttagcctgcccactattttgaaaaaacaaaaagctgtaagaaacaatacagatatttttagagaaagtatacccgtcttcaattattgtactgtaaattatataattttagttatctttactatatatataatttttatttttttttatctttaatttgttgtttatatgtagaaggtatacttacaaaaagatacccgatcaatgctcattgaactattactttactagctcaatcaaactagaaaaaatgaattggataagtatgaaactaaaaagtactaaagagagattcacacacacatatatatatatatatatatgtatatgtatgtgtcatgtgttagggaaaaaccaaaaaaaaaaaaatgtgagcactaccatgtagtacatatttgactaactaggcttatcataaaccatgcgcattcaagcaaagaacaaaatagaaagttaggttagaatgcaattcatctcaaaaagagaaacatgttaaaaatgtactgatgttataaccaagtactacttctacttaattaattattgcgcctaaaggctaaaattcatattagtttaagctgaacaaatatatgtatgtacataataaattgtatgaatgattaaaattatgaaatttatttattaattagctatatatctagctaaaatggaatttcaaccatgtacggcattattaatgtagaatgagaaattagtaccattatatataaattatgcttatatttatataatagaactcccacattaacaaattgtaagaatatatacaatataaactcttttcattgtcaatacattttacatggcgaacctcatacattttactatacaccttatcttatatctatacatatgtaaggataaaaatgcatttatgaccatacttttaaactaggacgtaatta

SEQ ID NO: 122737 - DNA, 1766 bp, Cannabis sativa
taatccaatcttgtccagtccagtccaatccttttcaatccaatccagtccaatcctgcgtaccaaacgggcccaagaagtattattagtgctaggtgttattacaattaagtattgagtctcatataacttaagaaaataacttttaagaatatcgctaaccaatcgtaaaacactatctataaaaggtacttaataacaatattttatttgaattcctattaataattaaaagggtaaaggggtagataactgagagggttagagcatatatctctaatagtaatattttttaaatacgttaaaaatttatatattatctaaaaagataatattttattttatttttcttccatataatctttgacactattatttcttaaaacactcaaatggtataatacttttcaaaaataatataattatgatttctcgcattattatttaatatattatttattttgattataaatattgtcagactacttatttacttttaatttttttatttttttttagcatcaatgacatatagtaacatcaatacaatgttttataatagcacctatttatttttaatggtatgttagaagtctcacattgataatgtgtggaaagataatagaatatataagatccataaactgctcttctcatagccaatcagttttgagatggaaccctatgcatcttacaattttaacatgttattagagcaaaagaaacaaaaaaaatctctaacactaactgacccaaaaaacaagaaggagccaccaaaagtccaaaatgtagagctaaaaaaaagagccactataaatctaaaaaataccgatccaaagtagagcaaagagtcacttgtgattagagatagtgttagagatagtgagcaaaaaaaaagtcatttatgaagtcatttatgatgtcatttatgatcgagttgtccaagatggtgagcaaataaaatagctactatattgagaccatatattgagggaggatgttagagagattcacattactaatgttaggaaaaataataaaatatataagatccacgagctattctttttatagccaattaattttaagatagaacctcatgtttcttaatagtatagcatctttatgttttgtcaaataagtaatccacttaaataagtatcttccaaaatttaactattggaaatgatcttatggttgttacctctttaactgatttgtctaaatttaattggctagattgagaataaatcaggctatgtggacatagaatctgctttgggtcatgctaaaccaaaaattaatattgatgcattaatgtcatatactcatatttttcctttttccttttcttctaatatattaaaaaaaataatatattaaataataatgcatatgttaactaatttgagaaatgcttactattagaatactttttgaagtaagagtatcttaaatagagttccacaaaagtattctcttgctatattttagtatactaagtgtcaaaaaataacattaaaaaaaataaaataaaatattatattttttttgataatatagagatttttaatatttttaaaaagtgctgtattagagatgttcttaagcaccttaagatacctaacatcatattgatgtggcgcattataaatagttagcaatttctatattatttattaaatcaaaatatgtagaactcaatattaaatagcacaaataagagtatatcacatcttgtagcgcttaacacttgaaggttcact

SEQ ID NO: 122738 - DNA, 1011 bp, Cannabis sativa
ttagaataaaaaaacacaaaaatagtcatatagaaggaagtataaatatatttatagcatctatcttctacacacatgtatggaaccaccacatcaactcgagaatacttgaaaaacaaccattaattctggcaagatggagcacgaacagtgtaattgatgtcaaataaataaatcatggcaaaacaatcgtaaaacaacactaaaacaaatcaaaaaaataacaaaagaaagaaaaaaagactaaaaaaaaaaaactaaccatcttttacacagcttcaatctaaatgcaacaacaagtatatttgttagaatagttctgaaaaattaaaataaaaaaacactcttacttttccccaaaagcatgactaaaaattagaaaaattaaaaaaaatgaaagaattgaataagaaataaaataaaaaactcatatattaacgagagagagacccatgaagaagaaaaagaaaaagcataagaagatgatgatgatgaacatagagagagaaagaataagaaatatgataatctattgaaataagaagaagtgttgggtctcatctttaacatcattaatcatctttaacatcattaattttttaaaaaaataaaaaataaataaataaaaacacttctcacatgatgacaacataaatcaatcaatcaaattaaaactttatacatatttttatttttatattattaattttaaataaaaaaatgaaaaagaaataaataatacttaaaaaagcatttaaaaaaattagaagtgtcactaaaagtgacaagtcactatcaaaaatttaaatataaaaaattttaaaaaatggcagtgcactattgtataaagtattaaaattatacaatataaatataatttataccgcataatagtataaaagtaaaaagtaagcaaaagataataccctgtgtagtttttccaattctttatttaataagtcctgtgccaatatagcagtgatagtattgggaactttttttttttttttt

SEQ ID NO: 122739 - DNA, 3144 bp, Cannabis sativa
atgactgtccaactggtaataatgctgcatatgacaaaaaaaaaatattaagataacatggtaataattacatttattaatttagatataaatttcaaaatatttaccttaagtttggttatgatgaggtgttcgtactgctccaagacatttgctcaacttgaataatgttcaggcacatgcaatgtaatctctcgccctatcaaacgaggaaaagttttactctccaaccctactagcttgtttgagacattgtcaacttctaatggcagcgggacaccagctttttttcttctctcttctaaatttaccaaaatattcctcccacggcctttcctcgattcaccacctatgttgccatcgaaaatgtatatgtatgaatatttgaattaacaaattaaacacttaaatagaaaaataacaaaaataccataagactcgcacgcagcaggtaccctagtaggatctaactagtcatccccattgccatctccaccatgataactagcaatatctgctgatattttatgctaaaaagggaataataaaatcacatgagcccttacttaagagaatgcaaacaacccattaactattaaataataataatacaatgataattctttgaaacaaaatgaaagaaaaataactagtcatcaatacaaacaatattaaaatccattattcacaatcatcatcactaatgaaatattaatttgttacgggcgcatcttgtatttcatcttcaagatgatcaacaagcacatcatcatccacgtcttctaaaatttcttcatcttcgtcatccctactatcatcaacatttgcaaccatctcaaaactttgagaaacatctacaattcttggtggctcattagttcgttgcacaattaactcccccaaatcaactgacaaagcaaaatttgatgagtttgtgtcattaacaatatcaacatcatcagtcttattagaagcatccaaagtattttcccaaatttggcggtgatggatattatgaacaactctccaattttgacctttaactagatcattcacaaagaaaacttgcttagcttgattggtaagaatgtacgggtcatctttgtaccatacaccactaacatttatgctagtgatactatttttggtaatgattttttcctttctcggatctatgttgaaccatttatattgaaataatactactgaatatgcaccactaaaggacaaatataatatttcttcaagttcctcataatagtcaaaaccttctgtccctgcaacggacaccccactgttttgagtattgcaatctttaactagactgtgtacaacaaatcaaacctcattaactatacatgcatatgaatacacaatgagatcagacccatatgctaaaactaccaattcatcactatattttaatgacctaagcttatactaatcaaaaatctaaaaaaagacgcataataatcaagatttgagagatttgacaatttggagtaagtaaataatatggaaatgaatacttgcacaccttcttatgaaaccacgaaagttttttgtgtaaaagattatggttagcattctaatatgtaccactcctcagctctttttttgcgagtcttcttctcgtcgagagttgttattgtttgcttaccaagtggactacattgagatttgaaaactattaaatatcgagatagaagaggaccatcttcattgtgctcaggacagttgaattttgtatgcaaacctttgaaacacatggaacaaaatgtcaaaacctcatctataacggatccttcagcaatagatccttccggccgtgctttattcctaacataatttttcaactttttcatgtacctctcaaatgggtacatccatgtcataaaaactagcccacccaatatggcttcctcaggcaaatgtatcaccaaatgtatcatgatatcaaaaaatattggaggataaatcctctccattttgcacaaaatgtgaatgaggtttccttgggccttctccatgtcctttgcattcaatgtcctagagcataaaattctgaaaaaattacacaattctattatgatgcttgatacttccttcgaaaaaaacttaccaatacaaactggaggtaacctttgcattatgacatgacaatcatgagatttcaatccaacaatattattatcagttactttcttcttcaagttcgaaaataattcatctgcaatttaacttccttcagaaatttacaaaacacttgcttataatcagcagtcaacatataaggggcatggggtttcagcaaccttttgtgagcatcttcgaaaatccataaggtttgacgaactctcatattttttaaatcttttcttgcattagtagtgtctttagacttgcattatccaagagggtgccaaggatactatcacaaacatttttctcaacataaataacatttatgttgtgttttaactcatttgtactccaacactagagttcataaaatatactttttttcctccagttagtttcagtgtcacctcttttttgtatccttggagcttgttgtgatagagcatttacttgttctaatatttcagaataagtaaatcatcttggaggaagtctcttctcaacattttcatcaaattcacggtcctttctcatacgatgattggatgttgaaaaacgtctatggccaacacaagatgtcttaccaatcattcgcatggcactagtatcctcgttgcatgtaggacaggctttatatccatgtccactccatccagagaagctactacagacaggaaaatcattaagtgtccaaagaagagttgcgcgcatcttgaacattgagttgcttgtaacatctcttatttcaacaccataagtctacaattcgttcagctcgtccaccaatggccttaaaaatacatccatgtccttaccaagtgacttaggtcctggaataaggagagtcaacatgaaattattatccttcatacacatccaaggtggcaaattgtaattcaccaacactacaagccacatactgtatgataggctcatgttctcgaaaggattaaatccattagcagctaagcctaggcgaacattccgaggatctcttgcaaa

SEQ ID NO: 122740 - DNA, 1711 bp, Cannabis sativa
gacccagacctaggcctaggccaaaatcaaaactcgagatccagacccagacccaaatccgtactcaaacccagaccaagacctgtagccgaactcaggacctgaacccagacccgaacctaaactcggacttggaaaaggacttagaccacgatccagaccttgacctgaacatggagttgaaccgaaaccctgaatcgaaattggaattaaaacttgagaaggactgggaccaggacccagacgtggaactataaatgaaatgaaacctgaaccctgaaccctaaccccgatcataacctgaatcgggacctagacccaaccaagatttgggatcgagacacgaactcggaccgggacccaaacccaaaccaagagctggacccgaacttagagcaagacctagacttggacccgagacccaaacttgggactaggacttcgacttggaccctaacccaaacctggagtaagaattcagtcccggacccagactagaccggacttgatacctaggatgcgaactggatggggcacctaaacccaggagccaagccttagatctgggacagtgacttgggccccaaaactgggatgaagacttgagaccacgatctgggtcctagacccctggcttggacctgactcgtagttagtgtttagatttaggacccagagctagacctaaacccggacctgcacctggacccagacccggaccaagaccagactcgaacctagacccatacctgaacctgtatcccatgacccgagactagaaccaaaactagaagcggactcggacttaggtggggacttggacccagacccgaaccaaactaggaactggactcagaccaggacctagcacccgagctcgaacttagacctggaccaaacctaagttctggtcctggatgggggacccatactcgaacttaggacccagaccaagacctgatacccaaaatggaactagactgggacccgagactatgattgggatctagacctggggcttggacccgagtcgtggtcggtgtctagatttgggacctgaactagtacttgaacctagacttggaccaccaccaggacctggtcccgaacccgtaccccatgacccaatactaaaaccgaaaccggaagcaaactaggacaagaacccagacccaaactcaaaactagaactagacaaggactgaaactcacacgcggaaccagacccgaactgggacacagacccagattgggagttagcacacgaacctaaaccaagacttggactcggacctggacctagatccatgactcggacctagatttgggacccaaactggtactcgggacccaaactagaaccaggctaggattcagatctcgatccaagacccgagacacggagcttgaacccaacctttagttggtgtctaaatttgggaatccttataggacctagatccggacctagatctagacctaggacccaaaacttgaactggaatcggaactggaactgggatccaagaatggaaacgagaccaagactcggactcggaactagacccaaccctagacccaaaccggtatcggtaccaagaccaggattaccaactcaaccccaaacccagacccaaacctaagacccaaaacgggatccatgacctgaaatacaaccggactgagattcagatctagacccgagtctgag

SEQ ID NO: 122741 - DNA, 1000 bp, Cannabis sativa
ttttttcttttcaagtaatacttgtagttgtatatttgtgtatattgaagacatgctgatccatatttaacaattttgaagtgtgaaaacccataatgtcttttaatatgattaaactattttattactttggtttttcgaactttcttattcttcctgttcttctttttgtttttagagtggtaagaatttcttgattcgtttacaaatctccttgttcttttcaaaatgtgaaaagtctaggaatgaaatacataaattgaatttttctgaaacagataaaaaaaaacatattttctgatccaacggagattaggcagttgtgggtgctgacatgtagataaggtttggctcaattttacttttttacaaatgggggactatttactcgagactagaaaaggttagttttcatttctcaaatgttttgaagcgcaagattaatgttttttttaatcaacgagaacattagtttgtagctgctcgtcattttcaagtatattatctaattaggctctttgttttagttttttgtttattttttggctatgaaggctctatctttgttgctactgactttcgatgtctgtaggtattttgaagcaatatgttctacttactaaagataacaagcccatatgtcggacacgatgtagtaacccacctttccaactgtatgatttatttctttcatgttcacatcacttttttcatccgtgcacttctgtcttcttttacaagttatggttactgcctttgaagtgttactatatttcatttccttaaaaattattttgaaaagtatttatgttgacgtatgtcttttgtcagtataaatgaattgacttccctacttggttttatgttgccattttctgttttcccaccctgaagaaagtacaaagacaaccttcccatttgaaatggcagataatagatggaacattgtgtagctaaactgtaaaagctgttttcttatacatattgaaattaatgaaaa

SEQ ID NO: 122742 - DNA, 1757 bp, Cannabis sativa
aaaatttaattatccacacttttagtataattacatcttatataattattggtattttaaataaagtgcacacacgtggcgtccctgctggacagggcgttacagtaacaatcttaaaatccctcccatctcctatttgtgaacctggagacataaactccattggagtggtcttcaaatcagacgacccaaaatcaacaaaaggagatttcaatgtcgaggcacgctttctcttgtccacaagaggagtataagcaacagtgtcatcctcttcttctttagaaacattgacatctgatttttcaactacctcatcaggaaaggaatctggaacctactgaaaagaaaaataacaagtaaaaattgataggttaaaaactagaataaaactctattgcaactgtaaaacaactactctaaaaaacaatcgcaaaaaattgaaaatataataaagcaacataccttgatttttgcaacaacctccaaaccagccaaaacaacttgatcatcatcaatcttaagctggcttatgcccttgaaaaaaatcatctccctttatatcaaattctttgcccttgacactatcaacatccttggatgtatcaccttcactacctacaacaacatcaccttgtaccacaccaatagcaaaggcatcagcaccaaccttatcatcaaacacatcatcatcaacataaccatcaccacgatcttcacctagactcaattttaatattctctgattctggtaatcctttttcatcatcatcagcatcagcatcagcatcattagaatcaaggtcatcaatatcatcggatgtcttcacatgtttaacaacagtaaaacaactgaataaaacaagaaaaaaaataacacgaacataacaaggaattaaaaaaagttatccaaaactataaaaaaaaaatacctcaacagaagggcggtcgtaaatgatagtaacttttcttttctgaatatcttgaacagcagtcaacaaagacttgaagttaagatcaacaaaagaccttaacgcaataaaattattgaccaacaattcttggctggatataactaattctaacttatcttttaatatttctatatcgtcagaattagatattttgaaagacgaactaatctcaaaatttggcttgaatggaccatgatcatctatagattcatccacaaataagccatcaaatttcaaagatttccttttttatcagtaggacgaatattcttcaactttaactacaaaagttataaatcaaaacaacaaaaaatattaaaaaaaaataacaaaatgggaaacaacaatattaaaatagttaacaaactaagaatcatctgctttaaaggcaaatcaaatatcatgccttttaaaaccttaaaagttgaacttttggccccaatatcattcatccaattgagaattcttggaatactagatgcaacttatttgtaaaaacaatttagcatctcgggacaaaactcataaaaccaaacaataaacacctacagacacccccaaagctctgtaccagccatcatatgactcacctccatttttctccttctgatttttcatcttgataccatgattaattttacccttgaatgaatctattgtcaactcaaacaactccctaccctatagggctgtacaaaaaattttgtaaaccgcccaaaccgaataacccgcccaaaccgaaccgaaaaaaccgataaaaattacaaactgaaataacccgaaaaa

SEQ ID NO: 122743 - DNA, 3725 bp, Cannabis sativa
taaaatatcaccatatgatagttttatttaggcccaattagtattgggcttattcgatgaataacaattatttaatgaaaggttaagttactctcctttgggccttgtgtaaggtcattagtagtgagtacgacatactgaaagtcactgatatgttgccctaacattcttgaaaccaaaaggcatgactttataacaataaagtcccatgttggttacaaaacttgtatgctcttgatcaggaacatgcattttcatttggttatatccagaatatgcgtccatgaacgtcattagctcgtgtccagcaattgcatccaccaactggtcaatccttagtagtggaaagcaatcctttggacatgctttgtttaaatcggagaagtcgatacaagttctccaagttccgtttggttttgggacaaggacaggattagatatccacgagggatagaatgcctcgtgtataaagtcgttattcagtaacttgtccacctcttctttgagtgccccttgtctatcggaatccaagggtcgtcttttctgtcccttagctgggtaatttgggtcgatattcaagtggtgacaaatgactttagggtcaatcctatcatatttgaatggctccaggtgaactgatcttggtttgccttcaaaaaacttattagttgttattttagtttttcatccagatttttcccaatgaatacacatcttgtgggattttatgtatctaaaataacttcctctgactcctcgattagttttaacaggttcttttcatcttgaactcgagaatctagatcctcatactgtttctcgctttcctttgttacgattgtcattaattgatggccagcctttttattttgtagctctatgcgatagcattcatgagccagtagctggtcacctcacactacgcctacacatgttggtgtttgaaatttcaaagatagatgcctaatttaactcactgcctcctagtctaattagcgcaggacgatcaaacagtatattataggccaatggtaagtcaacaactagaaaaatttacattatagtcgtggataaaggcgactcgcctatagtcaatgggagttcaattattccttggctagcaacattgtccccagtgaatccgcataaattcaccatgcaaggttttaactttgcattttacaatcccattttcttcagtgtatccttttaaaggatattcactgaacttccattatccaccaactctctttttattctcttgttagtgagctggattgtaatcacgagtgggtcgacgtgtgggtaccttatgtgctttgtgtcttcctccgaaaacacaattggagattcccgagtcttagctttctttgacgattctggagcaaaagctgaccgcttgttcttaatttccttgacatatctcttttgggcattgatactttctccaacgagatgtggccctcccgagatgaccgagatatcctctccttctataggaggaggttgtaatctttagttgcccaggttattgggtggatgtgactggttttgtccattaccttgtcgctttacatactgttcaaagtagccacacgagataattgtatctcgtctttcaacggacgacactcatccattgtatgcccaatgtccttgtgaaatctacacaattttgttgcatctcatttgtgcctcgcatgcctcatcgactcaagcttgcgaaatgcaaccctatgctcatgtgcgaggaatatattttcctgagtttcattaagctcagtgtaaatagtgtaaattggcacgtacttatcatgcttcttttgttttttcttatctttggttgattccttatagtcatcttttctctttgtgctagaatctcctagatttttcagccttagtcgagacggtacttactgagacagtgctgggtttatttcctaagctagtctttatcaatttcatctcgttccttgcttcctattttcgtacaaacaccggagctctttcattgaactcattgatgttttttatagggcgaccctgtaagtcatcccacagcttgcctccagctgtcgagaggtcagtcgtaatccctgcttgaagagcagtaagttgtatattgtcgttcaagtttctaactctagcagcgactgtactaaattgactcaagtatgccttgagtgactcgcctggctgctgcttcacattagtgagggaagacgcttcaggttgcctatctctcgctacttgaaactgtttcatgaaatccttagacagctgttcccaagagataatcgagtgatgggtgaatttattgaaccagctgctcgctgccccagtcagcgaggtggggaataaaatacaacgtaagttattcgtgacattgctggctctcattattgtattaaagttgttgaggtaagtgactggatctgtagtcccatcatatgacgagacgtgagggtttttaaattttctagggaaattcagcgctcataatgtttgaatggaaaggttagagctcctcatctgagtcgtaatcaggcagcttcccatcttgatatttcttgagttttttttccaactcactgattcgcaattggattagatcatcttgcttttggttggaattgagctgtttgcgtaaattgggcttcctccgattcaattgctcacgaaaatctggtcatcttcgatcatagttgcttgttgaccttgtgcctgagtaaccctcagattggctactccttgtatgactcatactttctcaataattattgcgatgaaacctatcccctcctcgcatagatcgactgtgatctcgagatcttgtacgtcccgagctagaacttgcctcatcacataatggctttctcctctgagaaaggtttgatacatggcccctgcttgggtgtgtatactcctcctccctatcacagcgagaaggatgttgacggtgtcttagtggtaatccacctgtcttaggttcagtcctaagatttctttcgttagcacaagggatctcttggcccctagttttgggctgccttctgttctcgtttttgggagaagactctagtaagtcattattttcattcccctgggttgtgaatccccgaggtctctaaggcacttcttgacgaggtgcctgattatttggttgttgattttctgaaacatccttagtttccccaggtcgctcctcctgagtgttctgggggttttcctgagccatctcctgcctcctggttcttgaccttcgaggcctacctcgcgacctcctcactccaggatcaggttaattttgtgtgttgttttcttgggtcaccctggctgcggctgcctctctctcaaacttagcgtttcgttggttagcctcggttagtcattgttagagttggtaattttccaattcaaccaatggcacgtacgtagtgggatcataggcatcctcactcctaggtacataatcaccagcttcagtattggtttcctcgttcctagtttctgggttttgatcatcatcatgttggcttcttcttgaacgtgttgtccgtaaattgggtggcctccgtgagcccattgactcttttctagaacggtgattagtctcttcaggactactgttgttgttttccccattattatccatggagattaaattccttctttggttaggagggatttttttgagcttttatcacgtaggctctcaatga

SEQ ID NO: 122744 - DNA, 867 bp, Cannabis sativa
ctaaataggacacttaaagagactgtttttatgactcatcccccaggatttgtggatccccaatatcctacacatgtgtgtagattaaacaaggctctatatggcctcaagcaagcccctcgggcatggaatgaaaaactgaaacttactctctgcagcaaaggatttcatacatctagattagacaactctctttttatttcaggtagtggtgactccttaattcttctacttgtttatgtggatgatatcctcataacaggccctaatagtcatcgcatctctacactaatcactgaacttaatactgagtttgatgttaggaatctaagctctgttcattatttcttgggtgtggaagtggtaagaaccaaagctggtatgcatttgtcacaatctaaatacattacaactcttctaagtcgacttaaaatggatggagccaaaccttgcccgagtccaacaagctctactcacaaattatctctttcagttggtgatccctttcatgacccatcactctaccgaagtactttaggggctctccaatacctcactcttacaagacccgatgtggccttcattgtcaataagctgagtcaatttatccatgctcctacatctacacattgggatgcatgtacacgattattcaggtatcttaagggtactattcatgagggaatctttatcaaaccagctgctagaatggacctccaagcatactcggatgctgattaggctagctaccctgatgataggagatccactggtggttatgcaatatttctaggggcaatttgatatcgtggtcagcaaagaagcaataagttgttgctcgttctagccctgagaatgagttcaggg

SEQ ID NO: 122745 - DNA, 2283 bp, Cannabis sativa
tcccatcttttcatatggtgttttaaacagaatgtttgtagaggctccattgtctatcatggtctgggccactgtttttttgtctatctacacttccatgactaatggattcttgtgcgggaagagaacatggatagcatcttctttagtgaaggttatagtgggttctcctacctatggcatctttgacttcctttcttctacggccaaaactacttccttttgtttgtgttgtaaagttcgggcatacctctcccgagctttgtctaaatctccagcaatatgtgggccccgatgatgaattgtaaatgcacgtccactagtggaggcattactaagtcttggtagttgtctgcttgggcaacccgttgattttggtcgacttaacgtacttttgcacgtgcatgttatttttccttatcaggaattcaatttcttgcattaggttattgcacacattagtgtcatggccatagtctccatgaaacggcaaaattttgacatgtcccttttgcttatgtcctttttcatgggaacaggtccattgatctggttgaccttgacatacttctacacgtgtatgttatttttccttatcaggaattcaatttctcgcatcaggttattgcactcattagtgtcatggctatagtctccatgaaaacagcaaaattcggacatgtcccttttgcttctgtcctttttcatgggagcaggttttttgtacgggacaacagactgggttgccatgtagattgtctctaagtcatcagttaggatagagaaggcagtgaaattgaaagctttttctctaggggtttgttcaggtttgcctgcgaacttttccttctttccattgccttgtcggccattgttattagatcatttgtcactcagagttgaacttctaggatactgggggtgaggagatgctcctgctgagggggcctgtggttgtccaagcctagactcaacatcttcctgttgaatggcctcttcaagcttgataaacccatctgcttggtctagaaactctgccatagagcctacagggccacttttcttaatgtctttccacagttctcccagtacttattcaatgccccacagtatagcagtaagcctcccttcttcaattaaccttgctacttttgtagcttctatcatgaatctgcttatataggctctgagaggctctcttggtctttgttccactttgaccaggtcttctaaatgtaacgggaattggtgagaagaagagaactgtgcataaaattctaaggagaaggcttttcatgaattaaaccttcctagtggtaacataaaataccactattgtgcggcttctgaaagtgtagtagggaatactgtacacagcacatcgcctcgtaccccttgtagatccatttaaatttcaaaatatttaagatgtgataagcgatcctccttccctttatacatcttccaggtcggcattttgaacttgaggggtagttctgggacattgatctcgggagtgaaaggtgatccgcgtgcccggtcaaactctagatcggtgagtttttggccggccaggccttgggacatatcttataattcatccagatgtgcttgcacagatgggtgaactcgttcagcttgttggccgacctgtgtcacattaggatttcttagagttgggtccttaatgaggatacggggctgagtggtcggttgaacatattgttcgtctacacccctcgttctattcaactcatccctaagatcatggactgtacccagactgttgaatactgaaacaccaggctgtctcagtgattggtgtgtttggccggtctattggccagaactgttagtttagatagagttattaggtataactccacctaaagaattgtcaaataaggtctggccgtataccacctggcccataggtgtaacctatgatccgggactgagcgactgactgttatgagtttgggcggtatgcccaccatgaatttcttctatgctgcccaatgggatactggtgtagcacctggttgctgattagaaccttgataggatttccgtatcactacagcggtctgtcttgttcggtcatcgttggctacttattgagccttcaatgtttccatctccctgttgggctttgtgccccaaataaaactctcttttaatgtaatcttttccattaaattatcaataaagaaacaaaattattttcattacttatttagtatgtcatttggttcatgtgatcatttatatgtttattttatt

SEQ ID NO: 122746 - DNA, 1821 bp, Cannabis sativa
aaaaaaaaacaaaacaaaaacaatataatagtgggccgcccgtgtggtcctcaaagtttactactaatttaagtaaaaattaaatataggaaaacataaataaataatggtaaggggttatgagtttttttatttttgtttttgtttttttttttttaatatttatatatgaattttttatgttatattattataaaaaagatggaaattttatatttgtaaataataataagttttgttgaaaaaattaccgaaaagtttatcgccgccgaataagttagtgtcgccgaaaaagttattgaaaaagtcgctgaaaagttaccgttgctgaaaaaatcattgttgccgaaaaaaagcactagaaaagtcatcagaagtagatatctcaaatataaacaaaaataggaccagtactataacataatgaataaaaataaataatacaaaataactcaaaccgattataattgaaatataatcagttctgtaacataatgaataaaaacaaataaaacaaaataactcaaactaattataattaaaatagaacgcgttatataacaatgttataataaataaaaacaatagaaccggttatataacataatgaagagaatttaacataactatacactatttacaaagtaattataaaaaagacgtataaaacataatatgatacaaatacatacaatatttatcaatataccttatttttaattacattccataattactcctataataacaaataataatattcttagaatttatttttattattattattgttttgtttaaatatatatgatattactacatatttaataaattagtctttaacataaaaaattaatataattttattttatttagtatttgattgcctagtagtatattttttttatttatgtttgactatctaatagtatctattacttgttagtatatataaaattttaaatatacatgaattagtatatacaatctcaatataccgaatagtatcttttacttgttaatattttacaattttaaatttatacaattaatatatgattttaaactatttataatttattaggatctatttagttttaaatatatatcaaatagtattttcgatttcaaacgtatacctaatagtatctattacttgtttttctctatgtatacagttttaaatgtagactaattagtatgtacattttcaaatgtatatctaattgtgtctattactttttagtatctatataattttaaatatgtactaattagtatgtacaatttcaaacatagtattaattacttcttacttattaatagtaactattatatattcttaacatatactaattagtatatacaatttcaaatatgtatctattagtatatattatttgttagtattgattacttgttatttgttaataatatttattaatatatctactaaatgagaataacaaaagtgtaaaaaatataataagaaatgaatattatatttcacatactaattagtaaaataaataaataaataaacatcgatagttcatgcttcatagtcacgaactcagaattaatcaacatacctctgaaaccctgtccaatgtacaagctaatctggctaatatgtctattaataatagccattggaggatacaaaggatgaggccaaagatccaatcacagaggaggaagtaggggtgaaaatcggtcggttatggtcggtttttataattttataaccgaccggtcggttacggtttttattttacgaaaaccgtaaccgaccaattagaaattataaccgtataaaat

SEQ ID NO: 122747 - DNA, 645 bp, Cannabis sativa
  modified_base (590)..(616): a, c, t, g, unknown or other
ttattgttactaaaaatatcaatgcttttctttcttttattactaaaacttactttttcttttttgtactataagtaaattaaagttgttaactgttgctaaataaaacttgttaggagggagtaactaaatgattgattttgtcataaaaacagtgatgttttacaatatgctttttacaattataaaaacaaagtcaattaaagtgggtgcagtttttggttaagtaaaaaagaaaatggttattattaatgtatataatattggttggattggacaagtaaggtgctgggatatggttgggctgggctgttaaggaagtatgtggttgaaccagctcatatgtggtggcccagcactctcgttcaagtctctcttttcaggtaataatttcctctatctttatctctatcctccatgagtccatgactttgacttaaacaccattcacaaacacaccacacacattaaccctattcagttttcacaattaggtactattggtgttagatagttatattagcccaacacgaacacggagctggacccgactcgtagtttgtattgggatcgagtttattgaaaatatnnnnnnnnnnnnnnnnnnnnnnnnnnncaagtcaataccaaacatagtattatatt

SEQ ID NO: 122748 - DNA, 1543 bp, Cannabis sativa
aataataataataataattgtagttaataataataattgtaacaatgtcattaaaatattttatatatattttaattgattttagttgcctttcaattatattagtcgtatttataaaaatgtcatttaattattattttttatatatataattaaaaacaaagtactggtttcttttatgtcattttctaattaacttcattgtatttttgttaaatattatataaataattcatttttaatgtactagtataataataaataaatatattttaataatgaatatttcataaatataggaattgagagtataatttatttttttatgacataaataaataatatcataggattataagttttttattttttttatatatttatatgagtttttttataccatatttttgtaaaaaaaaaaaatagaaatctcatatttgtaaaacaataataaggttcaccaaaaaagttaacagtgccggaaagttgtcagaaaagtcaccggtgccaaaaaagttgtcggaaaagttattatcgtcaaaaaagtcactgttgccgaaaaagtcattgttgccggatcttgttattactctgggaccgaaaggaacaagagttagagatctaagcggaaagagtcattattattccgttgcatcaatgtaaggttttataaactcttatgtgtttaatttcatcattagagaattcatatttagggtgttaataaacatacatattagtaaatctaaatcctggtaaaataaatctcaacaagttgctattggaactgtaatgcaacagttatatctattgcaagtcaactagcgtgcaacttaattgcaattaaaaaatgtaaaaatatgaatgtgtatatgtaagaagctatttatcagtatttttttttgtcactgatcgataattacttgtaccttaatagtaacatgtggagatataactgttagcaaaatgtttatgcaattgttatgaaacactaaaaatcaaaatagtgtttccgcgtacgtaacttcatctacatgtatcttcgtgatttaatatgaataaattcacaattagaaaattaaaaatcaatgaaaacacattaggataaatattttactatagtattgatgtaatttttttagattatacttgagttggattgtttgggaagtctaatttaattttttgagatctgcatttcatggatctaaaaattgaagttagaatattagttttatgcaaattaaattggatttctggtggaattttaatttcgtagtagtttttttgaatttttttttcatgaatgagaaacagcccctattttgattgattctggttgtcttctcaagtgaagtcgctggaattaaggcttagcatcggtcggtttagtcatttttttctatataaaaatccagaattcggttttcggtctggattggtgcaatccgaaaaccgaccgaccaatccaaaacccatcttaaaactgaccgttttaaaccttggtttggtcggtttaaactgcccaaaccgaacttttttt

SEQ ID NO: 122749 - DNA, 1208 bp, Cannabis sativa
ggcataaaacccaacagtataatatgtctaaggctccgcactctcctagcaagccaaagcaggtctcgccaggtttttatcaacttaatactgatgcatcattaagttcagatcaaggcaagcctggttttggggttgttattaaagactggaatggaagtgttgtggctggtctatctattcctgcagcaggtaacattcagcctttgctggctgaagctttagcattaagagcaggcatgaactggtgctaccatatcagaatcccacttgctgtcatcgagactgattcaagatttttagtagataaagtttgtggtcacaagcgtgatctctcagccctctttgacgttgtggatgatattagaagttctttttcttctttccctgatgctagcttttgatatgttaacaggaaacataactgcaatgctcacaacttggctcgtaaggctctgcggctagacaaggaattaagctggaatggatcgattccaattttgtagcttcttcttgtttttgaagttactttgtcgtcaaaaaaacaaatgttgaatttaattaatagagtcctacataatcatatctttatgctttatctaatgtaatctaaggtaaattattattatttttttcaaatgtaaaagtctcctatactcctagatagagagattgtatgaaatggtattataataaatttttaagttagtaatttgtttgtactgaaaattaaaactttttagaaaaaaaagtttattatggcattacaagagtattcttaatttatatatttatatatatatataaatatcatgtattttctaccaaatttattgattgaatttcttacttgtaggattattattttttcaataaataaaccttagatataaaccttagtgcaacaaaaaaaatatatttttacatatataaaaatgactatttaattgtttttgttagtttaacataatattttaagaatattatgttaaatttaacggtattaatagggttagttttataaataaagatatataaaatgtagctatggtttaacagaatatttttaagaatataaaaatattttgttaaatttaacggtattagtatggttagttttataaatacatataaatattaatattctttattttagattaatttaaatatatatatataaatattaagagctttttcatttttacact

SEQ ID NO: 122750 - DNA, 1272 bp, Cannabis sativa
  modified_base (1228)..(1247): a, c, t, g, unknown or other
tggtcagctagttgttcaaaaaattaaaaataatattccaagtttaaagaccgcttggccggtcaccttgtctcaaaagaaggcctattggccaaacagacataaaaaatagatagtaaaaggaaagcactgaaacagcaggagtcctaagctctttgtacgggtcaactgggtttgaaggggctggaggatcatcattttgggcggaaggagcctcaacattctgattggtaggagaggtggaagtggtcgcatcgggatccccgtaggccgcctgagcagcgtagtagtcaagaaacatgtttttggaagcgcccagataataaaagtttgccttgggattggccttccaaaagtcataaaatatatcgtcgagagactagcgtctctaaggcattcaccttctccccgagccttgccacctcgacttctggttcttaacctcagccttgagttcctcctccttagccttttcatcctccaacctacgaagaagagtccgaagaccctctctatcatcttgaagactggtaacgtcccgagacaaagaagcaatattagcctcgagctgctctgttcatggtgtctcctgtagttccttggtcagctcgacaactttggtctcagttgctagaagtttcttattgacctctcccagctctatctacaaagccccaagttgaacccgcacatcctcggcatcctttttggccaagtccacttccgcttgcattgtgctggaaatggtaaggtttttagcagcagccgacttagctcgggaataggtacatgccatctttcaaccagtctatgcggaaaaaaggcattaaaaatctgaactagtcaaagaagaatagaagaaaaaatgtcagaaaagacttacctgtgaaagctctttcaagactcctctcataaccatctccaaagataagtcattatccgcccaagccaaatgttcgttcacctctgggaccaaccggctcacatagtggttgagcatctctctgcctcttttggtctccgtgttcaataccaaaggtggggggagagccttaacttgttccgactcgattttgattagctcggatccaccctttgcctgctcaagtttgtcagtaatccctcctctggaacctttggacatagtaactattgaggcaggagggtccacatcagtttgttcttcagaaagatgaatgacctcacctgtaaagaccgcttagtttannnnnnnnnnnnnnnnnnnnttatgtttaattatgaaaattattt

SEQ ID NO: 122751 - DNA, 1214 bp, Cannabis sativa
ctttgatggaagatggatcaatttagttatgtcttgtgtgggtaccgtttcttacatgatttcccatgggggtaaggagttaggtcctattattgcacaaagaggcctttgtcagggtgatcctttatcaccatatctatttatcctctatgctgaggggttctcaagtctgttgcgtagctatgaacaaaggggtttaataacgggcttcaaaattgctagaggagcaccagttatttcacacatgctttttccagattatagttacatctactgtaaagctacagaggaagaagcacataatgtgaaagaattattgtacactatgagatggcttcggggcgaaaaaaattgcaataagtcgtctgttttctacagcaacaacaccagaacttatcatcgagatacaattttccaaatgcttgatatatatgaggcagatgagaatggcacttatttggggctcccttattcagttggtaggaacgagaacgctattcttggttttctgaaagacaaaataagaaagagaattcaggactgggaaggacgaattttatctcgagcaggaaaggaagtgttgctaaaagcggttgcgcaatcaattcccagctatgcgatgagtgtttttttgttaccctttggatacttgcaaggaattggagcgtcttatggcaaatttttggtggcaaaatgattctattcggaaagcaggcgttagttggatgatttgggaccgattgagccatcataaacatgctggaggccttggcttccgaagcttgcgagattttaacttggctgttcttggaaagcaatgttggcgtttgctagtcaatgatcactccttggtgagtaaagttttaaagcaagatattatgctcatggttctttcttttcggttgagttgggagatagcccaagcttcatatggaggagtatttttgaagctaaggggctgttacaagcaggtgtcactcgaaccattggtacgggggatcaaatctcaatattaagggacccttggcttcctcactccaccagtagttttgtctcttcaactcaacctgctcttcaaaaccaatatcttagcatcctttttaagagagacaaccgtgcttgggacaaggagattattagagatctctttaacgttcgagataaggagctgattctatctattcaactaagtgcaactgctacaaatgactgct

SEQ ID NO: 122752 - DNA, 1916 bp, Cannabis sativa
  modified_base (1284)..(1298): a, c, t, g, unknown or other
agttacaaccaatctccttgcattcaaagaaaccttgaagaactgttgctatgaactctttttcgtcttcctatcgagccacatagaagtgaaagtcctaaacaaacttatagataacaattattccatagtagtgcaagttttatcatattttctaagtaggaatctcgggacaatacaaaggggattatcttagtttaaaaccataagaaacatctcatgcacataaaagaatgaaggactttttttttttaactaatacaatatattcttggattaatactgaaaatatattcaaatttcttaaaactaaatttgtttatctcaggccataataaaattgtaaatattgtcagtatcatctaatagatatagaagcatgccttctgtatgaatcattgctgatacaattattcatgcaccctttgtataaaaaaacaggcatgataacaaagatattttcatggtaaaatttatcttttcctgcaacttaattttttttttatactattactattataattatttaatacaaaaggacagataataccataccattcctacaatgaacaataaaaaacaaaaagtatgtatctattaccgtaatacaaacatagaagattgtgttggaaaattattgtactccaatatatgaaagtatcaaaccaacaagattacaactcaatgacaaataatacaaaggacatttcacggattaaagaatgttacaacactaaacaaaatatacacatagaataaagaatatggagagaagagaggaattataactcaaagcaataagctacacatacaacacaatatataaataacatatatataaagagatgtgagagcaatcttaacaccatatacaccacaagtgtataataggagaatcaccaaacttgaacaaggttttacacctttatccaaaagcttattttcccctaccacaagcacttagggaaaagaaaagaatggaaatagcattctggatttatcaagcctatagtgtttctagcaatatgctctcttgatagaaacttcttcacacccaaagtgaacccaagacctctatttatagtgttttgaggatcacatataaaaatcaaagtctcttcaccacatgactgttaccagcacattaattggtatttaatgggataaaaatgttggacaagagaactggaaacatgctcaatcaattcatgcatgtacgtttatggatgttttcaaaaaatggttccaggtattcgtaaaacaaccataaaacaacataaaaannnnnnnnnnnnnnntgtttccaaaaaactcaaaattgagtttttgtaactcctctccgaattaaatcttcctccaacgtcccagttttcatttaaatgatataatatgagtattgtaacagtttctaacagctaaaaacttatctcattgattccataactttcatatgtaataactcactattacatgtgatccttaagttacaatctatttttagatttttaacttctcttatgttacaatttttatgtgtattattatactatatctgatataatacaacctccaacacataatatatattaatctcatattaatatatactatgtcacatttaaatattttaatctatattatattataacaaataatataacaaattgctcctctgtattttcttcagcagcctaacatgccaaaaaataatgtagacctcttgtcaatctcaggaaccatatagttgtggaacatagatgtggaaataaaaaaaaaaaggacaaaaatacaggaaaataactttaataagaaacacagagcctgtttggctgtgttttcagttttaaaaattgtgtttttaaaagtgagaatagaaaacaattttttattattttaaaaatttgatggtgtttggc

SEQ ID NO: 122753 - DNA, 1689 bp, Cannabis sativa
acaatacacataaaaagaggtatgtttcaaaaaatataaaattagaggcaaatttggttaattgattaataaaagaggcatttttcaacttacccctttgaacgtgatacccatgaaaatgttaccatcttaatatattgaagtttttacaaaaatattagagtttgagtaaaaagtttacaattttactactatacggaagtttttataaaagtactattttcttataaattaacagtgaaacaactaaaaacaattgtgaaataacagtaaaaacttaacatagtacacagtataaaaatcacatagtatatttttgaaaaaaaatacaatagtcccacggtagaagaaaagaaaataaaaaataaaaaatttgagtatgtgatcaccccttattatgtatgcataaaaaaatgggtgggcttacaagacaaagcgggactgtagatttgggattcatcattcattttcatccaaatctgaatctgacacaaaaacaaaagaaattaagtattttcaatttaaataatctgttaatcaaatgatgaaaataattaatttaaattgaatttatgtgtataattaatgccttagaacataagattttgagcatttatcacaacccttacttagctatagcaattcaagcagaaacaaataatgttaacataatattttcaggataaaaaatttaaagaatagacaagtatttaaacaaaatattattgacaagccaataaaatttataaaaaaatactttgaataaatctaaaattgtgaatatatacacaaaatagaactttcatatcataaatcataagatagtttttgaaaaatatatcaagtaaaagtctcaactccattagtattactagttattgaaaatttatagatatgactaaaaatttcacttatggagttaaaaattaaaaagtgagcactcgagtagataaatcattttaagacaaataattaaataaatattaaaacgaagataggttataaattattaaggaatgctaaagaaactctcttttacactctttttataattgagtggcatgtgtaactttctaaagtatgttaaagtatatagttacaattatactttttttactttcaataataattaaaatgtgtaatctcatttactcgtttatttttttagattattttattaatttctcataattttttactaaataatatgcactactatgcattttttatttattattttttttataataaatatgcactattttatgttataaaaaatgaaaaacactaattctttctttttttcaacaaaattttgcattagtttatttttttcatactgtgtcattttttaaattattttttatttcatgtttattatatatataaatatatatatatatataaagaaataacaaaagataaaaataaactaaatatgattatgcctagtcaatagtatatgttagatcgatttattttgtttaattttttttaagtaacaaaaaaattcttttcatgatttggcaaacaaaactaattgatttaacatatatttatatatacatacatatttgattagagaggaaatgcataaaaaccaaaaaaaacacatttttttttaaaagaatgatacaaagcaaaaaaaaaaaataataataataaaaaaaggactttttcatttttaca

SEQ ID NO: 122754 - DNA, 2060 bp, Cannabis sativa
agtaggctattaccgtactaaaggggccgaacctcctcaaaatctcatgttctttatcacttattggtttctgatctatttatattacatttctaattgcttcataattgactcactatcgttgactaaaagcgaggtcaacattttggtgctttcattgagagaaaaaacccaagtttgttctttgccttaagtcttaacaggcatacagaatggtagtgcaaactcgcagaggcttggtcgatcagaacgacccaatggtgacggatcctgccatacaaacccctagaaatacaagggtaccaccagggaccaatcccgagcaagccaacacacaaccacctactgtgggccatggcgtgacttcccctctggttgggatcacactaggtgtgcaagagactggaaatactagttcagcagccgatcaaaccactctcaacactggaatcctgtccaccaccaatgctcagaggacgatgggggatgacactgagatccaaaacctccgtgctgcccatggactcatgcaaggccataataacgccttgcatcatgatcaagaggatctctgtgctgctataaaccttgcgttcgatgagcagtaacgctagttcattgagtggagggacagggagatggaaacattgaaggctcagcaaacaaccatcgaagaccacacaaggcaggctaccgtattgatatgaagggcctatcaagttgctaatcaacaaccagctactgcgtccagtattccattgggcggtacagaagagtttgctactgggcgtactgcccaaactcataatggtcagtcgtccaatccccgaccacaggtccaacctgtgggtcaagcggtagacgggcagatcctacccgaccgctcttcaagtagagttatacctaataacttcattcacactgatagttctggccaacccaccagccaaaccagtcagacactgagaccacctagtacctcggtatttaatagattaggtgtggtccatgacctcagggctgacctaaacagaagaagaggtaaggatgaacaatacgtttaaccagctactcaaccaggtatgacacaggtcgctcaagaggctgaactggttcatccttttgtgcaagcacagttggattaattgaaaaatatggtacaaggcctgaccagcccaaaactcactaatctcgagctggaccgagcacgtgaatcacccttcaccccagagatcgacgtccttgaattacccttaaaattcaagatgctgacctgaaagatgtatacagggaaagaagatcccttatcacatcttaaatattttgagatgcaaatggacttacaaggagtgtgaggtgatgtgcggtgtaggatattcccagctacacttgtagaagccgccctacagtggtacttcaagttatcatcagggaggcttaattcatggaaagccttctcctcaaaattccacgcacagttctcctcctctagttaactcccctcacatctagaagacctggttgaggtaaaacaaataccaagagaacccttcagagcctacataagtaggttcatgacagaggctacaaaggttgcaaggttaaccgaggagggaaggctggccgccatattggggggcattgagccactcgaagaactatggaaaaacattaaaagatgtggccccgtagggtctatggcagaatttctagactgagcagatgggtttattaagctcaaggaggctattcggtgagtggacatcgtcaaacctaagcaaggctagccacatatctcctcgattggagcacttactcaaagtccacaatatcccagcagctcaactctgagcaggaaaaggtccaacaatattggtagataaggcaatagaaaaaaggggaagttcacaggcaataccgaacacacccctagagaaaatgcctccaagttcattgccttctctgtcctaactaacgaccgagagaatctacgcaacaacacagtctatggtccggtacaaaaaacccgctcccatgaagaaggatgtaagtaaaagaga

SEQ ID NO: 122755 - DNA, 1620 bp, Cannabis sativa
aatctcaaaagtctgttttagctactacaactgcagttactgatggcgtcactggtgaagactttttattagcatggaaaaattctaatttatatgatcacattacaattaagacctaggttgataagaatcttgtatgtataattatgaaagagaattgttttatttttttggtacatgtataaatatgtaaagaaattttgttaattaatatttttatttattgtattcaagtttacgttctttcttttgtcttcactatgttgaatgactatatagctaaaaatcagttgacatagaaaatgaaaatagttatcattggcataatttaaaaattataatcttgaattgctaaaaagagatataatattaaaactatttttatatacaaagtcgtattgattcaaatcccatttttcatataaaaaattgaaaaaacgagagggaaatcaccctttttaccatattttctattttctttcaaactttaggggtttttttttttctaattcatttttatattatttaatttttttttatacatcaaaattatgtttttcctaattgtagggttcgtaaggtcaatagctttgataataattgtcggagccaaatttgagatatgtagtgaagctttaacccattttcattcttttattttattgtgtgaaatccaatcataaacacctttctttgatcactctaattttacaaaaagaaaaaagagaaatagaactgtaccattctctgcatttattagatcgcatttaataattttaggtctatccaaatttgatccaattgtatattggatgttaaattttaccatccgatccgatctaattaatttctgtcatccaatcgatccaacatccaatggatgttggattggattggttctatctattgaatgtatttcatatatatttattggtttagtttgggtttatccaaaattctagacctatagtactttttagattagatcggttccatcaaatattttaggtctagtatatattggattggattggatccatccaatccagaaaaaaagtgtaaaattttaatataaattttcatatatacgtatatatcttacgtataatattataaaatctaattattcatccaaactaaataaaaataattagtagttcgattggatgcggatgtattggatttttagacacctcatctaacatccgatccaattggatatttaaaaataacattcaatccgatccgatcacaattggatatctaatatttggctgtcggttgtcattattagattggatcgatttatgcacaccccatcctcccttgccttgtgacctaggatcccagtcttccattttttagcttttaaaaaatttctgatcgagctactcggctatctctggttctttcgaagaaggttctacttttttttccttaaaagagtagaaatttcaataaccgtaaattacttgaataccatattttttggtagcaattgaaaaatcaattttttcgattaattaatcaaaaactgtgaacaaactacaacattttggtggcgtttggtaatacttttttaatcagttttttgtttttaaaattgaaaaagtgaaaata

SEQ ID NO: 122756 - DNA, 1027 bp, Cannabis sativa
tattttggttaaaactgaaaaaatctatttttttttacctttaataagtttatactacataaacttaccttttggtatttttttttgttcattttcttaagtttgatataccttttgtgtgatcggaagtttatactatataaataacaataaaaattaattatcataattatattaaatcaatatcaatatttttacctaaaaatattctcaaatattaacattttgttcaaaaaaatgtatattaagtatatataaaataattatacggatttatttagttggaacctttactaagatttctaaaatcatgaccaaaccaaagaatttaaaaggtccaaatcgaccaaatcattcacatcagattcatttggtttggtctcaaattgtttggtccgaatttgttaggatttaaaatcacaaattacagattatataaacactcctaataaaatatatagaaaaaataattaaatatacgtatctctaaatattatacctagtcatatatttgtattttttaaaattatgggttctattttaatatgttgtgattgaaaaacaatactacatcacttattctatagtacacatttggtatgtacatatatttgtaggaaaattataacaatgtattgaatcaaattaattaaaatttaatcaataaacaattagcaattgagaagattaacaattcacaaacagtaattagagataaaaaatagagattaacagagtattaaaaccaaaaataataaagcaataaaacattaaaatcaacaccaagatttatactggtttaagtcctcattagattcctatgatttatggctctattcccgttctggaacaccaccaaaatcttctttattgattgtgcaagaacagagtacaatatagtcaaggtcgattttatgttggattctcttaaagtttttatctctcacactcttttctaagaatcttcttcatctaccaaagattcttcatacaaatcccaaatccaatatctctctctctctctctc

SEQ ID NO: 122757 - DNA, 794 bp, Cannabis sativa
  modified_base (56)..(57): a, c, t, g, unknown or other
aagtaatgaaataaatctgtttctctattgataattgaatataaaagattacattnnaatagaattttatttagggcacaaagcccaacactttgctactgcaaaagggatgaaacacacattgccttatccaagtttgattaatcgttggtaaaaagaggttttcctactacatttgagcatgacaagattttgcctattcctactcttggcaaaagtttctcccctatgtgtggcaagcctttgccattatctattatggatgttcctgctactggggaggctcttgcctctaatggccgttcttcctcgactgttcctttagctcctctggaagggtttagtcctgcaacttggcaagcactactacaaaaatatcattttgcttcagtttttaagtgacatataaagaatttgcgtcggtttgtgtaactgacgctataaccgtagacgcaaatagtcttattttttacttcacttagtaacagatgctaaaagttttctcctcagttcctaaccgaagcaaatagtaaagcactaacgcaaattggtttttgcttcggttatgaaccgaagcaaacataaactaacagaccaccacaactagggttgtaccaaaaaactcgtaaaccacccagaccgaataaaccgcccaaaccaaactaaaaaaactgaaaaaaaaaattacaaaccgaaataacccgagaaaatttcaaatcgcccaatctgttaattgggcgggttgaaaataggtccaacccgcccaattaaaccgaccaacccgaccaacccga

SEQ ID NO: 122758 - DNA, 1642 bp, Cannabis sativa
ttgggtacttatgtcgctaaaaataaatattgggtttatgctgcttacaaacttaaaactttgagtacttatgctgttatttaccctattatttactattgtacatttaattagttaaaatgatatgatttactatttctttattaggtagagtgattttatggtaaacttcactatcgttttttttttcgtttttcggttggatgtttcataagtttaaatgcatttgattagtgaaataactctttaagatttgccgcaataatactcattactcactgtggttaagcttaatttaatgtatttataaatgtaaatcttttctatatataaaaggcccctataaaactgaatatctattaaaagatttttcttattttggtaaaaaaacaaaaacaaaacaaaacaccacaaattgtggaagatagtgatgtataaaaatatttttatttttgtcatctaacaaaattattatgtaatttattcaaaaaaaaaatatattatgtcattattacacttcttaaaaaaaaaaagaaaaaaactaaattattatgtcattttgggcaagatgatgaaaggtgacccaatatattacgaagcaacaattatcttattcagttttttttgttaccagtgttcaattttttatttattttttaaatggatttgttaattatggagtttcattattttaattaaggattggtttagtaagtagagtaagccatatataataattttagcatgctcattaatttaatgaggctaaacaagatgagaaaagtactggatcgtcattattgttcaataatattgaaaattttattagccatctttctaaatatatcccaatttttaattattaaattattcaagcattatgtcattaattaacaataataaaaatgattagcacccaaaagaaaaatgtatattatatatagacgaaaaaacgtactatgtacattttattccccttatttaaaataagatgtacacatactgtgggcactttgtcttaaaataataataaattaatatgtatacatgtaaagactaaatgcacgtactatactcagtgtgcgtactatgtactatgcaatgttgaaaaaaaaaagtacttatgcacgttttattccctttttatttatatattatgaagacatactgtgatcatttttgttttataataacaataatatatataataatattgcataaaaaaaaaatcaatttgagaggtagaatatttgtaagaagtcctgatgatattttattatatatttttttattttagtttgtgttgatatgtgatcaacttttaattagtttttttttttttttttttgtcttttctatagtatgtaattggttgatttttagttgacttatttatttttttggaagtttataataatattttttttaatttgatttacaataataattttattattattattattattgacgtgttttgttagttaaatttgatgtatatgacgttttttagttttttttttttttgctacgtttttaaataattttttaattactaatagtgttgataagaaattaattagttacctttttataaaaaattttatttttatattatataatttgagatatattttgatta

SEQ ID NO: 122759 - DNA, 3030 bp, Cannabis sativa
  modified_base (38)..(56): a, c, t, g, unknown or other
  modified_base (2948)..(2965): a, c, t, g, unknown or other
atcaaagaacacaaatagcctcttgagattgagcctannnnnnnnnnnnnnnnnnncatttgatctaggatcaactagggatatagagattgagcctaatcataacaggattgagcctaatcattagattatcactaatctaacatcctaaatacagaatttctaaaacaataatgtaaacacatatgggatatagagatccttacattggttccagcaaaatattataactcattccgttcaaatatctaactcttgattcctgtttgtagcagagtttaatcaactatctgaacctagattctccttctgacaacaaatatactacatagtttcctcactattttgagtattaccttgaattatgtatgcaatctctcaacaaaaggagcacaaatttttatgaagaaaagcaagagaatttttgaaaaataaatagaataagaatttcctttcttttgattcactttttcaaacaagagagagtcataagttgtagaatcaaatgccattatattttttttttatagagagatgctagtgttatattttagaataaatggcccaattaaaaaagatataacgacactaaaataaagcccatggtcaaaattccctttaagggcctatgtgtttaatttttgtcattattttgtttccttaaatgaaacaatcttttctattttcaaaaatgtcattgatttattctaattatttaaatgctaatttttctaattaataattataatttattatctaagaaaattaccatttaaatatatttattaattaaaccctccaagatctcttaatttacaaataacccctaaattctcttttcttctcaaatataccattctttagtaatattcataaataaaacatagtcttacttaaaattctaattgatttattaaatccaattaattgagactacaaaacaaaattatctcagttagtgtggaaaccatgggcctatgtaactaaactcctaataagcagatcttgaaatttaccgagtaaattacctaacttattaattttttctgactccactatagattcacactcctaattacatagaatgctctgtacaccaagtatagatacactatgaattatccattattttagtcattacaatcattgatcctttatagacggtttacattaagtaggcttaaaattagtgttttacccttttatgtattttgtccttaaacacttagctacttgtaaatgatatttcgagaaactaatataattatcaaaataaatgctctatcatttatcgcgttaagccaaggtctaatgaaccatcgtttcacttctaataaacatggaagctatagatgttcatctttatgattaacactcctagtcaattgtactactaagttcccaagatgtaattgagatggttctatagtaagctggtaacaaacaagtcaaaaaactcgtgtaatatatttaaggtaaagcttaaccatcttaggattgagatcaaatgatctataaccaagtaagtgacattgacttaaaaaagatataacagtaggtgtatgatatctcttctactatcaatatcggtccagtctaatgtatagccaatacatcctatcctagtttactttactaatgccttggaaaagacattccacttagccaagtgtaagtaaactttatcgttaattatcacgtcagtataaatctagtaagtacactgataaatcgtgggactaaataatttgaagcatgcaattacaattacttttcattatgatgacatcattgtaattgtgaacaactatatgttcggaatttaatagaacttatatattaaagtataatcatgtataaaacatttgaacaaatcatatgacaaggtcaagatatgatttctgatctttactgaaagtaaataagatctcaataaaattaaattttatttagggcataaaatcccaatacttttatcaacaaacatttatttttatttcttgaaagaaaaaagttaactattgattttgttgtggaatagatgtgagacttaagaacttaataaggtaaactcctctttatttctataattttgttactgaattttgggtcaaattgagtagaaattaatggaaaagtagaatttcattatttctaaagtactgtttttgttgataatagttctcaaaggaagattttattattgttagcttctaattttaatgaaaatactcttttaatttgtaatttttggatttggaatcaaactattttgacctaattttcatatgttgttgagcttgaaactttctaaagtaaaagagattggttaactaagtttttattgataaaatatacccattttacacattttcaagtatgaatttagttatagctcgtctgaatgttattagattgattttgatgttttgaggaaaatgtagaaattgaaattttcaggttttgatctttggatttcttgctctaagtaagatttggatgttagaaatgagttctaagttgttaaattaatgatgaactattatgtttatatactactctgtgtacttattttgagcagatttcgaatatggtttaattagggtgaaaattcgcaacagaaaatactatatattttttttgtaatcttggcactatttgcaactttagggcacaactatgctaacccttgtttcggatgtagttttttaattttgtaaaaagggcataacttttaattatgatgtcgaaattaaacgttttttatattattagaaagcttgcaacaagttctagaagttagatgtataaggtgaatcaaatttcacttaattggtagataaaaattatagtattgagatgttaattgacttttgattgaatatgcttagggtttcataaaatgtaatgtccgctctagaaatgtggattagtaaaggcaattagcnnnnnnnnnnnnnnnnnnattattatttgtgaattaatttttaatgtggaccccaatatttagaaataaataatagagttata

SEQ ID NO: 122760 - DNA, 1938 bp, Cannabis sativa
  modified_base (27)..(31): a, c, t, g, unknown or other
  modified_base (1574)..(1599): a, c, t, g, unknown or other
aaaatagattacattgaaatggagttnnnnntagggcataaaacctaacacttagtgctaacttgggtgccccttgtgtgcagttgacactgtcctatcctgggataggggccccatgtgttgttttgttcttgcaatttttttgggtaaatagaggtaaatacataaaatgcattgactttggacccacagacttagtcctagcctatggggcagggataatccttacgcttggggaccacacaatattgaaagatggcttacatacatcgtttttgtgtactatagtgtcacagtagtggtcataacagaaaagggagatttctttttggtgctacatgcattcttaggctcaatcacaggggacaatcctctgattaagtggcatttggtgccagagggttgccacatcatcctggactaggtctccaggatgcctcttggaatgccttctaagatgtatcccaaattctcatccggagggtctcaactacttcgtcttattcaggcgggatgccattccggatcaagagaactttggtcttggacgtaaatgtcctgggccatggataggtgtgaggctcatccttccatacagattgggtttggtatcttattagagctttttactaggacaaagatgattaattttgaattaggaatgacatgtgtccccttccaaaaatacggatggtagtgataataatttgttcaagtcacggtaaaccccactaagttacactcaaagttgtgaatcagtgtatatatgtatattcttccatcttgttatatatatatgtatgttgccactactacaatttagctttttactgacactatttagtgacacgtacaaaaatgcaggtcacgaaatagttaggagtgatttttagtgacatgcataattagactctaaacttttggtgttagcctcatgtaatgtgtgtcactaaaaatatagagggtcactaaagagtaaaatctaaaattttcttatttttattaatttaaaaatctatggcttaaagtgacgcgccaggtgcgattggataaatatttcccgacccacttagcacgtcactatgtgataatgctattttttttaaaaaaaaatttagctgtaataattaattaaaaatatatataaaaaacaaaatttatatataatagtttacatagaaaccctatcagagacgcatggttttttttttttaaaataaattttaaaaaactcaacaattatataatattgcatttccctttttctctaaaaaaaaccctaagtcttcccctcccttttagatagcaaatgcggctgccccaaatttttttagaaaaatcgatcgcctgcctattcttcttcccttctctatcactgaaaaaatactaagtctaatcacctccctcttcttcttccactctggtgatgggcgactaaaacacccaattaaggtctctccgcctcgcctagaacaccagctggctactaaagatttaagagagttctaacatagaaaccaaaggtcgacctctgttttttctcctttatctatttctctctttctctctctctnnnnnnnnnnnnnnnnnnnnnnnnnnctctctctctttctctttctttctctcttttctttatagggatctcattgtttattgttcgagttcgtggtagatgaagacggagtttgatgctcgtataagatctcggtgttcatagtgtgaggcttcgtgtttggtggcatttgaagctcgttagatgtcggcgagttcatgaaggatttgatttccttttcatttttctattaggtttttgtttataattttctgggttgatttatgttttaaactttatgaataaacccactgtcactactacaaaaagggctattcccaacagtttagaagagggtgaactatgggaaccgttggaaaaggtaa

SEQ ID NO: 122761 - DNA, 700 bp, Cannabis sativa
tattaattgctaaaagaagtcttgttaaatatttaattaattattttaaaaaagtagttaattataattaattaattctaaaaataaatttttacctattactatcaaagaaaaatgtaaccatgatagttacaataaaaatgtaaccattgaatagtcacccataaagaaatacatgccaattaagttaatatacaatctctaaaatatatatatttatttcttcataaaaattataacttcgtcacataattttatatcattagtttgtgtactagaactttatttattatatattttttagaaggtgttgatttttatttacatttgggccttattacacatataagatcaaattcttttcaataaaaaatattttatggagacattttttcaaaatataaaaaaaatgtacttcgttaatttttattatgagtgaatattatgatctgtattttataatagttatcaattgaattttttattttgttaaataataaattgaatcatgtattttttataatgatacaaaataataccatgagctcaatttttgtcaattctttattaatataactaatcaaattctaatttctaacacgagcaaatataaaaaatgtaagtagtctgattataacaccaccaaattaagttattaataaattttattttgataaaaattgagctcatgatattattt

SEQ ID NO: 122762 - DNA, 844 bp, Cannabis sativa
aaattttgagatacaaccccaagttaaatattaaacaagtgacgatgcttctcatacatccttgagtcactaattctcaagtgttctcatcttctctacgattctatcataaggccttaactacatattcgctctgttccatagcacctttaactctcttaccaatatccaggcaggtcgttcttcacatgtcatatcttccacaagagggatagcctcatacttaatgacatctgacaaatttgaagtatacttcctcatcatagatacatgggacacattatgagcatgtcccaacaatactggtaactttaatcgataagagacctatgcaaccctcttaataacctcgaaaggtctaacatacctggggctaacttatccttcattctagacctcatcacatatgcttaaaggttacttttaggaagacattatcatcaaactcatactcaacttcatgttgatggagatcagcataacttttatgatgactctgaacaaccttatgtctgtcttggattttcttaatcctctaatatgtagtagtgatcatctaaagtccaataatgacatactcattattgtgatattttgcacacgcaaatgcacgtatcgtgacaagtagtaaactcactaagagtgaggtcgaccccacgaggattgtagttaagtacattaaaattaaactcttacttctatttggttgaatcaaatttaagaaaatattaaaactagaaaattataaaaacagtgaaacaagaagcaattaaactaataaggaaataaacagttataaaaactagggcttcgacttcattttgtttctattgattatggccta

SEQ ID NO: 122763 - DNA, 2318 bp, Cannabis sativa
tcataaattagtgctaattgccttaattactaaagcggtcattacattataattattaataaatagttttgacatttataggattaaaattgaaaaatatgacattagtgaaagaaaagatgaatattgaaagaaaatggtaaaattataactagtgaggccaactactatggctggccacctaagctttattttttttatttttttatcttttttaatccatataatttatatcctaaatgctagttgagatactataaaaggaatacgatggctctcattctcatccatctaaaaataacctagttttcattctttgtcaaacaactagaaaattgagagtctcctttctttgaatttcgatttccttcttcttcatcatcaaattcgaagcctttagtgatagagtacgatgtccactcatatcaagtaaagtactcaatcatagtgtgaaagattatgaagaatccaaccatactgatgaaggagagaagatccaagttcagatcttgataatgctttgttacaaaaaagaattaagggctagtgatctgaacggaatgagtcattattattttgctaccatcaatgtaaagatttcttagtctcttatgtgtttacttcatcgtattagaaaatttatatttagggtgttagattgtagttaataatcaatcgtacatattagtaaatctagatcttggtaaaataacatccaacaaatagtctcaaagccatggtaatgatttacttccataaaatatggattttaaacgacgattttattgatttggatgtgttcatgttgatgaatgtttataaattacaaatttttgacaaaaaatatttttactttcgtaatggaagtattttttggaaagtagatgaaaattaatcaattttggcttgtacagaactcaatttgaatttaaatttaattaattatgattttttgaagtttgaaaaatatcaagctagggttactagctttcacgcgggatggagtggacaggacttgatgcttgctcggacaagaggccttcagacagggccatgttcgaagttccccccaacctgaccgagatttaacgcaaatgaaggtttcatgcagcctttctcttggctaaaccccatgcacgcgcgcacgggaagtgtgcattgcacactccccagatttcactattttggccatttttcaacttttgaaaattatttttcaatgaaataaaatttaaatgttggtagaattttgtgtacaatcttatttttgagataaaatttaattatcataataaaatcaatttttagattaattttagatattagtaggctttaaatttaaaaaattgatttttcaacaaacttgccattatagttattttttatatttgattattttattttaatttattaattttaattataagcttagatatttacatgtttaatgaataaaacatgaaatgatcttattttgatattaaaatattaataaaatttaaagataatcttgataaatttcaaattgctaaccatatcagtttttcaaaaatttgttatttttaaaaatatttaattattttaatttataagattagataaatgttaattatttgatattttatcttaatatgatatttatcttaataaaatttatattttttgttaaaatgacatgcaaacttttgaatagttcgttaattttgtttgaatggatattttagaattttctaatcataaaattttaaatttaaggtattttattttatttaattttaaataaaatttttaatatcctaacaataaaaatatcctattttcaaattgtttattttgttatatttaatttattaaattataagatttaaaaaataacattaaaaatacctcaatttttaaattaagatattatataatattatcttattcgttatataatcaattaaattatttaaataaactagatatttgaaaattagttagatatttgaatttacgatattagggtttgttaaattttaataatttttaaatattttctaacaacttaatttagattcaagttaagatattttttaaaatattatgttatcccaattattgttctcatgatgtggcatgcttacgtggacagaacctgtgccacgtggctgtacaactcactaaaaggaaggcctagttagtatccaagccaacaaagacctcgtcactcaaacagggatcaagtgacagtccaactcactctcgggagctggccagacctatggctggccaagctaggaaagagcatcatggctggccagcctagccagcacaag

SEQ ID NO: 122764 - DNA, 1161 bp, Cannabis sativa
atcgaatccctcattgtagtttcagtatttgaactgaagaaaatagagcatttctcaatataaactatttgacccgaagcaagctcataaagatgtagtgactccataatagaatcaacttcccaagtattgcctctacagaaacataactatcatcataaaatagcatatgggaaatcacagaagcccttcgagcaactttgcaaccatgaatcttgccatcaacctcatatttcttcaaaagggcgagaaaatcctcatcacaaagaatgaagagatacggaggagatatatgatccccttcacgaatgccacaggtaggaagaactggacccattttacgaccaacatggacaaaagtataagatatcaattccatacagtgcataattagatttacccatcttccatcaaagcccatacgcaataacaccgtcctaagataacctcactccattctatcataagccttgctcatatcgagttttagagccataagactttttctcccttaagtccttctttttaagtaatgcataattttaaaagaaaccatgatattatcagaaataaaccggccttggagaaaagcactctaggtatcagatattacaaaaggcagaaaaacctttaaccttttcacaaggacttttgttatgacttttaagagcacattacaaagcgaaataggtcttaaatcactcatatagctaggatattttcttggggataagagccacatttgtagcattgagaccatcaggttggacccctgtcaagaagaaattttgaacctgtgtaaccacatcccctccaaccacgtcccaacacttctggtaaaaacctggtgtcatactatccggacctggagacctgtcaagatgcatttacttcatccgcttcaataggtctaagcaattcctcaatctatgcagccaagatacaaggagaaatgcagtcggtaacatgagataaatcagcttcagtagaagaaaacagatctaaaaaataattcatcattaacttagctagacccgtgtcccaatcatgccacatcccagtcgaatctttgagtatagaaattaaattgttacgacgatggaagagggcgatatattgaaaaatttactattattgtaacgtccccgcttcaagcctcca

SEQ ID NO: 122765 - DNA, 2846 bp, Cannabis sativa
tgtaagatttcctaaactttatatgtgtttaaagcctaaacggaggccatggctaacctccacaagccctgaaacccctaaggcttgcgatcctcgagctttctcccccttcatcgtgatggaataactcttcagagctgagatatcttggcttaggtctgagcaactctgaaccccttcaataaaaataacttccatatcctttctccacttgccatgagctttaaaaccaatatcttaagttcccccaaaaccattatgcctttgtcagtctctagagcttcggcatggcttcgatcgaccaatgattgtgaaaattgtcttggaattttgggatattttttatatgttttaataagttttgaaatgggaaacatccactttgcattcgttataatgacaaaaattttataaaaattaatgggactttaaagagtttgatgggttctaaaatttggtaattttgaaaataattactaactaggatgatgctaaataatttataaaatgaactaaataatattaaattgcattactaaaaacttctaaaaaaaacctttagtctcagttaattataaatcaacactaaaaggaaaaatatatatgcacactttaaaacaacaccaaaactcattagtctcggtttataacagacacctaaactgagactttttgtctcggtggaataggtgttggttctatatactgacactataggtataagtgacagtttaaaacaaatacaaaaagtacattttgtggtagtgatggctataacattatctcgcctgaactaaatcgacttcattggagtaaggaagtttttggtagattcaatctccctaaacatagttttattatgtgcatggctagttcttcaaaatacgttaaaaactagagacaaattgtttaaagacaatattgttcatgatgatatttgcttattgtgcaaaactattgcatatttggtttttgattgtgatgtaagtaaaaggtgtctacaagaagtcaaaaagtggcttaattggaatattgctacaggttcacttcagtagctatttggtggattttcagagaaaaaatcaataaactcaagaggctctattctgcctctcgagtattgcctcattagttaaaataatctttggagtgctcggaataaagggctttggtccctaaaactaacaagaattattttacttgtaaagataatacttagaaatgtcaagaatagaattttatttgtttagtattagaatttggtatacatttctacacaatttagtctaaaactttctatacacttgtagaaaaattatctaagaacttaagagaattttagattagattaaatatacaatatactagttatgttgaactctagaaatatttagatttgtttggacataattccttctagtaaaataaggatctagaagaaataattctaaccataaagtgcaaggggtgagcaactataaatacctcttcaatggttccaaattgtaaccaacacacccaacaaataacatccaaactatcaataaagcttactacattctcatacaaccctctcttctaagcccaaactattctcatatactgaatcaagaactactcatcaacatcactacttcaattaccataacaactattaaacacttatttctcatatccacctattcaaatctaaaccaatacaaatttattctcaaatgatcagttgtatcagagctccattcgatcatatcactgggtgtaattttttccactcatcaacatgagttcaaagtccaatacctcttctctacctcttccaattttccttgaagaaaactatgatttttggtccatcaaaatgaggacctattttcgatcacaaaatctatggaaaattgttgaagaaggaatcaatattctggaagatattacatctctttcggaagatcaaaagaaggcactagaggataatcaacaaaaagattctcatgcattatactactttcaacaagctatggcagacaatctttttccacgaattatgggcgcagcaacagcaatagaagcatgggacacactgctggaggagttccaaggaacagtcaaggtatgcacagttagactacaaaagcttagaagagattttgagaatcttaaaatgaaggataatgagaatacaaaatattactattctagaattgaagaaatagtaaatcaaatgggagcctatggagaaataatttctcacaagaatatagtacaaagaatactaatttcttgtacagaaaaatatgattcaatagtttctgtgatagaggaaactaaagatttagaaactctatcaccaaaagaactaatgggctctcttgaagcatataaaagtagatgagaaaggcataacgaaagtgaagatgaacatgccttttagtctaaaatcaatctgaggtcttgaaaaccaaaagctgatgggaaaaagacacaagaaaaataaaaagaaaataatgacaagtatcctccatgtggcatttgtaaaagaaaaagtcacttggagaaagattgctgatttaaaggaaaacaacaatgccaaaattgtaaatttggccacactgagaaaaaaaacttatttatcgtttaaagaaatcccatcaagttaatttttctgaagagaaaaatgatgaaaatactctcttctatgtctgccaagctgcaacagaagaaggaaaagatacttggtatcttaatagtggttccagtaaccatatgacaaaaaacgaaagcagcttttgtagtcttgatagatccaagactagagtcaaaatctttaatggtgacttcatggaagcagt

SEQ ID NO: 122766 - DNA, 715 bp, Cannabis sativa
ttgttttgatggtctgagaaagaaggatatgaagaacctcaaacatccacacaactagcacttgtggtggtcctggaagaagatgaactagatccttgtgtaggtgtggaaagaacaattaaaccaatggaggagatggaagaagtgtgcatcagtgatgatgatcccactaaagtcatcaaagcgggaaagaatctatctccaactgctacagaaataattatctccacaataaaagaaaatagtgatgtgttatcctggagtcattttgacatgactggaaatagccctcatttgatttgtcatgcattaaacatagattccacggtagaactagtctgtcagaagagaagatcattagatctggttcaagtggaagtagacaagttgacaaatatagagttcctccgggaggctttatatccactttgacttgcaaatccagtatcggtcccaaagcctaatggaacctagagaatgtgcatagacttcacaaatctaaataatgctttcctaaaagactgctttacacttccacgaatagatcaaatggttgacactacctcagggcatgaacttctgagctttatggatgcataatccatctataatcaaatcaaaatgcatccacctgaccaagaacatacaagtttccggataaatatgggtctatattgttacaaagtaatgtcgtttggtctaagaaacgctagag

SEQ ID NO: 122767 - DNA, 1377 bp, Cannabis sativa
acaataatgttggttgacgtctacttggtatgtgtaaatttgtcaattgttttgttaatcactatttttcatataaattattcaatttatgtttgaaaatatctcattttttttcttttaatcatgcatgatatggtaagttctctatatttgttctctgtaagaattatatggtgaattttgtttagattaatgtgttaattattttttgtgatatctatttcggtgttggttattgaatttgagtttgataatatatctcattttttaattgtttctttggatgaagaattatatgatgagttttctgtagatttgttaattattttgtttagatctttaatttgtgcatttattattcaatttaggtttggcaacatttcttctttcttttttagatcatgaataatatgagaagttttctattatttgttatctataagaattatatggtgaattttttaacagatttgttagtttttctttttagatctttatttcagtggagattaagattatagaatatgacgtttgatagtatctttttttttattaggatcaagaattatacgatttatatgatgagttttctatatacttagggtcgattgcgtatacattattcaattttaagtacggtaaattttctattatttgttctttagattaagaatatagtaaattttatatagatttataattttttttagatttattgagaattatatgtacttttataagtatatcagtgtaaataataattagaagaacaaaaatattcactcacaccttcttttaaaaatttcaatgatacgtttaaaaataatatcaaactatatatacatttaaaaaatgtagtattttttttattgtattaaaaaataactaatttatatataaatatatttatttattctatttttaattctcttatttttttttacattttattttacattttattactttttaaaaaattttaccaaaataataataataataataaaacaatgttcataagcccaaaatttatgtctaggcatcttttaagttatatgtatccatttttttttcaatttttttttaaaatagtgtctttttttcaaatttaattagatttattttaaaaaaaaaaatcacattaaatattttttcatatcttaattaagaaaactaaaatcctaccaataactaaacattatgattgatattttagaaaatttatatatatcttcactcacataattatattattcctattagttttataattatttatattacttcaatttttcttatctatctatctatatctttatatattaaaagtgcctatctaacgaaatttcttggtttaacagaatatactttaaaaat

SEQ ID NO: 122768 - DNA, 543 bp, Cannabis sativa
  modified_base (26)..(27): a, c, t, g, unknown or other
atggtttgatatttttaaaattaatnnttatagttaaatttgtttagtaagcattcatgggtaataccattaaaaattgttccatatatatattatatttacaattttaacacttaaagtttttatttacaaaaatacatttatagagttaaaattattaaaatactgctcagcaaaaataactaaaaaataactaaaaaataactataaaacaatcagaaaaacagtttattatttttactaaaatacttttgtaaataaaaaaaaaattaaaatgtaaaaatgaaaatttttccatgttaaaatattttttgtaattttttcttctacaaatttttggtctattatttaaatttttcaaatatcaatcagtgtaataagacttgtgaaacgaaatggttttagcattttgattattttgttcaaactcaaaaataacattagaatctcaactttttttctctccaaagtcaaaggaggctaagattcttttgttatttgaatgatttgataataattaggtatgtcaaaaagatctattta

SEQ ID NO: 122769 - DNA, 1905 bp, Cannabis sativa
atagtccaaacaactgcaacaaaaaccaaaccgcaccgcaaccgcaaccacaccattttttgcggtgcggtttttgtgattttttagtttcacgatgtgggtgcagtttgggaaattgaaaaaactgcatgtgcgagttagtttaaaaaaataatcaaaaactgtggactacccgcatcgcgaacacctataatattttttagcacacttaaaaatataaaaatacaaacaaatacatttataaacttttgattaatatacataattatttaatttttaagtattatataattattataaataattaaaaaaaattaatgtggtctacaatgcctactaaatatggtgggacactgtagacaaatccataaatggtgtaacttatagtgtgttgttggagtgtttatagtgtaaaattacactatatttaagtttatagaggcccgttggagttggcctaaggctgaaacaatatttataattgttaaaatatacatattattttaaaatatattttttttggtcatccatataatgtttattatatatttttttaaaaaataattgaatagctaacaactctaaaaattaccataaataatcccacataacattaaattattgattatttaagaaaaacataacctttttctaataaaaaaattaaaaaaaaaaataccatgtggccatttttttgagataaaaatgcgtattatattaaatcaagcgttcataatacaataagcatttaacgggggaggtatttcctccaaccaagaacaagtagagtctaccgaaagaacatatttggctagcaaatgagccgtcgtattagcagatttatacacatgagaaatctgcactccaggaaaattggacactaggtgtgaaatgtttgataaaagacaatgaaaatcagaaaccgagacagtggatgactgcaatccttttaccactacgagaaaatcagtctctacatagtgtacgttcaattgattgtcgatcagtcattgcaaaccatacattaaagccaaagcttccatcacttcagggcgaaaagtacctgatattgacttagaaaatgcagcaataatttcaccattagagttctgtagaatagctccacaaccagtaatttgagatgccttattaacagctgcatcagtgtttaatttgagtctgccaaaagggggattaagccatgatgcatcagatttgttaggaattatcgagggagataaagcacatgttgctgtatttttcgactaatgggctacatgaaattcctccaaatatgacagagcaaagtataaaagcataaggcttggttttgttgccatgcttctccttgtttctctcattccaaatatgccaaagaattgtgatgaattgttcaagctgcaaatcgaaccagacagtagaaacatggagtcatatgatatgttaccatgtggccattgtagcaacactttacataaaattagtataaaaaattggaccatattacatatgtggcaagaccacaatgatagacaaccctcattggagatactcttagtcttagaacacccatctcaagatactctattatttttttaacatatttcatcaaaatttaactttttctattttatttcgcacatttacataatattatacatcattttttctgtatttttttatttatatttattaaataatatatttataaattaaatattaaatatataaatatatgtggtgacagattgttgtagaagattaaaaaaaaaggcaaataaatattaaaataagcttacttcactattatttatttatttatttaggtgccgtttggtaacacttttttaatcagttttttgtttttaaaagtagaaaagtgaaaatatttttcaaaaacatatt

SEQ ID NO: 122770 - DNA, 1478 bp, Cannabis sativa
tttatcatttgttgcttatgttgactgttggctccccgaacattccaggctaataatttatccattagacagagagggctctccccccctcctgacttgtacaaagtatcagcctgttcaaaatcattagcaccagcaatcaattcctcttcctcaagcacctagaacatgttttccacttcagtattaatagtcaaaccagcaccagcaactttattccctgtattatctcgattaccactgttcttcttagtttgcacttcagtaaaaccttcctcatctacctgaggttgttgtcttttgtcactcttaacaatccacttctgcttcccattgatgttctttttacactctgccgcagcatgcccaacccctgaacaatgtgtgcaagagataggctttcattcatatttaatccccaccgaagtgttcataccaaactcattctcaaactccagcaaatctgacagtttttgatccatttgaacctcaactaaaattctagggtagctcaatctctctctgtctctagttacactatccaccatagtcgggtttccaacttgagctacaatcttgaagagtgatttctgaccccaatacttcaattctagtccctctagttgcacccaaactggtaccttttgcacatcttctttcttatagttttcatttgggtcccaaggtttcatcaccaccggccttctattaaaaaagatgtatccaccatttaatacctaatccctgtcctcaagagagtgaaatcgaataataaaaatgccatacgacagcattttcactctgtcgactttcccctgccagatcctgtgcacaaatccatccaaaacatggagtgggggattcactcctaacacatagcacactatggatgatttccaaaaatgaatttcatcttcaatgtcatccattgtaatcctaactttgttcacattctgattaacatgcttaaaagaattctcaagatttcgaactacagtattagacctcagaataggagggatcgatttcttaccagctgcaatatcactgttgcattggttgtttgcctgaatgaagtgtgcaaagtcactacgaacatcttcctgcctcttaatcgcgtccagagacgattttggtgaaagtggttggaatacatcgattggagcagaatcatcgtctctcgcatcctcatccgaaagctccagggcttcaatttcagcaattctttccatcaagccaacctgtaccgcctcagttacctccttccttccagctttctttgagagtttcgttgcagatttaggttttccaagattcttggatcttgttttagccatggcatcagctgaaacagctgcaagagcaggaaccggaaaaacctactcaaaacaaaattaaagacctaaaaaattaaacaacatcaaacgaaattttaaaaaggaaaccctaaaatttcacaaagtagaatgaacaaaaaa

SEQ ID NO: 122771 - DNA, 789 bp, Cannabis sativa
tctagttgactgaagcctttgatgagtaggaccagtccaacaagggttatgtagctaagtcctctccctaaatccatcacaattgtatacttttgataattaaatagatttaaaactgcttctgttttagaaacctaaagaggaagacttagttgatagtattacattattaaattaaggtaattgttatggattaatcaggtatgcacacctaattatcatatactattattatgttttatattatatacaaattgatattgggttgtaataccatcgcaatttacttttcgtgtgggatatattttggtatagatggtaagttcatataagtttttgtcattgtaggaagtgattgaaaagtattgttattgacaccttaaagtgtccaaaaccatattaatgtggtaccttgagagtggttaattagcaatttttatattatttattaaattaaaactaatattaattaattgcatcaataataatatattacctcttatagtatttagcatcttaaaatgtcatttagcatttttcttttgaaaattatttgtagatgctttttaatttagtaattaatattaaatttatgagtaaccaaaatctgtattttattttatctaggtttcatttctacttggttaatcacaaaacaactattactcacatgtaatttaatttagagggacacataaaattacaccaaaatttgtattttttttttaggcatttttacctcctgaattttgatatgtactaaatcatgtcccttgaacttttaaggtc

SEQ ID NO: 122772 - DNA, 1409 bp, Cannabis sativa
atatatatatatatatttaagatacaataattagtggactttgggttagacattataaataaatgtaaaaattcgtttaagaaaaattacttatcgtttgtttctaaaccatttttccacctctattctatataatgcaaagtcctggccataacattcgtttcataatctcacttgcaaagtcgcttttcacatattaatggtttcattaataaaatggttaattgtttttgcatttctttttcttctaaagtcataatttttaacttagaaaaacaaaatccatgaacatctccaaccttgccttcatctccataatgaattataaaaaaattatatgcacattaaattgcatcaatatccatcttttgtgcaatgtgttaattttcactaactagtcattatttttccaaattataaaattccaaaataattattttcaaaatgaaaaccaatcaatctaatacctcaaaccccacaaaataaaagggttatcagcataatcaaaagtcttactttataactatggaagatgaagaaacaatatgagcaaaaccaaagacatgtaaggatgcttcaaattcagaaacagaccaaacaagaaagagatcacagtcgaatctctggctgagtttgttcttcattagacattatttcaagtcttttgacaactttatgggccaaatcctcataggctttggacactgctgaatcgggcgctgacattactaagggaacaccttcatcacaaccttctcggattgctggttccaacggtatctaacatcatttaaacaaaaacagatcagaccacaacttatcgtgaactcaactaatgatatttactgatttttagcagcatacctcgccaagaaactccaatcccatctcgtcagctgtcttccgagtaccatgcttcccgaaaatgaacgagggttcactgcaatgtgggcacttaaaccagctcatattctctattagtcccaaaatctacaaaaaagtaatcagtgtttgattaaaaacattactaatgcaaagcaagaggtgaagaaggtagtttcataaggtttttaaaatagtgcaaggagaaataatcttacaggaacttgaactttagagaacatatttacgcctctacgagcatccattaatgcaacatcctgaggtgttgaaacaatcaatgcacctgcgagtgaaacatctatagttttagcaaacatagaaaactcgcattaaaagatagatgcacgcctgaatcctgactttattttagtagcaaaagttcaggaaagacttcgaagcacaagatatgattcttagcttttaataaaggactttgcctaagcttcactttgggtacattcgcacaggttatcacgagatggcgcctatttgagcataatttctat

SEQ ID NO: 122773 - DNA, 1471 bp, Cannabis sativa
tgccttccttccttgcagaatctattcccagaacaaagcttacggaggaattgagacaaggaattactttttataagcctctttctaagggagatttaagagttaaagagttgattaccacccatttgttacgccagtacggtcttgttgctaccttctagagtattcacagagttaatggcaggggaaaacctcagactcccaacgatcttaaagagcaaacgagtttagagcttccagtggcaataaccaaggcagccaaggatgaggaacttgttgcagctgcttgagacagtcatcatctcgaacccctcactgaagaaggagagatctaggcgaagttcagagctacataccagtaagcaagtacttctagagctagcacttcggaaagagttaatcaacctttctacgtaattggcacccccaaccattttcagatgccactggtagaccaagggggtttcgatcattctttcttaagtttgaacccttgtagatatccaatgaaggattacattagtagggtagaccaattagttaagcaccacaacaatcgagaatttccccccaacattgttaaagtgggtctttcccttactatgttcttcttggactttagggaacatgacagcttcatcgactgggaagaaataaacttatttgcaaaaggggaaccgtatagttacacattctaaggttgcactcacatgctatccttttactttttgaaatctgtgcaatttaggctgttactttctaccttttaactgatgagctttcttgtggtgttacaattcttccagatacacttcagtccaagatgctcaacaatcttataaacactatcaagaaggttaatgttacggccgatagaaagggtaaatagaagaaatcccaaaccaagaaattcaaataaatattgcatcctctggcacccccactaaagattaaagattccaccaaacctcgaacgacccctggaggggagagcagtggagttgtgaaaacattggctctgccaaatgttgatcccaacaatagggaacccattctcccgtctaacgaagagtattctggcgaaggacttgtgttcccgaggttgaatgattcgctgaagcattccaacactgctcctcatccttgaagagaagaaaagagggctaaacattctgtaccagaatactctaaatccatgagagtgggaagccttcttgctttcaatcagcaatcgcctctttcgacccaaccaccatgcaacaacactgacaggcaactggtccttgtgacctccaacactttaaccaaaatccaattcaaataaccacataatcaatccaaaacaataccgcagcgtcaggtagccaatccatttttgccctaacttctttaagccatccatccaagtgctagcccaagatatgtttccaagagggggtgaattggaaatttaaactaatttcggtaaatt

SEQ ID NO: 122774 - DNA, 1973 bp, Cannabis sativa
ccatccctaatacaaagaggagggaagacataggatctccttgccttaaccctctctttgcattaaagaatccacacatagagccattaaaaaggagagagaattttggggtcctgatgcaggtcattaccagctcaatgaactgaatcggaaacccaaaaccaataagcatttcctcaagaaaactccattcaatggtgtcgtaggccttcctcaaatctgttttaatcatgcagcttggcttccatatagcctcaccatatcttgacataccagaacatcatgcgcaatatatcttccatgaacaaagcccccttcattttcagcaataagatctggcaacaccttcctcaactctttattcaaaagaaaattctttgatacaagaagggtggccaagtctataatgccacaaagtgtcaacatttatgattgaatcagaaaaagcaagaacaataggattagaatcaggtttaaaaaagaaaagatctccatgtctttcacccttcccaatcaccttattcttcttggtgtcctgaatgatacaagaattatcatgaaacacaaaagaacaatcagctgaagacatcaaagttgtaacagacaacaagctgtatttaaaatttgggacatatagaacattaacaagaacaatttcttgtgaaactttggtgttaccagtacaagaaatcttgtttttggtaccatcaggaagagtaacagtaaacaatataggcttgtgacagatgttggtaaataattcaatgtaaggacaaacatgatgagttgcccctgtatcaataatccacttgttttgatgaataaaatcagtcttaccagagaaattcgatacaaggggctgagtggaaggtcctgtattctaagtatggaatttttgagctatcatggccatgattttctgacattgattgagagaaagaccagctagaggatcttgattagctcaaggactccctttagtattgtcattatgtgtctcagacatattagctgttggttttccttgtgtggttctgctctgagaagtgtcaccattcttactaggaaatcgatcgtgcaacatgtgccccggtggataaccatgaattctgcagtgtatagacatggtgtgtccactaattccacaatgattgcaaaacaacttagatctatgagattgcactcctccagcaaactcacgagcaacctcagaaccagacttttgagattccatttgaagggaagtaatacctctttgactttcttcttgaatgattgaggcataagccttattgattcctggaagaggttcttgcattaagacttgcgacctagcaagactgtaagattcatttaaaccaacaagaaattcaagaactttctcttcttcttggtactgttgtatcactttcatagccccacaagtagaaactggtggtggtctatgttcttgaatcaaatcccacagggttttcagttttgtaaaatacgaagtcacactactcgaaccttgattaaggagattcatggcacgttttgcctcaaaaaaacgaggggcattcttttggttgaacctttcatgcaactaagactagatggtagaagcattatcatggtacataatgctgtctcctatttcgatggatacaactctcaatatccaagaaatgattaagttgttacatctgcaccaacattcatgatcttcatcttcttcatctggttcaggaaatctacgatcaacaaattcattatgtttctcgcagctaaggccaccatcatcgatgtcttccaagatccatagttctcacttaaagtaagaacttttgcaacaagcatggcactgggatggtctttgtgcgacagggagtatggatgtaatgaccgctctagtaatttggattagtaagggcaattaacactaatttttattattttattattatttatgaattaatttaattttggacccc

SEQ ID NO: 122775 - DNA, 2075 bp, Cannabis sativa
  modified_base (2016)..(2044): a, c, t, g, unknown or other
ttggctccatgaggaagattgtacctccataatcttaaagaattggaaatcaaccacggcaaatccatctacccaaatcttggaaaaatcttgcagattgctctcttcaattgcaatcttggcatagagccaaatttggagacttgcctaaaaaaatcaaaatctctcaagaaaaggtggctgcccttcacaactcttcggacactagcagatcccactttgaagagcttaaatcaagcgaaaatatccttgatgaattacttgctcaagaggaagactattggcaacaacgtgctagaacttcatggcttaaatcgggagactccaacacaaagttcttccaccaaaaagccaataccagactcaacaataatactatcaaagaactcttcgatgaccaatgtgttttaagatcatcaaaaaaagaaattggggttatcattgaaagttactttcagagcatcttctccactattgggtttgatgcaaaagccattcaacatgtccttcacattgttccgtgcaccattttagctgacataaatcgctccctgctactgccttacacgcgtgaagatgtgtttaatgccttgtcctccatgggagacgatagcagccctggtttagatggcatgcccgtcatgttttacactaattattggcatattgttggtgatttggtgtccaaaacagtccttgaggttctgaataatggtgcggatccctcctgctttaatcaaactttagtaactttgattcctaaggtcaagaaaccgaatgctatgtctcaactttgccccatcaacctctgcaatgtgttatacaagttggtcctaaggcaattgtgattcgaattaaacctttcctttcaatggttatttccgaatctcaaagtgctttcttcaatcgaggcttattacggataacgtgttggttgcttttgaacttttgcactcattaaaacacttaaagagaggcaaagaaggctacgccgccatcaagctcgacatgagcaaagcctttgatagggtggaatggcactttgtttacaacatgatgattaaaatggggttcgatccagctgtagtggatctcatttattgctgtatcaacactattacatactctttttctgtcaatggctctattcaaggtcacctaaatccaacttgtggaatacgacaaggtgatccattgtctcctttcctttttatcattatgccgagggtctctcaaggctttttcagttttaagaacaacgaggtaatcttaacggtcttcatattgccagaggtgctccaagtgtctctcatctattttttgctgacgataacctcgttctctgccgtgctaataaaaaatctaccatggccatcaagcgatcacttgattattactgcagagcttcacgtcaaagccttaatgtggataagtctgtgctttcattctctccgaatacacttctggtattccagtcgaatgtttaacaaattctgcaaatggatatcaaaccatgtcatgaaagatacttgggattaccttcatattcaggcagagacaaaaaatcctctttggagaaatcaaggataagttatggaaccttctatccgcttggcaagaaattttttttttcagttggtggcaaagaagtcttactcaaagctgttgcacaatccattccaacctatgtcatgagttgttttaaactctctaaaactctcatcaaccaagttgaaaccatgtgcaacaaattctggtggggttctaactcctcgtcatcgggtattaattggaaaatatggaaggctctaacccagtcaaaagttcaaggaggaatgggttttaaaagttttgttcactttaaccaagctttattggcaaagcaagcttggctaattttctcgaatcccaactccctccttttccgtattctcaagcctagatatttcaaacatgattcctttcttcatgctggtttgggttcctacccatctttatgttggaaattattttacnnnnnnnnnnnnnnnnnnnnnnnnnnnnnttattaacatcctaaataagaactttctaaa

SEQ ID NO: 122776 - DNA, 992 bp, Cannabis sativa
agtctatactgccgtataaaaaaagcatacacagtaaaaaagataataatgccgcctgacagtataaatgtaataaattggaaaaagttagtaatttatgtaaatttccctttataaatattatctatactcatgaatcatgccatattcattactcatataaataccaattattgttaaaccttataactcatgagctccatatatgtatagtttatttctaaaaattaatggtagaatatattgatacactacaaactaatttaaattaggtttttaatttcttgaacaagcaactgattaaataaatgtaatctcaaattaataataataataataagtgactttgtaccagattatattaaaatataatactattttaatgtattattaagtacttacttcctcatattaaattttctttacaaaatcatttaatatatgacattttaaacacttttattttaaattttataacttagtcgtcacaaaataaataattaaataaattacaacttaattatacaaaaaatatgtctcatttgctttcatgtagcaatattgtgaaaacaattgaaaaataattcttcctatttttatataaaaaaaaataataataaaaaccgtaaaaaaatgttaaaaattttgttgattcctattttttgtaaactttttattatttttggctctgatactatttgtaacattcccgcatcaagtctctattgagattcgccccacagacttatgactcttatgtatgagtacgtcactttaaatttttcctgaaatgacgattgtccctataaaccagcacaagtatctccaacgtactttgtcctcactcgcacactttctaaaaaaaactgaggatgtcacctattccaagattactctaaatcaagcacgctgaacatttcagttcttaagtgatgggccaccaaaaaacaagatgcaccttgttaatataaatagtaccaatcaatccattt

SEQ ID NO: 122777 - DNA, 955 bp, Cannabis sativa
aattaaaaaaaaaaaacagcatattcagaacaaggtgtcctttggggttctctgctagggcttgtgctattcgtgcttttccttcccttggtgttgaagggattccggtgtgccggactggtgtgtattcacccttgccatggaagaattgctgtcaaagaccgataagcttcatgtctcggatgaagaacaatgggaagtggatcattatttatctactacgattgctaaatacaatctcaggggccgtctatgtaccaatgtcgatcacagcagggccttcctcaagaatgtcctgggaagaatctggaggttgaaagaggcagaatggaacatcaagattaaggagaaatatgattcaggtatgttcctcacgttctcctttgcctttgaacaaactcagtcaagaatcctagaaaagatgccatggtatttatcaaatggattattaatattggggaagatgggaaattctagtgaatcttggaagaacgatcttacggtattttcgatttagggcaaagcattaggggtacaagtggattatcttactgcgaagaatacttcgagactagcttcaatgacagggacggtaatcacaattcataactcggatgtgtcaagaatggttgctaacagtttctttcgatttcaggtatggatgttaattaaaaaaccaatttgccctggctatcaattaccatgtgggggatcaaagacatgggtggccttcaaatatgaagaactaccgttcatatgctttcggtgtggatggattggacatagctagaaagattttaaattggaaattaagagagttacaggggctggttgagaattggctactgcttacggaacatttgttaaaggtggagaatgtggtgagaaatgggtttcacgaggaaaggcttggcacaagaaaggaaatggacataggggggctagaaattccaag

SEQ ID NO: 122778 - DNA, 2674 bp, Cannabis sativa
gcagccacactacttccctctctacaaatttaatcttttcaaaacacttcttcttcaacctaacggcagcagccacacaacatttagggttagagttttctaacaatattcaatcttttctcttctactctaacagccgcacaccaatagggatttcaagggttatttcaagtttcgtctttttctcttctaatggcagctagggttctaaaggattcttctaatattttcttttttcctcttctattctaaatggcacaacattatgatcaattttcgaaatcgtattgtttaagaaacgattccaactattctgaattatgattatgaaacattatttatattattagttaatgtattttcttgtaactttttgaagagtcacaatttattttatttatgatttatgagttgtgtgaatgaattggtgcttgtgcaaatgacgaaaggttgtattggtctgcataattttttgtaaataaaattggtttacttaatatattgaataggtgtctcttaaagttaatttttttgtggtatattctattaagttttttggtatattctcttaagtgcacaacaaaaactgttagataggcattttatatattaggtaagatatttatgaaatattttttttgttgaattttttttattagaaaaaaattgtttgagatatttttttaaatatacattttttaatttaataaaaaattaaaacgtgagagaattaaggagagaataaatagaggtatttagagtaattttaaaatgttataccaccgttttatatctccgctttattgatatatataaagatatatagttttattaaatattttttttgttggatttttttttgaaaaaaaattgtgagatatttttttaaaaatactattattagtattattaggttagactcagtagtcagaaccaagataaactattatatggtattattgtaaatagacgtgtcagtgtaacacgtaggtctatgtcaaatagatgataggtgcaatgacatcaatatttattatgtgatttctgattgttatattgttatttatattgtcttgctgggccttggctatgggtgctctactatgaaagaaagggtatatctgttgttgatcaaccatgagatcgagagctttgcggtgtgttgtccatgttcaggccaagctagaccacgagggttgggtctaccatgagaaaatgttgtaatctccacttttgccgcataggtcggggtgtacggataacttgtaatattttgaaaagtttttaaatgtaatttttggatgtttgtaaagtttaataattacaagttatgattttactctctatttttttttaagtttaattttcgctcttaactctagtaatcccagcttaacgagattagcgtttgttttaattgttgttcatggcttgcctattgttagggcgttacaaaatgggtcttaactttgtacagggacataaattgggcatgtcacgaacatatttgaggcatcatatgaagaatcagattcaaattactttcatttttggagcacctagagcaccaggtgccctaagtacccaatgccaaggttaacatattgtcaacttggggtacttccaagcatcaaactgaagaactatcctaagcattttctttatcttcatcaaaaacgagaaaaaaagtgctttcaaggaagtaatggatcaacatagaggctaaaagggggagcacccaggttgacacctagtcctgggcccaacacccaggttgacactttgtcaacctgggccatttccaaggagtttttttcgagaagtcttctaggcatattctctttttttttttgtcaaagattaagatacaagtatttttggaaatcaaacagagtcatttggtggctagaaattagacccaacgcccaggttgacacctaatgttgggcccaacgcttaggttgacattttgtcaacttgggctgtttctaatcatatacccaaaaaagtgttccagaaagttttttcttcatcagaaataatgaagatacaagtaaacttggggagaaaatgagaatccaaggggcgtgaaagttgagcccagtgcccagattgacttggttctaggcccaatgccaaagttgacaatccacttggtatgctcgtctcaatcatccaaatgcaaatgatgcttcgagcattctctctagcatggtcaaaaatggggtcagagaccttgtcactgattttaagaaccttggaagtatccaaacgacatccccaaagttccaaaaagagcacccaacgcctaggttaacgtatgacctggtacgttggattttgcttatccgattctgatcttgcctcaagcgtttgtttatttttttgtagtaaacaagagctatgaacatataaaagtcaaattcacaacttcatattttcacttttttggcaaagtgacttagtcgcgaatcgggtagtttcgagtctcctaattttgcgaaatagaaacatcgccaagaattggtgaacaacttcattataacacagaaactagctaagtgatgtcaaaatattacttaggcatcaaaaaatacattctcaacacgattttccctttgcccaacgtccaggttgatattatattgtcggaaatttattttaccaggatctt

SEQ ID NO: 122779 - DNA, 3247 bp, Cannabis sativa
  modified_base (128)..(137): a, c, t, g, unknown or other
  modified_base (1687)..(1691): a, c, t, g, unknown or other
aaatattggggtccacaattaaattaattcataaatgataataaaaattagtgctaattgcctttactaatccatatactagagcggtcattacacttcatatcttttaaattgataactaatcagannnnnnnnnnttttatttagggcacaaaacccgacactaaattagtatttaattttgatatgcttggtatcaaaattattgaaaattaatcttttacgattgaattttgaaaacttatgtacttaaggagaaaaatggtcaaaaagtgaacactaaattttggcatgcatgattcacatggaattaatagtgagaagttatagcaaatcgcttaatctctgtaaaagactaaagcaagaatttttagggatgggacctgaatcccttagtgttttgctaattgatggtaatctatcttaaaactagtaaatatctagtcttaagttcaataggcaataattaattagtcaatagagtgaatgtggtactcaattttcccatctatgaatgagtacatgtggtaaaatttgagggtcaaaactgatttttttttaatggagcttaatcttaagaaaactcaattaagctgaaaacgtgtctaaagagtggtgagacactaaaactccacctatatggactagaggtcgtgccgcctcgtatgagaattgggaattattctctagagagtccatgaattggaattttgcacatggccattaacagtgcaagagtgagacatgcggtctcaagtgagcattagcaagggtgtgtgtgttatcactgatttttactagaggaatagtggttaaacgctatggcaaccaaaatttcatgaaacttagtggtaattacactaaggtaaagttcaactcgaaagacattttacctaatggacctaagcaagatgtaacgccttaatacttaggcatgctacaataattttttcaattacagtgcaacctttactaatcaaaggatttttcttgaaaatcatgtcaaacattagatttaattgctaaactatataaacttttgagtaatttgtggcataaatacttaagtttaacttccagtttctaacaaatacataagtttaatttttagcagtaataatacctaagttataattttggaacttctataggtacctggttaagtaaattgccacgtggcaatccctgattggtccaagttcttaaatttttattattttaaaaaaacttagttcaaatatacctataagaaaataacacgtggatttaatggcttaatatttaatggttaggtatccacttagttctagtaatagaacttaagtattattactgccaaaaattaagctgaggtatttatttacaactgaaatgaggtattgatgatacaaattactctaaacttttatacatttatttacgaaagtcggaatctcgtatttaaactttaacaacattatcaaaatatatttagtctggtcgcacatcgactacaaaataaaatcccaaatgtttcgagaccgaacactccaggtcgcgccaccatgatatgtacaaacaccaccgtatctcaaagtttactcatattcagccttcgcctttccttaacctacaaatggaaataacaattgtgagtcgacatactcaataagaaaagcatataacaaataatataatatcgacttgnnnnnaggcgcccatacacctatttataaggcttaataaatgagtaagaacgttctttactagggtacaaccactgtatcacatacactacgtaccaatagtgtacgagtgttggtagagattatcttgtaccccgagtacctctaagtgttgtaccacacacaccctgtacttttccgtacatatgctagtaacaccgtaacgtactctttaaatattgtacactataccaatccactctgtaccacatccgtacaagtgttggtagtgtactaactataaaaagcatgcatatatatcatacatacataattcgcatatatatatatatatcatatgttctgcgctatttgtaatgaccgcatttttaatttggattagtaaaggcaaattatatttgtaattttatgattacttatgaatttaattatttgtggtagagttataatttctcaattatggatattttattaaactctaagtttattatttgaattatatgtgaaatattttatttttgtaatttttgctcggcgacaacggaaaacgcgatggctggctagtttgatcacatgggtacatttagaaccttatttcttagtgggatatattttggagaaaataaataccaagattgtgcgcggttatggtttttgaccattttacccctaggcttataattgtttaacttttgaggctaaaggccatttttggtatttccctaatttaagaataggtggctaattagttaggtgacacctagccacttttgagttcagccttaattagtaagttatcctttttgaagattaaagaattaaaagaaaagaaagaaaatcaatttagagaaaacatcatttctttctctctctttgtcttcggccctctcaaactagaaggaaaacttagcccaagcttcctttttctagagatttagcaaggattcaaggtttttgcaagttaggtaaaccctagaaacgtttatctgatgagtttataagtttttagttgagttttggttggtaatttctgatttcaggggttgtacgaattagggtgttgattgttagttttctgttgtttaatgatgatgttttatgtttgaatttactgtttttcaagcttaattcgtaggttgagcaagtttgagttctaatggcatattgagtaattgagtattttacttgttgttactgcttggaatctattctttgaggttatcataggtgttctggaaggtatgctggaaattggggttgaattggggaagtttcaaagtttggggtttttcagcagggaaaaccggtttaccggttttgggatttcggtctgtcagtttttgcagggtcagaaccttagttttcatatttttatcggggtttagtgcagtattaggttattggtctttaagactactcttgattataagtttagggttttggggaaaggtttactcaaagttatttacccagttatgtgaatgtggcttagggcatccatccagcacaaggtttttcgttcaggtcagccaactcatttgaattcggaaacaaggtaagaa

SEQ ID NO: 122780 - DNA, 533 bp, Cannabis sativa
  modified_base (491)..(507): a, c, t, g, unknown or other
tcttttagggcacaaaaccgaacactttttccctaagtaagtttttgtcctttagtgaattataagagaatgaattaaatctgattttagcttaatgattttattagataaactaaaggaattatcttttattttttttttttttaccaaaattagaaaagaacactctctttctttcttcaaccctctctctcaatctctcttgaatgcagcaagttgggttttcttcagctcaattctcggtgttctagcagaatttgtaggtttcaatctaaggtaaacttccaagctctctttccatggtttttttctaagttgtgagataggttttgtgcatgacttttagagttaggtttctgtagttgttgatgatgtttgattttgttttctgacgatgtgtgcatgttatttgagctggtttggagttgatttgagtattgttgttgtgtttgaactttatgttggatattatttgtgacagtcagtagtcnnnnnnnnnnnnnnnnnaaataccgggtaagctgtgcaatccc

SEQ ID NO: 122781 - DNA, 671 bp, Cannabis sativa
taacccatgttcttatatatggtttctctaccatttattctatatgggacaatattcacaatagttgcaacgaataatagaacataattaaactcacattttcagtcaacgattccataaagttattgatcaacctttttttagtagttttatgtgtttttttcttgtatatgtacatggttgtagtaaagcatgcaagcattccaacaatgagtgattagtagttccctaactctatgtttgttgagttgagagattcattaatgttagaagtaatagttggatacctattgtgtttgaaatggtaccctgaccatttgtagtatcctactttttctaaatagggttgaatatgcttatcaaagctttcaagctccctcatatggtattcaaatgtcctctctatgtgtgctctagctactacaaagaatggtttctcaattttgcttctattcttttttaaggttgtttctaggttgaatgataggtaataaatccaatagccatgggttatatctaggaatattttagcagtttctttgagtatgctctcataccggtctaagatcaagcattgttcttctttgaccccataagttcgccttagtatttcaaaaaaccaagtccatgcattgtaattgtaacgccctaatgctaaggcacgctacagt

SEQ ID NO: 122782 - DNA, 6364 bp, Cannabis sativa
tattttattttgttaccaaaaatatcattattttttgaactaggttagaattttaataatttaaattaaaaaagaattttcttcgatctcacgcaattttcatggatttgacaataaacattttttttgtttttagtacaattcataaatatattttttagtttttattttattattttttaatgtatatttaggcttaattgtgatttaaaataaaaaaaagaaataagtatttcttttttcagtgttagaagaacaataaataatagtatgaagggacatgagaatttttcaagtaaaattaataagtaaaagtaaaaaaataaaataaaaagaaaatctgaattaaaagtgaaaatagttttttttccttagtattgttttataaaaatacaggtgaaaaagttatgcaacgtaatataatttttttttgttaaaaaataaaatttaaaatattattaaaaattaagaaggagatatgttaatatacaccaagctctacatttacttttatgtaccctactctcttatcacctttagatttttaatctaggtacaataaaatgtcctcacccatagggacaaaacaaggatccctaccataaaagtgtcctatatataatgagacaattcaatataatgacttgataattattatacatgttatatcattgtagaaatgtatcttttatattaatttttgctatatttagtcgtttaattgataacgtgacattctaggggaaaaattatcaaaaaaaaaaagacattctagtggaagataaaaaaaggaattgacaataatttaggaggaaaaaataaatacaaattcttatacatagaaaaatgacactattgataagacaaataattacataaacaaataaacagagtatatgtttacctaatgaagaaaacacttttttataaaaatattaatctaaaaactcacaaaatccattaatcaataaaagaaaaaaataaaagagagactgtacaagaaaaagttgttttgccgacaactaaaatcgctggtaaaagtaaacgtaactcgtcggcatagttttgctggagacattttatcccggtaaaatatgctggcaatgattcgttgacataacaattttttccagcgacttcagtatatgcgccaacagaagtatttacaccgacgaattaagttgctggcataagttcatcattgaaaattttgtgctggatgaggtgtccatgacgacgttttgccagtaaattaatgcgtcgaaaaaactttgacgctaatttggtgcctcattttcattttgtccccaaagttttgctggcgcaataattcgccggcgaaagtatataatataaaaaaattatttagttttggcggtgacttaatgtgcgccgacacaagtatttttttaatatttatatttataatatataattaaaattataatggaaataataatacatatatataatgtcagctatattataaaatcgaaatctatattgtaattacaaaactacataaaatgtcataaactaaataaaagtatttttagtttataaacattaatattatttacactgcaaactaaaaaaactatagatccacagtagcatcgtcatcgtcgtcatcaccgggatggcagtctgtgaagaggacccagtgccaagaggttgaaatggtggaattggtggaatcgaagacatcggggacatattaaatcctagaacgacacgactaattacatcatttgttgctgaaacacactcatgatttaattccgagtctgctttatctgttgttgccactcgtaccgtgcttcctgctcttccacccttcgcttcagggcctcatattcctcttgagtgaaaatggactgcctggagggacctaccctcggcaactggcccattcctctcaagtggcgtgaccactctcccagcacctgtgtcataacaggcatatctgcagaaaattaggtggggtcgacattgtactaccgcgggacattggttggcactggttgagtttcacaaacctcaactattttggcctacaaaatatttcaacaaactgttagagttgaatagaaattaaaatatagaacgagtttattaaaagtataaaattacttacatgcaattattgtgtgtcctcatcgcaccatttattgtccttgcagtgaaactttgcaaaagtatccacaacattggaaagctcttttgtctggggaccagcctatttttatacaatataaaaaattagaaagatattattcaaaaaatataaatttttagacaaattactatgctgaaaatatcatgtcccgctcacaatgtggctaactaaaaacttattgttatcaaaatgagaaaaaaatcataagttaatggatattaaattttacaactttcaattaatacatgctgttttgggtctttccagtatgcgatagcttccgcccacacctctggtgtcaccatatctgacgtgatatcttagtcgcttctacctctccatatttttaaatattctccttccatgccttttgcgtatctgttctccagtcacgtaaccgttttgacattgatttaagaatgtaatcctcaaacataggattgttagttgggaactcaaacttagtctaaaaaaaataaacattaaaatcatatatatttatttttttgtataataattttgtttgatctattacaataaaaatttgaatgttaccactattctgtcccatatagtctgaatgactgtacctcaatgtcctcgaactcaaagttgttcaaagatatggtatttcgaacaagaaactagatataattgttaaacttattaccatagtgtctactggggccccaatccccatatgaaatctaaattttaatttatgaccagcaggctgcttggcaagttctgttcaatatttttccccttgtactttcccttaactccctttttcttactattgcttgcagttgcatcaactattttatacatacaagctacgaaaaattaattaatcaaactattaacaaaaaaaagcgtatttgatttaattaatagtgggtttaaatattataatattttaaagtctagaagtcatcataatcatcatcatcattaataggtacattatttttattatcactatcactatcactagtgtcttcatcatcattataaacaatggaaccatctaaatattcacggttaggctgctcacggtccctgttggtcacttcaattgggtcaacatcatcacgaacatatttgacatcgtctagctatgcaagttgaacgactaactggatttccaaagagtttctttcttgtatagtcctggtctcatcatcgtcctcatctgagaaatctcaaacattgccaggggtgtaaaaattgacaagcttctaatcaaatccattcttcaggtcgggaatgtaatatatcaattttggttgggatgcaagtattaatggttcattttagtaccattcacaggggacacagacactagtgaaaaaaccatcactttttgtcctgttaccgtttgtgtcccaccacttgcaactaaaaagaataacactataatccttcaagtaagtgaactcgtacacttgtttgagtacgccataaaaatttttaccaccttctccaggcaccaaaacaccactattttgggtattacgattatcatcccgatctcaactaagaatttaacactgttaataatacatctaggataacaatagcatgttggattagagggatttgcgatgtcgtacgactcatctgatacttctataggattatctgcttggagttgattgatttaatattgggtgaaaaatgtaatcaatactaggacaataaaccgtatttgaatgacaaaattagtagaaagcaatacttactcgagacttgaaccaattgggaagctcattctcttaaattgtgtcaagattttgatcacccttaagttatagctcgttcctatgcttactacacacaaatagtatcatgtaagagattgttttcagtgaagagaactaaattaagaatgcaaaaagtatcttacgtgatatacttctccacttcattacaattgttcagaatgtaccactctgccttaagcttttcttacattggtaaagaaacaatggtcctcttaccaattggtcgcccaacatgcttgaatacagagaattccctttcaggcttatttgggaggacatcacaattttgatcttgttagttaaattgaaattcaacttcctagaagtacattgaacaaaagcttaaggtctcgttaactgcataagcttcacaaatagatccttcctgttgagatcaattttttacatattatttgtacacggacatgactcgttcaattggatacatccacctgaagtgccctggtcccccaagtatcacttcattaggtaaatgcatcaccaagtgaaccattatgtcaaaaaatgctggtgggaaaatggtttccaatttgcaaagattgtccaaaatacctttttgcatgatctataggtcttcaacattcaatgttttagagcacaatttttggaaaaatacacacagttcaattattgtatcacagacttctttcttcaaaaactttctaatgccccgacatcaagcattgtaacaacacatgtcaaccgtgagaattcagggtagaatcttatcttcggtctcattcacattcttctctaaatttgaagcaaatcggtctggtcactgggaactgcacagacttaataaattcgcaaaatttacccctttcaggaagactaagtgtgtaactagcagacagtttcctccaattcccattgcggtctttaaacaaccacaacttacgacgtattttaaggtcctccaaatccaatcttgctttgtctgtatccttagacttgccctcaatacataaaagagttccaagtacactgtcgcacacatttttctcgatatgcattacgtcgagattatgtctgagagacaggtccttctaatactctagttcaaaaaatatactcttctttgaccaattttactcagctatatagaacgtttatatttgactccaccaaatttcttgtgttttccaggcaaaggatattgtatctctacagctaagctaaaacatggtccctcgacaattttagaggaggtggtcttttctcagtttttctatcgtattttttacttctccgccttggatcatccatttcaagaaactgtttgtgcccaacataaccaatcttgctgcgcaatccaatggaaggggtatgttcattacaagtggggcacgccttgtacactttggtgctccaaccagacattattgcatacatcgggtagtcattagtggtccacaaaatagtagcacacattgtaaacacagtcctattgtaagcatctcaagcttggacacctgactctcataactctttcaattcatcaatcaatagtctcataaaaacatccatgtcttttccacccgcaatgtgccctggaatcaatagagacaacatcaatgactccactttcatgtacttccaagggggtaagttatacaggactaaaataacaggccacacgctataagagttactcatgttaccaaactgatcgaacccatcagtggccaaatccaacctcacatttctggattcaagtgcaaaggatgggtggtgcctatcaaactgcttccactcttacatctgtagggtgtctaagcacgtcatcctcttttgatctcttggaatgatgccactgcatgtcctcgaccgagtgtcttgaactgtataacctctttagtctcggagttagggaaaaatatcgcataacttcaagagcaacttttttctcatttcctttttccttttttcaacgactcccgccacaaataggacagaaatattttttctcattctccttccaaaataagacatagtcatacttgcatacatcaatggagtcataacctaaactaaggttacgcaacttcatctttgactcttaatgggacttggttaattttgcaccctctgaaaataactcactcaatatggagagtaacatatcaaatgaattgttactccacttattgagaactttatagtgcatcagcttcaccaaagcattgagtgctgattttctacaacctggagacaatttgctttccatatccttgtaaaaattatcgtacttaccactaccatttagcgtggactcgttgaatgaatcagtggtagaacttgtatcgtcaaaggcaggatcttctcttaaaatatcagccatcacatctgtcatttcttcttcatcgttgtctac

SEQ ID NO: 122783 - DNA, 1050 bp, Cannabis sativa
  modified_base (990)..(1019): a, c, t, g, unknown or other
taagatcctggtaaaataaatttacaaaagtatgttcatttctcttgtcgattaaggatagctagtccttgtcgatttgaaaaatttccctctctcttttttttttttgtggccccaagtgtgtagcatcattcactttgacttggaggcccatatgagtgccttctttaatttactacaacacactaaaagcgaactagttattgctaggagcttcttcttgcatagtggggctttacttagaggaatacctcagatatttatttttatgggctgtatagcggagacttcacttggatgtatcggtatatgagcattaggggtactgtctaatagaccctgtaagggtctggtgagctttttgaagtacacttgcttgtgtccatctccaagactccatttccttcctcgacacaaatgtatttttttgccccccgtagaagtcttcaatgccatccaattcccttttcaacatattcctccatagtttactcccagggcgtattccggtagctatgacaaacttatgttaatcgttggtcatccttcctaccttgggggcttcgacattaaagcgctggatgtactttagaatgcagcccgtgggtagttctcctctcatcccatcatcggacggctctccaccatggttgaggggtgacgccttcttcttgctttgctcttgaacaaggggtgcaagcgcggtgttcccccgttgcggtcttaccatggcgagtagattcatgttgctttgagcgacctcttaggctctcattttgcgataggccctttccactctcatcctttagagtgccattcgtggatgacatggagttctccctgttgccgtgggcggttgagatctcgcactcttgcccgcgacctttgtacaaaaagtgtgaagtttgagttttgccttcgagaatggtgctcaatacgttttgcatgctagccactgtagtttctagcctttgttggaaattattttannnnnnnnnnnnnnnnnnnnnnnnnnnnnnttattaacatcctaaataagaactttctaaa

SEQ ID NO: 122784 - DNA, 1026 bp, Cannabis sativa
cacacaccaaatccaaagtttagtgcctccttgcacttgctcttagagaggaagagataatgatgatgcaactcctaatcagtttattaatggtttcgacttaaaatatacggtttgttgaaagaaatttttaaaatataacagttatataattatatcttttttactatatttcgttttatttagcgttaaaaattaatattttgatcaatactaaattttaccttattttactaaaaactattaattttaatattataattttctatttttttttttgaaaaaattattacaagacctgataaaagtattaaattaattaaaaaaaaaattaggtaaaaactaaaatttttcttgaaaataatattttcaaactttattttattataaacacatattaaaagattgccgaactaaaataatttaaaatccaataaataattttaaaaaattaagaaaaaaaaaaagaaaaaaaatcaagcccatttatatttacaaattcatattttaaaaataaagaaaataattagaaattcaataaaaatatatatttttaaaatagaaattaaactaaaaaaatatgttatatttacttaaataaatctgaattttgaaaaagaaaaatagactcaaactacttgtttgtaaatttttaatgtacttttttatatctaaataaattttttaataaaaattaattaattgtttaaatcgcttaaatggttttaaaattttaatttcttttttaatttttttaataattaaaaataatttttcaaagatttaaattaaaattttaagatttataaaaaaaaaaataataaatttttctcgtttttatttaaaagaatcacgattaaataattatcaaagtttaaataataaagcttagaagacaaaattaacaatacttatcgttattttcgataaatgtcattttcttcataaataaacttataattataattttaaccaacatagtatttccttaaaattaatctagttatatttttttttttttttttt

SEQ ID NO: 122785 - DNA, 2279 bp, Cannabis sativa
cataattggatattataacataaaagtaaccatcaaattaatattgtgttgaacatatctcttatatatgggatgatgacgtcatttaaagaaagaacgataataatctaatttctacaaatttaaagcaactatcatatccctgttgcccaaatatacaataacccttaattttagcaaataagtcaaaattacgttcaaaacaataatcattcattataattatatttttggataagtttgagaaatatttttttatttattaattaaaaatattttaatattatattttattaaaatatacacatttttaagtaaattacctaatatacttttagtttctattaagtctaacacatattttacattcaatctaaaatgggtataaaatgtaatttcttctatactttttatctttaatatgttcaagaaattaaatatattaatagattatatatatatatattttttttttatttttttaaaaataacttactattattagtataattaaatattaaaatcttacctaaaaaaatatactttaaaaaatcttattcttaggcacacaacaataaaatttgtgactaaaaataaaaaaattcttatgttatcattcctatgttatcactaaaaaattcttactttgatagaatatcactaattattattcttaagattattaatacttgatagcaatgcttacttttttgtttactcggagcaagaattcaaataaaccttctcacaaaaaaataaagagaaatttatgtgcgatgattacaatttcattttaattacaaaagatgtgatttagtgttttattattcctaatactgctggtttttgaattattttgtaaacaataatgatgtgagagctcataatcaattggttaaatattattttggaccttatgttttgcaaaagttaccaattagaccctgtattttctaaaattatacaaataggatcctgaactgattctttgtcaaaataaaatttaataattgatcgagagatattatgacaaaactggttatattttctgtatcaattcgtgttagaaattattttaaagttggttatattaaaaaataaaattgttaaaaattgagttcagagtcgtatttttaccattttgtaaaatgtaaggtctattttgtcatttaacaaaacagagagtcaaattggtaacttttacaaaacacagagtccaaaatagtatttaccccaataaattccacaatctctcacagtcgcttcgttttctttcctttttattttttttctcttttttttattatttattattacataaaacttaaactgtattcataattttttttagagtaatttgcggttaaatcctttcaactatcatttcacttgcatttaaccctctaatctcaaattttggtagtaaaatcctccaaactgctgaattgttagcaaatttaagatgacatccatttatcttagttaaacgctgagatgaactatttacatgtaccatcatgtacatgtggcatatatttatattggttcatctaatatacttctttaaaaattataaaaatcattttaaaattaaaagaaatatttctcaatttttttttttaaaaaatcaaataatagaaaatgttcataataataaatatatacttagaaaaaataactaataaaaatttgtgttcacaatacacatgattctaaaaaatttgcttatgtagtattttttttttaaaaaaattaaatttatgaaatagtgattgataatttttctttttttaaatagaagactaaattttaatttttcactcaagatcctaaactgttggtcggtcctaaataatacgtaaattatagttcgagaaacaaaaattctaaatagtaataataatccatggagaaggtagagttgcaaaattggcaactagtcactattaaggtacaataatccatgaaaaataaccaaagaggtccctttctcaacaacagcatggaaagattttaagaatttgaaagtaatcaataagaaacaagaatttttagaaaaagtactgagtgaatattttatgaagttaataatataaagtaattgtatttcagaattacataaaaaaaggaaaaaagaaattggattttaggggtgttcgcggtatggggagtgcggtttttgactattttttcaaatcaacttgcacatgcggtttttttaattttccaaaccgcacccgcaccgcgaaactaaaaaactgcaccacaaaaaatggtgc

SEQ ID NO: 122786 - DNA, 578 bp, Cannabis sativa
ataatattctatatgatgttaaaaaataattacaatgtaattaaatttatgtgttattgaaagtaattatactataattgtataatttaaaagaaaagaagagttattatactatgtaattactaattttttttattttaaacattaactactaaaatttattaatttttttataattataatatattttaaaatataataagtaattatacaattatttctaaacacacattataactaatatcatccaaagttaagaaaatatatatatttatgtactttttttatcaaatcaaagttaaaagtaaataattaaaaaactatgattgagatgatcatatgcccaaaatacaaaacaaagaaaaagttagcttacactttttgagttgcaagctaagtatagtgaaaacgtgtataagtgaatttgatatatgtgagttcaaattaaaaatgtcacatatttgtattataatattgaatcaaattaaagttcaattttgtgattaagaaattaataaaagagtcttagaaaaataagaaagtagtagtatatagatcatataggagtaggagtagga

SEQ ID NO: 122787 - DNA, 1678 bp, Cannabis sativa
  modified_base (158)..(159): a, c, t, g, unknown or other
  modified_base (1641)..(1641): a, c, t, g, unknown or other
gattatattctactgtgttgacaatactataatcatgaataagtataggttctgaatttgatagaatttatatattaaacttataacatgaaagaaatcatgtgaatcatgcaacataaaatgatttctgatattttattaattagtaaatctgattnnattgaaatgagttttatttagagtataaaatcccaacaaaatgttatatgtgtttgcagctagggacacgtggagttctcatgataaatacagcttaaatacttaaggcccataatgggtccagttgaggtaattgggccgtatccataaatcatcagtccttccggatgaagaatgagcaactcgtccaaacgagatcccatccaacatggttaacattcgaaagacttaaaaccgcgtagctaaaagaagcctttagcgtgtatctggaagcccagtatagttttctatttactactatcatatcgcataagatgagggattgtctttcaataatctcagacaaaaagatcatatctttctaaataagaaaatatgataattggcaatcaagtaaatgtttcattaatttccacaaatataggataggattgtgacaactagcatcgtgatgtggcctccacgtcgtcaacatacacaacgcggctcatgggttggacttcaccagataagcccaaaattcatattttatttgtaaacttcctattagtgggtaaaaagagtaactagtatgatctctatgcactataaatatacaacaaatcctacatgcaaagggtttaaatttcattactcacatgcctaggcaaaagagagagtgctcgtaccttcttgtaatccctaaagcttttctagcctaacttaataatattgacccgtggactttggttaatgcctcaatcacgtaaatatcttgagtgttcttattttttttatttttgagtttttattctttgactcttacatttaaattattggtttccaaaaaatttggtaaacaacactaataaatccaaaaatttacttagcaatttttgaggtcagcaatattcaataaggtttttatatgcttccaataagaatttaatatttttgttgactttttttacactattttattaaaaaaaatatattaactttactctcaagattatttctaaaatgtataatttgtgctccatttagcccaaaatatgtacaaagttatatttagcgtacttttttggaattatgcgccaatacacaataggagcaaaatagttaaaaaaaaaaaagtcaagaaataattaatgtttattgaaaatgtataatacaattaatttagtttattttctttatgactattttttttataagattaaaatgggaattaaaaataaaaaatattttttaattaataaatgtattaataagtaacaaaatagtaattaaaataattggtattgattgtgagttaaaatttgactatgctatctttttttactaaatttggtacaatttttagtatgagccaaatttagggatatattttacactattattggagctttacttttatcaaaatattttcaaaaaggggaattacctcatatactattttttttaacttttttttttcttcaaatttacagtttgggtttntaaagtggttgcagcgctagttacagtaggggtttct

SEQ ID NO: 122788 - DNA, 1216 bp, Cannabis sativa
  modified_base (1163)..(1175): a, c, t, g, unknown or other
taaatataaactaaattaataatattaaattatttagatataagtattcatagctatatatatgtgtgaagattttttttttacttcgcaaaatataagaagagtgctttttttttttttttaatagaaggaatatgttatgaattgaatcaaatatatgtgcaagacaattgcgtggggctcactatgtcaaccaaaggggaaaacatgtcacacaattgcacggggctcacttttggtggggtgatacggagaagcggaaaacctgtcacacaattgcgtggagctaactgtgtcaatcaaagatgatgggtggccttggatttagacgtgtggaaactattaatctagctttcacccttaaatgggcttggaaggccttcactgatcaatcgagtatttaggaaaaagtatcataggccaaatacttgaaggatagaaacttcttggaagtcgagatgaatagcggggacttgggattatgataagttatcctaaatactcgttctcttctagctaactgtatttgcagaaagattggtaatggtattgaaacttctatatggttctacccgtggataccttgctcaaataggtgtcctactcctcttttggatgcaacatatggagtggcttgggtgaatcagtttatggatgaaaattatcgtcggaatgtggatatgttcagaagatggttcaattctaaagatgcaaaagctatcctcaatattgaactccctgaagatgatatcaaggatggatggctttggatgggtgaggctagtggggaattttccatcaaattgacataccgagttgtgagggggagaagatctatcactcctgctaagaatagatggaaaacaatatggaaatcttagtttcatcctcggttgaaactcatttggtggaaaatggagagggatgccttcccaaccagaggtaagcttgccacttttttgaaaattaacaatgcatgctgccctgtgtgtggagaggagactgagaccattttccatctgaagtgggaatgctcctttgcaaaagccatctagtttaactcttgcttggggctcagagttgagaggataaatgtttgcaaccagaaatagtggaataaatggttcttagtgttggaatttgttttaccaggatcttagatnnnnnnnnnnnnntgttgtttaacaccctaaatattaactttctaaaacgataa

SEQ ID NO: 122789 - DNA, 1931 bp, Cannabis sativa
cgaattttaaatttttcaatccaattcttgtaaagtacgagtgtgcggatttgattagatttattattttatgaacaccctaattattaccttgatatgtttacttaaaaaaaatgaaaattaataatatggtattaatattcatacaattgtttactaaattttgaaaatgtgaaatgtaatgggacccacacaaactagagaaaaaataaaagaaaagttctccctattttgatagagaatacatttttctttgctaatttattttattttaattttttttttttttgaaaatgaatttgtattactaagcagcactaggcacatctgctattaaacaagcagcagcacaaggaggtaaactatcagtcctcatttcagacttttgagtcacacgactccacctagctaaacaattagcaagtttattacaatttctggtgtaaaataaaaattgcagcgattgaaattgggtcttcatttgaatgattgtcttcaccaactgcccccaatctgtctgagaagaagaaccattaacaatagcagagatgataatcttgctgtccgaagctacccaagcattcttgatagaccacttctcggcaagctgaattcccaagtgtatggcagcagcctcggccaagttaacagccatacaacctggtatatatctggtttccgcaacaatcaaagcacctctattgtttcgaatggctgcacttatcccacatccttcctgtccctgcaccagagacgcatctgtgttgattagcagcttgccgtgaggaggaggtgtccaggtcgaggaagactttggttgagagttgaacgattcgtgatgttgcaatcccaggtgttgatcaagagtttctatagcccaaggaacccagtaagtgatattaggatttctgtgttggaagacaaattgatttcttctttgccatatcaaccaagtgaagcccacaaatctgatgaactcctccttagagagatgttcccactgccaccacaagaattccgaggcactatgaatagtacaatccttaagcttggagtatcccagccttttccaagttttttggaccgttggacagcaccatagagcatgggtaatattctcctcctgctgcaaacaaatatcacaaatagtcaatacatccattcctcttttcctcaaatccaccttagttgggagccaatgattaaacactttccatatgaagtttttcattttaggagttaaactagacccccataaaaacttccaccaacctctcaatttggaattgtttgaacaagcagcccaatccggattgttaaatcttaatttatagccactagctaccgagtacttcccattattagttaactcccaagtaatccaatccgggttgtgagtggaaggaataatgcctaaaacccaaggtatgtcatccttatgaaaccaactgttaacttcattgattttccaatctccgttagcagttatcaaggaattaagggtaacatctttgggtattggcaccttggttcttagatggaagggaatttgacgaggtaaccatgggtcttcattaactcgaatcttggccccgtttccaacacaccatctatacccctttgctagaagatcacggccccacaatatccctttccaaactgaagacccaaaatgtcccaacttggcctcaaaaaaggtttcatttgggaaataaagggctttcaaaactcggctaagaagacaatctggttcagttattaacttccatccttgtttagccaagagagattgattgaagtcttctaaatctcggaatcccatgcctccattctcctttagtttgcataatttccgccaattaccccaatgaatcttatgtttgttggaggttgatccccaccaaaagcgagcgatcaagctttcaatttca

SEQ ID NO: 122790 - DNA, 793 bp, Cannabis sativa
ttaattaaaaaattaaaaagtgaaaatagttttatataacatgtttttgaaaaatattttcacttttccaattataaaaacagaaaatcaattaaaaaaagtgttacaaaaagcaactaatattaattaaaattttagctgtatagttaattaatttttttttttgcattaaccgcaagataggtgtagtgcaaaaaaatacaattaatcacaggtaaaacaaaataattattaatgttctcgtgttttcaataaggctgcgcatgctcttgctaggtgagatttgtcccattcttgtaatggtttgatgtgtttttgggaggtgagtccccatgtactcaccaaactttgtgttttggcttaatgaatttcagtttcttagaaaaaaaaaatcacggtagaacattaattaatatatgttacaaaaagtggaaattccaaatgaaaatgtctaaactaaatcttaatactttaacaaacaaaataaaaatattattcttcaagtctcaaataaataaaagataaaaatataaataacactagttaaaatttatggtctattttcaattaatattgtttgttgtacttatatatatgtaggagtgtgagactaattttgaatagtttttattgataagaaaaaaaaaagaaaatatataaaaaaaattattatatataaatatgagtaactatttaatagttataataaaaatagagattatttcacaaaaacataaaaacaacaaaaaaaaaattacaaaaatacgatttcatggaattttaaatattttta

SEQ ID NO: 122791 - DNA, 2388 bp, Cannabis sativa
ttacaaaatcaaacatccatcaattaagttaaactttagctattttatatatttttttacttatgattagcgcttattatattttagaataattaatatttttgtctcttaaacttttgatactttttgatcttgttttctaaaatatactgcttgttaaaaatttccaataaaatataatagttaaataattatgcttttttgttaggtttcgtttcttttaatgttaaaacttaacatttttattctctaaattttgatcaatacataattttgttcctttttattaaaaaaaaaataaataataatattttaatagttttgagaaaattaacataaaattattaaaaaacttgataaaaatattaaattaattaaaaatattaaatttacttaaaaattaaaattattcctaaaaaataatgtttttaaattttattttatttataaacacgtattttaaaaagtcaaaaattaaaattattgaaaattcaataaaataatttaaacagactaaaatttttttgaagaaaaaattaaacttatttatatttagggatattggcagctaaaccacctgaactcttaatctgttttgctatgtacccctccgtccaaaaatcacaaataagtgcaacggtggactgtccacgtggcaaatttttagtggtccacataatattaatttttaaaaaataattttaaatatttttaaaaaaattaaaaaaatcagaaaaaaaaataattttaattttttttacttttttttttctttctttctttcttctcgaaccagcaactcattcttcttcttcttccttctcccattccttcttcttctttttttttttctttttttccccaaaaattattcagatcatctctctctctctctctccctctccttcactctcggtggtttatcctccagacccgacgatggtattccatcactggccgacgacacacgctgcacgaagagaacgaccaccctcagaggtttggacagtgaatggtatggttaaactcgggaggtctaggagaacaaaatccctcaatagatcgggcttgaagatcgttaaaatcgggtgttgaccatcgccggaatccatggagttttgagatgtttgactctgattcgatggcttctggacctcctttcgactaatagtctccaaatgtattttcttcttgacatgggcttcttgatctcatagttcaatacccctttcgtcactatcgaacttgggcagtcaccttgcatggtggttcaacggtgatgctccattttgagttttttatttcagatctgtatgtttttttttttattttacagaaatattggcggtaatggtagtggcttgtagtgtggtggttatggtggatggtgataactatggcagttttagggtgattcattatttctaggttttgttggttttgcaaaaatattcgtggtgatagtaatagtaatggaacccaggttgttggctcacaaagaagacgacaagaacagaaaaagaataagaaaaataaaataaaaatttaaattatttaaaataattttaatattacgtggaccacttaaattctgacacgtatacattagtatacactttagcagtccaccatagcagttaattgtaatttttagacagaggggtatagagcaaaacagaatgggagttcagtaggttttgccaccaaaattttagtttttgtggttaagtgttacaaaacgtaaagtttaggtggtttagccgccaatatcccttatttttataaactcatatctcaaaaaaaaataattaaaaaatcaataaaaatacaaaattattttgaaaaaaaagggttagaaattaaacttaaaaaatgttatgtttacttaaacaaatctagatttttgaatgaaaaaaaaaatagattcaagcttgttcctgtaaaatttaatttttataaaattaaaattttaatctattttttatatctaaatgattttttttatatttaaatgaattttttaataaataataaatattttattaaatcgcctaattagttttaagtttttttttttaattttcttaatcattgtgaatgattttttttttttttaagatctaaattatttttttaagatttactaaaaaaaatgttaaaactttctcatttttattttaaggaggtacgatttgatagtagagtttagagggtaaggttgctaattaattaacaaagatcattttaacagaataataggacggaactctgtaaatgtaaaagttaaggggattcttaataagctgtatattttaaggggtaaaataagtgttgaccgagattttcggcaactattagaatatgattatattaaagagctgtaagaaa

SEQ ID NO: 122792 - DNA, 934 bp, Cannabis sativa
ggattatataaaactaagcatgccctacacccttgagtccttcaactaagcttagcaaggatgagtatgggaaacatgtagatccaaccttgtatagaggtatgatagggagtttattgtatctcacaaccagttgtcctaatatatattttagtgttggcttgtgtgctagatatcaggccactcccaaacagtctcatgttactgtcgtaaaatgcaccttcaaatatttgtcaggcactgttgagtttggtatgtggtattcaagagatactaacatgtctcttatggagtacaatgactctgtttgggctagcagtttggatgttaggaagagtacctttggaggttgtttctacattagaaacaatcttgtgtcctgagtaagaaagaaatagaactctatatctatttccactgctgaggtagaatatatagctgcaggaagctgttacactcaatttatctagctaaacaaaatgcatatcgactatggttttcctcaagagtctcttgttcttttctatgatagcaaaagtgctattaacatgtcaaaaaatcatgtacaacattcttggaccaaatatattgaaatacgatatcattttattagaaaaatagttgagtccaaactttaaactatttctcatatatccacaaatgctcaactagctgatctttttagttttatgctaatttggatgagtatattatcaatgagaaaaataaatacatgtatcaggcttgcattcggggtacttggtttcattgtgccccgtctaccattagtcttgtcttgaaaccacctcaattagctaaactcaccttcactaataaatataaaccatcttttaaagaaattaaggctggaatcactagtagacctgactttgtgtggaatggaaaggaacttcctgttactatgctctttgag

SEQ ID NO: 122793 - DNA, 965 bp, Cannabis sativa
  modified_base (904)..(911): a, c, t, g, unknown or other
tttttttttttttttgtgtattttaactcatgttatagatgttatgaacttaagactaagtgtatatttttcttttttgttgttgttgttaatttttattattataatatgtccaaaatttatttaagttttgatttgttgtgattttaaatggtgtcggtggagttggactttggtggttgttgaactaggacacatgaaacaatggagttttaaatgagatgagagtagtaaataaaaagtgattgtttattatttttcttgttttggtgttatatataaaaaattcaactgtgtacaattacaaaattattactctttactaactttgaacctaagatctctacattactattttagctcaccacacatgatcttccttttataactatatagcctcaaatcaatagctcttttcccaattgattggtgatgatatacataaaagaaaacatgtttgtcattgtaaatattatttgtgtctttggtcattgaaattttaaatgctttcattttctgtatttaatttaaatggcataaagtcagcaaattttgtggctagtgcatgtgtgttattcatatcctatagtacaggtcaaacagtgtcaaagaaagttcatagcaaaaaaaatggtggcccctcactcactgagtagaccataaatgagttagatttgggcagttcaaatataatatagggatgttttcataagagtttttttctttgacatatacattataaatatttaacatcatatataaaaaaaattaaaaaaaattaatagtttataatattaaaaataaaattcaaataataatttaagggttataatgcacccccttagaaggatgtatcgatgcacctttcacttgttttagcatatagaagaattttttagtctannnnnnnntcatattcatgtacgttataactatttaagatatcctacaaaattttgagaaat

SEQ ID NO: 122794 - DNA, 1356 bp, Cannabis sativa
aaaatatttaacacgccgaaaataaaattcaaatagtcttttgcacgtatgacttttattctaaactactagcactgctttctatattataaattattctgaatttcttaaaattttaaaagatatcttagataactataatgtacatgactatgaacatagattagattaaattttatttctagatatcgaaatagatagagggtgtattggtagatcccttttaagggtgccttgtggaaacaccttataatttttacctaactattttatattggaaaattcttcaatgcatatgtctaaaaccggtacactgatgtaaccctatttgtttcaacattcgagagacttttttagcctaattttttttcatatacatgtatactatacttatttaacatatcctacaaaattttgagaaaaataatttaacacgctgaaaataaagttcaaactatttgtttcacgcgtgatacttttattttatacgtgtgtaaaatagtcctttttgaatagtgcattctatattgtaaattattctaaattttttaaagttttgcaggatatcttaaataactttaatatacatgactatgaaaataaatttgaataaaactttttttttctagaaattgaaaaatataagggtgcaccggtgcacccattttggaagggtgcattgtaagagcaccgattattctttatattaaaataaattaaaggaaaattttacagtgcaacccttaaaaaggatgcactgttgtacccctatctgttttgttctctgaaataattttttcgtcaattgttttctcatggtcatgtgtgttatagttatttaagacattctgtaaaaaatttagaaattcagtaaaatttaacatattgaaaacagagttcaaacagagtgttgtactcatgattattttattttctacgcgtgtgaaatacattgtttgaaccatgctttctatattgtaaattattccgaatttttcaaattttgtaagatgtcttaaataactggaatgcacacaaatatatataaaaaaaattaactaaaaaattcttctaaatgccgaaacaaagaagatgcatccgtgcatcccttttaagggggtgcattgtagaagcaccctaaaataaattttaaaccatattaaatatcaagtgtttctataatgcaccctactaaaataggtgtactgatgcaactcttaatatttttagggtgattctacaatgccattaaaaggaatgtactgatgtacctggccttgatttgtttcaacatccagaagaactttttagtctaattttttttcatattcatgtacgttataactatttaagata

SEQ ID NO: 122795 - DNA, 922 bp, Cannabis sativa
agaaaataaaataacttctaaaaatgaatggttgaacaaaacccacatgagaaacaattcaattatcgattataagttgataaagagcaaaaagatagaaacttttttacctccaaacccagaaaacaatacaaagcagttggccgacttggatgaatttagtgaaaatcaatgaatacccagaaacgaaatcagctccgaaatcaacaaaaaggtgaattgggataatgggattgttcttgtttttttgattgaggcgaaggaaaatcctaagaggttgggacaaaaaggagtagaggaggaggaggtggggtttggttgcgtggaagaaagaggaattttctcaaataaaaaatatatttttttttatcttgaaattgtaatcagacgaaacgaaagagaaacaatatatatatatatgtgtatgtatatgtgtatatgattaggcggattagaagaagacgtgaagttgagtaaatcctcttcgaactctcaataaattttctcactttctttgtaaagctttaaccttttttttacaaaacaaaaagagaataaatttaaagaaatttcacagaagaaaacagaggaagcaacaagacgacgaacttttattttctactattaaattttgaatatagtaaataaatatcatctaattatttaaaaagttatacattcttcgggtagttttagtagaacccttaaaatttcttttaagtttaattttttttttatcgtgttataattatttaagactatttataaatttttagataattttaattagaaaatttacactatatttctcaatttatttcttttttttactgttacacggcaattattatatttttattgtgtatattatttttttttttttaattttgttcaaacttatttagagtgcatttggaagtaa

SEQ ID NO: 122796 - DNA, 1884 bp, Cannabis sativa
tacttaatggtaatattaaaatgagaatttttatttaaacaaaaaatattcgaaatattatattatgaagaaaaaatttatctttactaactgcagaacaaatcacaagtcactgctacttcacagcgtttttagggtacacacaaaataactaccactatatattgataccaaacaaaacacactgaacgcatactactatacttacaaaaaaaggcacaacttacacaaaaataaaccacttaattttacggtacacaatcattttcaatagacattaaaaggtaaaaaattaaataatcaatttaaactttttgaaagaaaaagctaagttatgttaaagcaaaatggaagagccattagaatctctattataagggcttctccaatgagactgtaaaatcccaaatatactagagtttttacacaatattactccaaccaaacactaagaattactctatatatgtgggagtctacaatgttccactattattagtgggacactatagaccactatatatatattttttttttactttttaataatttaataaccactttacacaataaaacaaataattaaataatttatttataatcaaaacttatattatattaataaaataatataataataaataatatatttttagtgttgtggttgaaatgtaaaaaaatttagtatcaaattaaatagtatacttttggtgttgatttaacactaaatataacttttaccaatggatcacttaccctaagactatataactgtaaagatattccccaagaaaaaaataaaaaaaaattaagaaaagaaaaaaattaaataccgttttcaaatatagaagtttttgaattatatatatattttaggtgagttttttaattatattagttttaaaactaataccaaaaattactcatttataatttgggtttctctttatacattctattttatgatgggtttgttcatatttattggctatttatctacataagttttcagttgtaactttaaagtttcttgttaaagttttgaagatggtaattaactatgaattttatttatttattatattcaatatacaaataaatataatattctattcaattttctttattttgacatgaaattaagtttagataataattatcataaaaattattctaaatttagtcaaaaactagaattgaaatattctattttttgaaaattcatcaactttattaaataaaatgtttgcagacataatggacaaaatacaattgtttcgtaaataaaatacaatatggaagaataagagcctttagtaaaactatcaaccaccttaatagcaaatctataaataaaaactaaagagagacaccgtgtgtgattaaaatttatttaaaaaaatctaattaaaatttttacctgaattttgatatgtattaaatcatgcccctgagttcttcaagttgttaaaaaattctctgagattgttagatttaagaatttttatctaatttcattcaattttgttaatttagcgattgtctatttactaaatcgtgctcccaagctagatatgagcaagattaaaggcaaaaaaggttttatggctctcaagctagatatgagcaagacctatgactgtgtagagtgggattatcttaggctcgttatggctaatggattaatctaattatggcatgtgtctcttcgatcagtatactgttattcatggaagccataatatgagtccaatcattcattcgagaggtattcgacaaggtgaccctcttttgacatatattttcatcatctgtgccgaaggtctttcttcacttatcaagaagtttgaatctcaacgacttttacaaggatgcaaggtggct

SEQ ID NO: 122797 - DNA, 1319 bp, Cannabis sativa
  modified_base (1249)..(1270): a, c, t, g, unknown or other
atttttattttttaaaaacgaaatttttaaaataaaaattttactttaatttttgattaaaaaattaaaagacaaaattgttaccaaatgatacttatatttaataaagagaaatgctaaaaaatgacctctcccatgtgtcattgagttgaaaaggaaaatgaattttggtttgccaatgaagttgataatattctgtttgtatagtgtacatttttaccaacaaattttagaatatttttgttattgatggcttttaagatatcttttatgtttggcattgggattttctacctagaacaattgaaaatgatagaaattgttttatcttatcaacttggatttcatagggttcttattcgagcatgtgcttttagttttggatttcatagattttatagtgtactcggatgaaacgaacgcttccgggactatgaactgaagcatacgtcgaacggtctttccaaatagaaaaagcaacagttggaatcgactatttggagttcgaaataactaaatatttagaactctttttcaaaaaaagattagctttccttaagactctcgatggacacaaaggccttccaaaaaaactcttttgggagatgactaattactttctaagatgacaaaataccaaaaataataattgtaattatttttaaaataagttacaagattatttttaaaattttacctctttagagaaagttccttcatttaccacttaaccaaaaactaaataatattaagctaactctaaaattttgttttatctacttgaataaaggtcataggtaggtgtgtttaagtattattggcctaattcacaaaattatacaaacaataacatacatgtgatgtgtgcataaaaacttggaacttgagtttatgtctagacacaaatttagttagccttaacaagtttaaatctacataataatattgtatgaagttgttcaaaagaaagagaactctttcattaaattttttaaagtcattttatatgtagaaaaagtttctcaatagaataatcctccaattattccacttcttgtcttactcttgcatttaaaatttaaaagagcctctaattatctcatctcattcctaatagaattaagttcgaaagctctttggaccattaatctattattattggtttgtaatatgatatatagattggatttttgtcccaactacgtaattatataggtgtcgtttggtaatacttttgttttttaatttnnnnnnnnnnnnnnnnnnnnnnaatttttgtttttaaaaatttaacatttgaaaaataaaagtgcgttctt

SEQ ID NO: 122798 - DNA, 824 bp, Cannabis sativa
ttagcggggacgttacaccaaagattcggaaaatccaagtctaaccatctagatatgtacaatcttcacttagctccaaactcactactgttcaaccttggccttgcctttaccacacatgaaaacataattgtgagtttatagactcaataagaaaaaatataaaatataaatatttatttcacttgtaattagcgtccatacacttaattaccatgcagtctaaaacctgcgtgcaacgcgtatgattgagtctcgaacgttcttgactatagtacgattgaccataataccatatgcactcagtactctaggcgtactagtgttggtaatatcaatccatactataagtacaactaaccataataccacatgcactcaatactctaggcgtactagtgttggtagaattagtccatactttctgtaaagcctaacatatatttgttggtatttcggtacaacttcgtgtacaccataccgataccttgatatgttaatatgatggctttctgtttttcctaatatatatttgttggtatcacggtgcaactctgtgtacaccatactaataccccgatatgttaatctgatggcaactgaaacatgcatactaaacatgtgcatatgtgcatttaggggtgggcaacatccaattcaatccaattgaactgaactgatccaatccaatccaatccaatccaatccaacccaattggatcctaaaagttgaattctgattggatttgatcggttattggatgtcaatctcaaaatctaattaaaaaccgattcaagccaattacatttgtatatgttaaaaa

SEQ ID NO: 122799 - DNA, 1022 bp, Cannabis sativa
  modified_base (957)..(996): a, c, t, g, unknown or other
cgggggagttccgccggcaataaaaccgccggcaataaagtaatttgttgtagtgatatatacatgtataccttgggcatttaaaaaatcttgggagacacgcacaactcaaaaacaaaaacagctgattcccaatttattttaaaatttattatttaattacttttagtaattgttgactgaggttttcggcaactaatataataataatatataagaaagctgtaagaagttaatgcacgagatttttacgtggttgggggcattaatgagcctcagtccatgagtctttgttatttataagagtatttattacagagaatgttcttggtggtttttctctttggttcttatgaaacccaaaattcttgacccctgccttaatgaatttggggggtatttatagtatttttgtggggtgatcccctgctcgtggattggagatttgttttttattgtattttttagtttggtttttattttttgtaatctttatatttagtttttttttctttcaatttgggattgtcttagattgtatatctctataatattaatctttattcttattatttcttttcataattagaattattttacttctattattattgtttggtattttgaatttaatagtggactaaaaaagaaaatttgtaaaaaaagttaatttattcttagaattttcgtttataaaaacaatttctattttaaatttaaaaaattattattgtattaattaaaatataaaaaaatattaattaattttgtatattgatatttaatacataattagttagaaaaacaaaccatttaatacaaattaatttttatataaaaaattaatttataaataatttttttaaaaaaaaattgacaaaaagtataatcaatgacgactaagtcgtcattgatagtcttttatatagaatataggagaattaccccatatactannnnnnnnnnnnnnnnnnnnnnnnnnnnnnnnnnnnnnnntttctaaagtggttgcagtgctagtt

SEQ ID NO: 122800 - DNA, 1991 bp, Cannabis sativa
ataataatattagtctaacttaaaaaattgatacaaacaattaatattataaataataatagtaattgttgaccgaggttttcggcaaccagttaaataatatatatagaaagagctgtagaaagtttaatgcatgagatttttacgtggttgggcattaatgagccttagtccacgagtcttttttattaatgagagtatttattacagagaatgttctttgtggatttctctcctattttctctctttgattcttttaaacccagaatgttcgaccgaccctttttcagtatgtttgtggggtatttatagtgtttagctggggtgatccctaggaatggatcacttgtctttctgtgttaacttcataagggcacatattcccagcagatacaaaataggaagtacatgacctataccgtaggtatcttaggagttaggtggatataatcttttatcccctcttgattgatgtatgattcctcataaagtattcgtcactagccttattgattacagtgtaatagccgaaaaagggggattacgccatctgtcatgtcgtttatggagatttcaatacatcttcccccatgcggcattaaatgcgaagtgatttttcaagagatttcagtacctccccgaactaccttggcatgtctctgacctcccggagggtaaagatactccttatgtctcctccgggagacaccttccctgagacactcctctttcgtctaagacttagttgatttccttaagtgctggtccttatccaggtccacgtattttgggaaaaatcaagggcaacaataataaaaaagataacaaatcatgattcattttctaccgtacaacatttcatagggagccatctctattgtactttaatagctattgttgtaggaaaactttatcaaaggaaagtattttctccatgaaccctcgaagtccataatacatgctcgtagtaaatcttctaatatatgtattgtcttttcagactgtccatcagtctgagggtgaaaagttgtgttgaacatacgctttgtacccataactttctgaagactcactcaaaatttcaatgtaaattttagatatctatctaaagcaatggattttggagccccatgaaaacgtactatttcctttacatacaacttcgcatactgatccacggttaagtgattttcaccgacaaaaactgtgttgactttgtgaaatggtccactatgacccatgctgaatcatacaattctgtggttctaagttaaccaaccacaaagtccattgtaatatcttcccacttccactcacggagcgttaatggttgtaataactgtgccagtttctgatgttttgctttgatttgttgataagttaagcacttggacacatattttactacgtctttcctcattacgcaccaccaataatagggtttcaaatcctagtacatttcggtagttcctggatgcaatgaataagacgtattatgagcctcatcaagtattttttttgtgagctcatcactactcgaaacacaaaattgagttttataaagtagcattctattattcgagattgagaggtacttaggctgacccgccaatatttcctctcaaatcttgaccaactcagaatcttccagctgcacttttctgattctttctaataagtctaattaaagtgtcaggttatatagtttcccaatcatgaactcaattctgattttaacctataatttttactaatttagttttagtcataacacgtattgtgactaaaaacacgtttagtcacaacaaattgtgatttttgtgattaacaattttaacttcgggtcttttaatcacaacataagaatgttaataccattttgacaactgtattttgtaaaagttacaaattagaatatctgttttgttaaataataaaatgaaccctatattttctaaaatagtaaaaataaaaccctaagcttaatttt

SEQ ID NO: 122801 - DNA, 912 bp, Cannabis sativa
tagttatattataacgctcaataaataaatgtaaaagattacaaatattgaacaacaccgcacaaaatacaacttaattccttagttaaatataaacaacaacaaacattcaatttcaatgaatcaatataaatataaaatttatagaaaatatgattttgaaagttttattggaaaaaatgacacccaatattttcaccaaagttacattctcatattgcacattcaccactaatttaatatggttaataagagtatctttaatagtaactctttaaaaatactaatacatgccaagtttgacatcaatattagtttttgatttggcttttagacctctccaatggtattcttccacgtcactaagcaaccccactgtagatgctctaatacatgccaatgagtgtcaatcgttattcaattatatgattttcttatatagtttttttttcttaatttgttcccatgtaaatatatttaatttaagtgactagtttcgtataatattctatcaagtgataataagacaaaataccctgcaacttctatcctaagcttctgtttattttttttgaattagtaatcctaaggctcaatatgcacaacacccagccagattagatcaaacaaaactatacaaacaaaagcaatttcatactgcactaacacgtcagatgtaccaaaacttcaatagccaattcctactcagccttattagcagtttttggggccggacttccctcctttctagtcttaccaaacgatctctgtatttccaacgcgggcacctgggcttcgcttgttttcttcaaccctaggtttgctgtggctgccttgtcagattcccgatggcttaccatcttcttttccttgtcagattcccgggggcttaccatcttcttttccttgtca

SEQ ID NO: 122802 - DNA, 4996 bp, Cannabis sativa
ttaatgaaacatacttgttactaaatctagatcctggtaaaatatttccaacatcatcagctccaacaactctacacttctcctttccatggtcttgggcagggggaacaacttcagcagttttacttctctttcaaagttacttcttcgcgggagtagaagaagcagcagggataccctgaacaacctctttgactagagtttcggtctcctttggcaaagaaaccttccttttggaacaagttgccatggcaggtagaaaactcacgttttctttaagaaaaaaataaaagataagcggttagtacagtgatgaaaaacaagataacaaggtataactactgagcatggagcatcagttacctgctcattccctaactctttctagaatagttcaagtagaagtaatatcttcatcatctcggtttaagaacatagatattctccttaaatattcttggtcatcttgttcgagaggcatcgtccaagagtcatcacaaaagtgagtgtcaatataaacttgctaacaagacattagcaggccaactttacaaagattttagtggtaaacaaatttctcacatctctctcccatgcatcaatttctataagcatgacatctactctccatttcatgttaatcaacgaagtaggtcttttgaaagggttagccttctggatggtaatatgtctttatagaagaattggggtatagaagtattcttgatggtaaaggtcacagttactcttggtcacattttctatatattgactaaattggtggaagtggtaaaatccttcctccttacaagttggacttcttatcaagtcacaaaggaagttaatttcatggggagttgtgacaggccaatttctcaagtagtagaagatgaaataggtggacaagattctataaccattcgagtttaattggtaggcacaaaccccaaaaaaatttgctattgatataaaccacagggtaaaggcaagtaagcacccacattcatatggaaactcgaccaagcactgcagcatggattctgggaaccattgggacacccaaatcgtggtttcctgacaaaagtttatgggaggagataatcatctctgatcaattgaacttgatgctccaagatggtgttgaatacaagaggtctcaacttgaaagcccaatctcttaggtcatcactctcaatggtagccttaaaaagtttaattgtaatcactttcccaccacatgccttgtctaagttcttagatttgggtacaataagcttagctctaatgaactgagccacatggggatcatattcatcaaatagtcttttgcttctcttcatctgaggcatggtgacttcaaaactcagttacttacaacttaagaaaggtttttttagccttggaaaggcaaattcaaggtgattacaagagaaaatttagttcaagaatagtgtttttgagttttgaagatctaaatatgtaatttaaaaaattttgggaagttctagaatccttgaaacaagctcaacaaacgaagaggaagggaacaaaatttgggaagaaaagtaacgtcgaaaaaaaaattctaccttagtggatgaagaatgcttgaagaactgatgaagatgaaaattcaagactctcataaaggattgggcaagaaaaggggtatgggaagtggaaaaattttgattgaaagttctcttatttataattgagctaaatgcctaaatcctaatgcaattgggagtgttttgaattttaagcttaaaaggaaaagataaatgataagaaaaagataataatcttttcttttctccttcatgcttaatgaatttcaaaattcctataagaataggaataggattataaatttaaaaggaaacaataatttctaacgcaattaagattaaggtaaatttagagtttatgaagaaaaacataaatgataagcgaaagatcaaaaatcttttctcttcttcttttttctataaattttgaatgtcacatctaaactggagtaggatttaaatccaattaatcctaatttcatgagaaatacatgtaaaaattttaaggtttcaaagagaaagataaaagataagtgaaaattgataagtttttcctctttttctatagttaacaatatttgaaaattccctaacacaagaacaagggaattcaaagtcctaattatattgggaatgttggaagaataaaaaaaaatccaagattaccaaaattgatgcccatctggtagttttgagagaaacaagctcagttcacatcatcaagtcaactccacacaagtgtgcagttgacatgggggaaaatattaacctggaaactttccctggtgacatggacataaatttttgacatgtggcaagaaagataacatctcagagttgagtagtcctgagtcatagcagtcgacttgggaggggtctctagccttgtgcctaggttgactccagaaactcttgaatgggtgtttagatttcaataagtcatttccatctcactatattctattattttgtaccatttagacataaagcaaccaagtctatgccctgggagttgaaacacgaaccagcaccttgaaagtcaacctggacacctagggtttcacctagtgcctaggttaacaaccccaactagggtttcagtttttaggaccatattagtgcaaatgggtcaaaatttgcattgggacatgagctatagataccatgaacatatttgaggcattaggattagattcggtgaactttcattttttagtacctagacacccggtgcctgagcaccccagtgccaaggtttacaatctgtcaacttaggccacttccaagcataagaccaaaaatttgacttgtgcatcatctgtgtcttcatcaaaaatagggaaataaatgctcttggggaaaaaacaaccaatcctaggagccaaaataagggattagtgccaatgttaacattttatcaacctgggccaatgctgaggagattttctgaaaagtctgttgggcatattctccgttttcatcaaatgttaagacacaactatttatggggaccaaacagaacttttaggtggcttggaactagacctagcgcctaggttaacatattgtcaacttgggttggttctaattagtttttggagaaattgtttcgagcatttttttttttttttgtcatcaaaaataaagaagatacaagcaaactcagagagaaaaccacaatcccaagggcattaaaattgagcccagtgcctaggttaacaattaacctggtacgctggtttcgatcactcaaatgtcaattcaggtccaagcattctctccgaaacagtcaagaacgaggtaggagaccttgtcctcaagttctagaaacttggaagcatcaaaacgacctctgaaaagctctaaaataagccgtcagtgcccaagttgacaaatagcctggtgcgctggtttttgcttacctgattctgattttgtctcgaatgttcatctagtttttcatcaaaattgagagccatgaagttagaagagcctaattcataacttcatattttcacttttctgacaaggtgatttacttgaaaactgggtagttttgagtctctcgtttccgcagaacagcaacatctctgagaactagtgaccagctttgccagagcacagaaatggactaagtgatatcaaaaattacttaggcatcaaaaaatacatctttggtgcattttcctactcaccagcgtccaggttgatatcacatgtcaacttgggggcgggatgtcaacctgggcactgggccagaatagccttcagtaaaatggtcataactagctaaatattgttccaattgatgcgattcaacttgcattttgaagttatttcaattttcaatcaattaatgtctcacacctaaactataactctaaagtttttgacttcaaattttactcccaggggagctacaaacttaagctacagcttgcacggatcaggtcctgctgacacgactcaaactctgaaacttgaatataaaccttcgtagttaattttcaccatttgatcatcatctagggtcaaaaatagcttaaatgtatttttctttattttttagattattttattcccatttgataggaccttcttcacctatataggagagctccactagctcatttttaaattttagaaaaatatccaaaaggttatagcatctctctctaatttctctctctagaaattagagcatccagacttagctattttttctgtaatccatctcgtgagaaataaaactcaaagtagcatagctctattattggcgtgacatagggaatgaactactataaattgttgtgtctctctacttatacttactttataattcattcttgccaatctagcgagcgaatgtgactcagagatctgtgtccaaatttttgtgtcaacatatattaaattgttttgaagaaaacatttgaatcaaatttctttagaaatcttgagtcattgttagatttttattgcataacttcttatcgatgtgataagatcatatgatcatggatttacaaaatttataatttcttgtatttctaattatacacatatgacacattcttagaaattaaataagtttaaaactatatattgattgagcctaaaattcaatatcatatagtatatatgggtttaaacatatatcggtttattgtgatatattaaaatccctataagtatattaatataattagatttcacaatctttaaaaattctcttgatcagggggagagaaatgtagttgggatcgatcaaaatttttgaaaaattatccttgcataaagtatatgagaatgatgtattttggaatgatatatgttaactgtaaattaattttattcaaagttgaattagaacgagtctaaaaatgcatgaagcgtaaataaaaaatgtagaaattattaataaa

SEQ ID NO: 122803 - DNA, 1884 bp, Cannabis sativa
tgaacccgaaacctggccaacccgaaacccggtaaacccacccgatgttcaaccctagatctaactgttatgtattattatataactcctcaactatgaatatttaatacattttttaatattaataacaaaaatatgcatatttatttaagattttttaatttcttttatttaaatagaggatttcaaagaataataaataaaaacatgaaatttaatatggcaagttatctgtgttgtttgataaacggtcgtgttctaattgacacaaataatatgaaattgatttattaacgacctatttaaaattattttaatactttaatatgtcataaatatagaaaatagatcattaatatattaatgagttgacatgtgtaaacaaaatttatttataaataagatacactaatcgtgtcgtgtcaactcgtttataaatagtcgtgtttggattttattttcgacacgattattaaacaggttattttcgtgtcgagcatatacccgtaatacaagagtctcgacaagatacaaacacaaatatgacctgtgaacacgaattgttacttctaaaatttatcatacgagaaagataattaaacctagacgagattagcaagatagaatgagcacaaatcaatcgaccctgttacaaaaatatgtttagatacgtcaaaaaagaagaagagttaaggagtttgcttgaatataaggcggtggggtttcacccaatacgtcacattatatatataatgatggtatatcgatgttccctttagggcatttttaatgaggttaataaaaatagttgtcttattagtctcacctgacacactttaattatataagctatttatagtattttatttattttttaaaattaaaatataaagggcaccattacttaatttgaaatctttctactacctttgctagggttgtacataaatttttgtaaaccgtcaaacctgaataatccacataaactaaatcgagataacccgacgaaaaatacaaactgaaaaacttgacgaaaatataatccacctaatctttatattggcaagttcaaaataatatcaacccgaactaatccaaccaacccaattaagagaattatatatatatatttgttatatataatctttatattatataatttatatatatttataaaaaataaaaagttcaaactactatattttttttatggtagttgatttgaattttaaagtcaatttatatatttgtcttattatcacaattaattaaaatataataattgaatatgaagaaaataaatattagtgctcgattagacggattaacctgatctaaccaaccaattttcactcggtgggttgaattttttttttttttattaattggcaagttacacttaaatttttgtaactcaatctttacgttgagttgaatgaattataacgtaaaccgaccaaaccaatcaacatgcacccttgcataatagaatgtggtccatcgtatgagctaccatattggaattggccttagtggaagtgatgtccaagctcgcattcttcaaggtagctttcggatattgtacaagtaatcacaagccgaggagaaccaatgtgattaattagtgtacaaagaactatttaattactacatttattaaaaaatatttgaaagtagttgatattatataattttatttagatttaataatttagaacatatatcttatttgtgtcttgtttaaaataaggctaattagcaaattttctttccgaattttaaaatgtactaaatcatgccccttgaatttttttggccgttaaaatttttccctaaactattaagattgttagatttaatgatctttgtctaattttagtaaaa

SEQ ID NO: 122804 - DNA, 2289 bp, Cannabis sativa
aatatataaatataattggatgatcattggatgataattagatcagtttggtcagttatccattgtatcagatgtccgatccaacaaccgatctgatctcattagattttcaaaatttacatccaattcgatccaattatgattggatatttgattctattggatcagttgggattggatcagtcggttgtaattggattggatgatttttagctcacccctacataaaagtcataactaaatcctaaaaatgtattttggacctcgaacccggttcggcctaaaatactcgattatgactataccatgtcgacttgtcaaaaattacctgtaaaaagacagaatgaacatactatataataaaataatctataaacacaatataccgtaaaattttgatttttacccttctcgagtcaaaattacgaaaatacccccagcacacaaatggggtattaaaatgcaataaatcacaataattccacatattaaatcatataacaatataatttctcatttatacttaattaacttagttagggttgctaaactggttactaaactttagggtattacatatttggaggattttgacctcctcgactgcccccgatctcgaccatgttaccatgacttcttgtgttttgttgggcatccatgttataggacttagtctgcaaatctataagtcaggtatgtcaaacaacgatcatatatgttttaagtactgcacttatgaattttaaggaaatgcatttaaataaataacatatggctatcatgcttccgagcatgctttttaatcacataacttactaaacaagtaaaggtttactgagcagtgagtcaagcatatttctaacaatgattgtacatgtctgtaagggcctgctgttcaaatccaccaggatgtttgtgtcactctagccagctgtagtggccagatttagagtacctgtcatggtaacaggattgaccacatctatagtgttaatggaaattccagtcgtggctagaacatgaacatcaagatctgcagactatgggtcttaaggaaggctcaaagatgcagatggtgcaaccggagttcttctcatgttaaccatggcgtttgatcaggtattatattaactcgctctcaatgaaagcaccaaactgttgacctcaaaaattagccagccgacagcagggtcatattaattcaatgtttgccatgtgttacacaattaaaattcaagagtaaagaacacgagaatttttatagaggttcgacccccttagttatctggtaatgacctactccccttttagttgtattgatactgagagataatcttattcagatcactataggtgggatttgatatatctctctttaaggttacacagtatgaatcagtaagcaaatctctaatgagagagggtgaagccttggaggcatctcacgtacttgggaataagagcttgcaacttattgattcacatattggtacatgaagaaaataactacattcatccatctcgccctttacgcaacgaagtaactacctcgttaatatcattataatatgaagaacactgtgaggagaagtatattcatacttagcattttttcctataaagacggcgaagaaggacaactcatatttagcgagaaacaaccttcttagtctgcacaaccgtttaaggataaagacaaagagtggttgggtagttattaagtattatcccatgttcataaaaataaaacgtaagtaatgttcacgtttcatgaatggttgtaaatgaatagatcccaataaaaataactgacatcctatacacctataaataggggcacaaatcaggaaaaaagaggacgacaaagttgagagaaaaaactactttttacatttattgagagaattgtattctgtatctaaagaaatatttctaataaggactcgtggaataaggactcgtggagtatgtagattttaactacaaaactacataaatatcttgtgttcatttattattattttaatttctgtagtatatttattacgtaaaagacttgtatatttatttaatgaatctgtgttaacagtattaaaataatagttttaagataattaataattaaattttacaatagtttttgaagtatatatgattgtattattatatgtttaaagtatatgtgagaccacaagtttttacattattttttgatggttttaataccttttacggtttatgtgccttttatggcgtttgtgccatttattatggctttttttttttttt

SEQ ID NO: 122805 - DNA, 1301 bp, Cannabis sativa
atacccaagtctcatatattcaaaattgctcagctatttgagatcggacaagtagatacaaggaaatagacagaagactaaggaaaagaacaaattaattcaagaagactttgttacacagtcacttcacaagaagactaaggtataaattactggacaaattcaaggttcattgtgtgtttcatatgtgatgttataatctaattcataagagttcacaaccctatagaaatggataaaacaaaccatctttagaattcaatatctttagcaattgtttgagctcgaaagcaacaaaagtataatgataagaaagaatatatgcgttttgtaccaggtacacgattagaaactgggtgaatttataagttgataatgttaaagatttcaaaagttatggaactcagatttggtgatgaagtggagttgtttttgtaaattattactcttatatgaggagaagaattgtcaccattcctttatattgataaaataaataaagctcttgttcccattttttcttgcttttttcattctttctttccaaaatttattaataattacgaattacaaacattaccttggagagatcttacatactgatggctccaaattaacatgcacaatatgattgacacaatctataatttgagtctcacaacaagaagaaaataagaaacgcacatcaagatcttactaacattttacatatgtgttctccaccaactattttgctccatcccaagtagcttgagtcaaacttgaacacaagtggtctaaaatatgaacaaattgtaaaaacatcacagaagaaaatgtatctttcttgtactgtaacattgacacataactgaacaaactactcatattaatgaatgtatgataactacaaaattttccttatttttaaattttttagtaactagacctcaatcatctttaattcaaagaggataagctaatcactattcactatgtaattaacattaagtaaaaatagtacgtaagtttatgatcatccactttttttttatatattctttagttacaaaaatagtattacttatacagagaacaagtttgaatatatttacatgaaaattggaataataaatgttaaagtcatatattgttatgacttatcataaattattttttcacataaggatagctacattatgatttttaggaataattacttaagacacaattttttgtaaaatagttatatttttacgttcaaagaatattttttttacatttttacggtttttcaaaaaataatacgaaaataacataaa

SEQ ID NO: 122806 - DNA, 2185 bp, Cannabis sativa
  modified_base (78)..(87): a, c, t, g, unknown or other
  modified_base (506)..(507): a, c, t, g, unknown or other
aacaatctcaatagttcgggaggaatttttaacagccaaaaaagttcaggggcacaatttgatacatgtcaaagttcnnnnnnnnnnattactaattagccttattattatcattattgatatatttcaatcacacaagtaacattaatccaatatttcttgttcccaatatttcctgttgattgtgaagagatttggacactccatcctgcaaagattataccatcagaagtagaatatctcagttttggaaaatttgtttcttccaatggatgccctatattctactaaattttttgttaagatttatgctttaaaaaatttgcaatagacattttaattataaatataagttacacatttcgatagtgttaaattattctttaatactttatatataaatattgaaaaattatttattcattcatgaggttttcgccttgtaatgtacagattgttaggattttatgcacaaataaaacttatttcaatataattagatttannaattaataaaagatcaaaaatcattttatattgcatagttcacatgatttctttcatgattatttatttaatgtataaattttattaaatccagtacatatagttattcattattatattgttgtctacatagtgaaatataatcatgattatatatttaaaagtttttatcccatgattttttagtacactggatttacactgacatgataatcagcaaaaaaatttacttacaccttgaataaatgtcatgtcctttccaaggcattggcaaagtatgctagtattggatgtatggagtatacataggactggactgatattgacattagataagatatcataaacttatcgttatatctttctaattcaatatcacttagttgatcttaggtcaatagatcttaatcttgagatggttagttatggcttaaatgtaggcatatcaaaaagatccatttagttggagtgggttggagctctgacccgaaacattcggatacttattagatcttggatcagatccgctccgccccgcctaattttttctggatcggatctgatccgacccgataaaaatttattttaaaaaaaacttaattcaagactcggaccccaaactcggatcccttggcacctggacccgaacccggacctggacctagacctgaactcggacccaaactcgggacgcgaacccgaacccgggacctgggactcggaccgaacccaaacccgggacttggtccggaccccgaccccagacctggaccgggacctgaactcggatccgggacgagacccaaacccggacccagacccgggatgagacccaaacccggacccaaacccgggacccagagcccaaacccggaccggggacccaggaccatgaataagaacgagacccagacccgaacccgaacccaaacttgaccccgccccaaacctggaccgagacccgagaccggacccgagactcgagaccaggactgtgacccgagatcgggattgagacccaagacccagaccgggacctagactcgggacccaggacccaaacccgggacccaggactgggaccgggacccggacccaaactcggatccagacccaaacttagacccgaaccctgaaccagacccgaacccggacccggacccaacccgttgttggtgttggggtagagtttattaaaaatatattatctttacacaatctattaatacatgtcaataccaaatatagtattatatttaataatactaataaaaaattaaattagatataaaattataagttaatattaaaattcttaaaaaaaaaaaaaagagtcgggtcagattagatctgatccgaataagtcgggtcggatctgatccgacctgagtatctgatctagcgggacggggcagatccttacatgatccgaatcatgtcggatcatagtcggatcagatctgacccgacccatttacactcctacttaaatgtattatttatgttctttaatttgttctttaaagatgaccaatggatcgacataatacttacaaattgggaacatggtagtgcaattgagtgggagcgctaatcaaagatatagaatctatagcttctataactattagaagtgagacgatgatttccttcgagcttggcttaacgcgatgaatga

SEQ ID NO: 122807 - DNA, 1268 bp, Cannabis sativa
attgcataaaatacaattcaatataatacaatacaatacgatcgaatacggtgttccaaacgagccctcaatgtctacaataacttcatctaagagtaaatgatacgcaaacaaatggggcaaggaagaacacaaggggcattcacaaccaagtagaatagtcgaaacagaaaagagaaaagagccagatatgaaactttaccattggccatatcaatagattcaacatgttcttgtaactcatccagcattcctgccataacccaattcagaagtgagtatgcgacattgagaggaaaaatattgagtaaatgtataatcataaacatgaaggaagaattaaaaccttcaatatcagcagcagtgacaccctgtgcttccaaaacctgttcaggggtttgcataaccaaagtaatttctttcatacgctttactacatcaacactctgtgcttgcatagcttccataaaccatcttcgatcctcctcactgcacacaataccccaaaaatcatatataagcaaaatcagctcatgtcaaaatcaatagtaaagaaatgaagcagtacctcagattacgagtgggctgagtcccgtcagaattagcaatgctccacttgagcaaaccatcccagttgggtccgtctttagccattatctacacgcagaagaactttcttataaccctagaatttgcttgtcttcagctaattaacgatgaactcagatatcagatattaatattaataaaaagatataagctgtggatcatcaaagtgaatttatagattggaagaagataattccagaactgtgtagtggtttccggaatgcgatggaaaagaagaaagaacaaaccactgaaactctgcgtctctcaattagggcttggtcaatatggggccaataatatttggatccctttagtctttaaattactaaattttctcattttcttataattatattgtgagaggcggatattaacttttttagtgttttttttattttttttaatttggtagtgtgttgccaaaaatgaaatatcaacttcattgaaatttagcattcatcgtacagaagagcttgaagctcgttagggaaatcattcctatgagtgctacgatcagagaaaaattgagagcgcctagcaacaaagtgggcaactcgatttgctgatcgtctaataaaacgaatacttacattatttaaaactggcaataagctcttacaatcactaacaatcaaaccaaaagtagaggacataat

SEQ ID NO: 122808 - DNA, 1180 bp, Cannabis sativa
tcaatctaatttacgacataactatctaaatttatcttcattccacgcattatttaaaacaacgtcacattatattattaattagtcattgaaccattaagataaaattaaatttaaattaaactaatgaataaacttaaaaataaaaatttaatacaattaatataccttaaaatttaaattgtaatacaaaaattaaatttaaaataacctttaaaaatctagaatagaaatacgaccacgagtattgttcgagagagaaaagagtgggtgactctatcttctccgatcacgggtatcgctcaaagttccatcttctttgaccacgggtatcgttcaaagttccatcttctctgaccacggccatcgatcgagggagtaggttgagaaggatagggctatgggtatgtgattgtaaaccactacaagaagtcgcggttcgttcatcaaagacggtgaagaactcaggtcgaaggttcaagtgctactgtagattcaaggtttgaattgttgcctcatgttttcttctttttcgttgtccaatcgttttagatataaattttgtatctttgatattaatccatatgaataaacacgattttaaaattttcacctaatttctcatcaagaaaaagttttattttcaaatcaccccctttgatgtgaaaaaaaaaagtaactaagaaattgaacttatagatgttctaacttatcatgttgtaagaaatggaactttcttgcaatttaatgcattaaaattttgtatgtgtatatattagcttatagtttgtttgtgcttgcttgaggattcagattaagaattagaatttttaaacacttcctactaattctttctctaatctgaaaagatttatgattggaagttatgtatgtgaagatttcgagtcctctcttgagcaagatttcctgcctcccacaacattactcaccgtaaaagttatgtttaacaccttaaggaaaaaatttgtctcattctctagtacatattcaaaattcaactctatagttggtcttgattttgtaattttatgaataggattgtaatttgtttgtgttgtgcactcaagcaccaacaagaacacaatgcaagaataaaatggattagaatgataaaccagaaatgtatcaaaccagataaataaaagacagcaagaaataa

SEQ ID NO: 122809 - DNA, 2514 bp, Cannabis sativa
tagttttagtcacaacaagtattgtgattaaaaatatatttactcacaacaaattgtgatttttgtgactaatacatttagtcgcggattttttagtcataatataagaatgatcatttataattagttacaactttttttattaaacaaatattgttgtgactaaaattaaatttttttgtagttatataatgtagtcttttagaaaactaattattaaatataagagctaaagaaatataattcagagagaacatgttggtttcattctgttgttcttatttttgttcacctatcgaaaaagcagaaaatacgttgaagacaggtcaacactaacctgcaagatttcatggctgcacggtggacacaagcaaagacaaaattattcaagtaagtggcgcagatcttggtcggacctacagctggtcggctagggtggacaggttccatgcactgggtagccttcaacaaagttggtcggccaagcatacagaaatgctccaacacttgtgatttttccacaaagccttccaactcgtcctcagtgctcctacgacttagaaatagttcaaacagcccacgaagatagggattctgcatcaacaaatcacaaccctattatttaagaattattaattatttactttgtattccaaatatacaatgtaatttttttatttttcagggatatttctatgcagagcttgtaaaccccaatactatataaagggtcatcaacctacataaaaatatgatgcaaatatacactcagaagcacaaaagtaataagtcctcttttttttctcatactattctcatctgcaaaatacattctcattgtaataatgaagagagccatagctagaattacaaggttttagcctgtaatctgcttaatattatctcaagagtaaatacaactagaaagggagtaggtcattacctgaacaactaaatttttttgtaagtgaatgtgacttttagtcacaaaaacaattacttgtatataaaatatagtatttgaccaaattcttaattatacttatttaagagaaaaatatatggccacacttgtttgaattagattttcgactagtcctttgaaatttcattatactcaagaaactatatatgaggttttataaatttatttcactcacagaacatgatatagtgtaaaaagaagaggcatgaacttatgatctatcttaatgtgtgattataatacatggctagatgaggagtgttataaaacaaaatgaagaacttggaaaaacttctttaaagaaatgaaagaaattggagaagaaacatttaatgtacgtattacgttttagtgatttaatatatatatatatatatatataataagattagtttgatttatgtgtttattggggatattttatgtacatatgaaaattttaatctatttaaataatgaaaatatttataaattttattttatgaataccttgacaattataaatttttaaaaattctattttctgaaatatcatctagtacatttttcaaaattatattaaaattatttttttaattttaaaaataaatagtaaataatttaataatattttttaattatttttagtcacattttttcaaatgacaccaaagagccactacaaaaaagtggacttttagtcacaacaaaaaaaattttgtgactaaatgtattttttgtcataataatgttttagtataatgtcatttaaaatgaacgtaaattctgattataatgtcatttgtatatttactctatcactactatatcttacatttttaataaatgtcactaaattatagtgattattattattaataataataataaattataagattttttaatatatcatgtcgtattttttgggtttgtcatatgtgttttttaagttagtctattcgtacttatgtgtcctgttttttatgtttctcgtattgtgtcgtgcttaagggcatatttttcatatcgtatcatgctaatttatagcatcgtgtcgtatcgtactcaagcttgtattttttttgtgtttggtcatgctcgtggcttctaggctcgtgccgattttgtatcgtgtcaaaaagtcttgacccctgcgtgtgcattggaaaacattacttaatggagatagacagttttggcaaaatccaaaaaaaaatccttcttgaatcttcaataatctacttcaaattatttacttttagtttgaaaaattaacaaattttagtaattgtaaaaattaaaaaaattaaaatttatttcttggccgagtggacatgatgtttccattttttttttttatcattttttatttgtttttagggaaatttacaaaaatactagaatttagattaattttataaaaaatactgtcacacgaaaatcttttcaaaaatacggtattttataaaacaccagtaaaacacaaagcagaacaactcaaaacaacagtagaataactaaaaaataccagtagaacaccagtgaaa

SEQ ID NO: 122810 - DNA, 1665 bp, Cannabis sativa
aacttggaatcttaattaatatgatttcattttagttgtaagaccagtgtatgggggatttaggaagaagctagctgatatctatgtttttttttttttttttttgatttgtttcaatatcatcttctcagttgcattggttttttattaccaaatcagtcaaagtcaggcatggagtttgagtattgtattctgaattggattaggataggactcctgtatgtgtatttttgaactctttaaactgactagttgcaaagggttggggtgtatctctctttgtgcatctgctgttattgctgcagatttgtattaacttgatctttgagtttttagcaatatagaaatggtgcaagaagtgtaatattcaataatagcagagtagtagtgctctactttcgtagaggtgtgtgattgatgttattagttctttttgtattgagaatgattatcttgaatactcctgcagtttgcttgggtaaaaaaaaaaagaaagaaaaaagtacctgaatgactgaacttatatttcctattaagagtcctacatattcttggggagaataggttggaataacagtggagtttattgtgaaagggaatacatattcattgcttccagcactaaacaagtacacagctcttgagagtaaagctttggcctctgttctcctagtctctgcctcaactcctcccttacattcttgaaatatctaagctgagtttgaaggtctatagtctgtaaaagaaaaaaataattaataatacaagatgtagagctagcccaaatatatattgatagaactttttcgaattaattagattagaaatcatgattctaggtatgatcaattattttcatatctcatcatgtatatacataccattccttggttaatttgaggcgtagcaccagaccctgcagatgcaaagttgactccatatctaaattcatggtttatactctgttactggttattatatactggtttataatgtcacttgctggtttgtaatattttttatactgttatttatgattctttaggtgccccttgaaatgacatgagcttaactctttcattcaaggccaagagggaaaagtaaactcttttctttctttttctttttattttattttaaaatttttggacaaaattaattattggatgactttattttgtctaattataaactagatactatgcaaacttttattagaatttaaaattttaattaatatttagattatactattatgtgttaaagagcttttatagttgtttaaattattggtttttgaaaaattattaacaaatttgcaattaattgttgtgacaagtatatatataggaatggtaaaagagattgcctgaaaatcttcaattttatatatgtctgtgttattttcataagatctgtcttatatactgtaggtgttagttatcattactatttaatttttaagttggtttgatatgattaagtttggtgcaattttgtttgaatcttaatttgggtacttattgagtattgaggttttaaagctttagatttacttggtacatttgcttttcaggaactgaattcattgatattggtattataattgtaatatagctttgtattttgtgtttgatattggtgtgttttgcaattttgtatttt

SEQ ID NO: 122811 - DNA, 914 bp, Cannabis sativa
  modified_base (743)..(754): a, c, t, g, unknown or other
ttgtatatgctatattacatacactatatatatagtctaacaaatccaaccaattaccattgtagaatcactattaataatgaagatattgaaactatattgatgcgcaagagttaggcctagacgaatggcaagcaacttcgtcacattaacagaaaaattacctaacacaccagatgaccatgccacccaaactatatccgcagcatcccgtatcactttctccaatccgacaaagtccctcctcagaatcactgaatttgacacaaattttaacattctctaaatttgaatcattttaccctacaattagaatttacttttataaaaatcgactaatatatatatatatatatcacactttaaatatttcattaaaactgctcacaaaaaataatactaaaattagattttatatatatatatatttttctaattgattaattgatttagctaataagtattttgtaaagtctagcaaggaccaaagtagggtgccgcatctgagtttggagaccaccttattactatttattctcattgcatttgaattgctaaataattaaagacatcgtgttaaaacttcacattattgtttattagaacttcaactacttcaatttttaatgagtattattatagggtattaaggtgtctaccattatttgttggaattattttactaagatcttagatttactaacaagtatgttatttaatatcctaaatatgaacttctaaannnnnnnnnnnnaaacacatataaagtataagaaatattacagtggttgcagcggaatataatgtctctttccgctcagatctctaacccttatatctttactgcagtagagtattaccaagatctgagcccaaatgtccttctcttgaatctggattcttcacagccttac

SEQ ID NO: 122812 - DNA, 723 bp, Cannabis sativa
caaacttaaatgtgctatatttatcataagaacttttaaaatctcatactaagtgtaatttcctctttgtgtaattatttttcatttattaaaaggactcaatacgactagaccttaagtattatctttttaaaataaattaaactattgtaataataaatgtaagaaaaaaaaacaaacaaatacataaaaaggacaaaatctacttaaagaaaatttttaagggaaaaaatgtgagagatatataaaaaaatgaaattgagctaaacaaaagtaaattaaataaaataaaaagtagaagaagacaaaattgacttagtatttttgcattattcttttgatgacattgatatatagggctaattagttaatatttaataggttgatttgaatatgagaataaaaacaataaagatgatcaatatgtgacgacaatcatagatcaatatattcaaacaataacagtatgtttggttgttaggcaagcaatttccgtaaatttgttttaagtatatctagcccatgaagtaaattcatatggtacttaattctaattataatcatatcacgtaaatatatattttgtataaaatttgaattaacttttacaaagatactcttagtttttaaaaatattgtgtttttataaaacaccagtaaaacacaaagcaagacaactcaaaacaatagtagaacaccaataaaacaccagtagaacaccag

SEQ ID NO: 122813 - DNA, 1100 bp, Cannabis sativa
gagagagagagagagagatgaacaatacaaattttaaatttaagattgatgtttgtcggagctttgagaccgagcatttgaagaataggccagaaaaggaagatgaacatgcaaaggtcaatcagatgaatgaatccacaaaacaaattcatatacttttgctttgctattgtttttaattaatttccttttttataatatacatgtactagcctaccgaggctattagttttgtattaaatatatacggcccacaacattttttgtcttcgagaccataggaagggaagggatattaaatttaataatggttgttatacacagccaaacaaaacaaatagctagtatgagtgtaaaaagcaaacaagcaaattcactattgtacatattaattaattgagcattgctataaggcaccagtgatatttaataccttctcgacatgtcactggttagcggtacttcttaaaaactattatattaaattatatgggacctgatacttagctaaaccaataacgatactgacacataagagggtgctaagcaccactggtgctctgtagcatttctctaattataattataatgtccactccaccatacatagtcacgaggagccaactccacattatttgttactgtttgaaattgtctagctagacaagactcatgcttcattgatcttgttttaatttcttaatgctaattgatgctatatgtttgtcatcacatacgcacaatatatatatagtgttaattaagtgatacttgtcttacgtttatatatagtctatagatggagagaatttcagcgtgcggtgacataaagtttacgaaatctcatcatattatcattcattcttagaaattttgttcgttcatttttttttttttttattttccattgcaatatatgtggggggtcgcccctgtatatatctattttataatgtcaaatgtagcattattgcttttattatttaatttcttatatgattatatgagacacatcggaccatcggacccattgttttttctttttttttttggttttcggtgggttgcacgggttgagagagagaggaagagagaagggg

SEQ ID NO: 122814 - DNA, 1634 bp, Cannabis sativa
  modified_base (26)..(28): a, c, t, g, unknown or other
  modified_base (1523)..(1524): a, c, t, g, unknown or other
  modified_base (1594)..(1599): a, c, t, g, unknown or other
tttcattgttttagagatattcatannnaggatgttaattcaacatacttattagtaaatctagatcctggtaaaatattcccgacagtaatttggtagaaaaccctaaattttacatatgggtattagaaagtgttctaaattagacactaaccatttttatgtaaatgtgacatagggcatctgttcagcaagtgacatttctattcagattgatcgacacacttgaatttagaaatgaggtaagactagcataagatatttatatgtatatgtatatgtatgtagattacatattttatgtggttcgtacgtatactaccaaaactagtacagtagcagtaaaaagtgtattggtatagtatatggcttttaaagagagtgaaacagtattaccaacactagtatgggatgagtacgtagggcatgtgacacaatacagcgatgcggttcatccctaccaacactagtacaggataagtgcttagtgcttgtggtacagaggtcatacttctgttaagaacgttcttgatcatttgaagtcttttaaataggtgtatggcgcctaaatacgcgatttctaataaacttgttgattacgcctaagctagtagggtcttacactcagtctcacttgtttcttttctatttttttgttggaaatatctaagttgcatcgccacactagagctccctctcaccacgaactcctttgttagctgcaccaccaggagcaatacaagccaccaacatgctcacgcaagacaataaaggtattcgtttgtaatttttttcctttttgctagaaatcttattgtgagttgtggttttaaactgtgaccctagaaaaatattgtcacgtatcgctagaaatcatacagtaacagttttggtttcaaactgtaataattaaaaaggaaaaatatgtaattattattttatctgactgaatatttagaattcttttataatttaattagtatattattcataataatatggtacttttttaattatagaaaattaacctaataaagaagccaaggccaacaacaaaggagaactcaagagatgactattaggtggattctattattttagttttattttaaatttttattcactataattttttatttggaatcggatgactgtataataattttaagtttatattattttgtgttaacattttggatactaaactaagatgtgaatttttttgcattaaattttaatttgatgattcttatatgaatatataatggtaatataaaaattaaacttaggacaaaattttaaaagggttattatccaactcgatgtatagtttgttgggttgggttgtacaaaaaagaaattttgaatgggttagaaattttcaggccgacgtaattgggttggctcattaaaatactgttggattataatttaccaagaccaagatttactaacaaatatgtttttaacatcctaaatatgaacttctaaaacgatgaaaaataaacacatataaagtatgnnaaaccttacattggttgcagtagaattaaatgactcatactgctcagatttctaacccttattcctttcnnnnnnagagtataatcaagatttgagcccgacactccttc

SEQ ID NO: 122815 - DNA, 876 bp, Cannabis sativa
  modified_base (144)..(163): a, c, t, g, unknown or other
aaaatagtatataaaataattttccttattttattttattttgatgaaccagctgaattttattactccaaaaaacctttcacaaacttttacatagagagacttcataattagtaattccccatattattattattattattnnnnnnnnnnnnnnnnnnnntattattattattatcttttaaattacagctacaaaagttgatgctaaatttatctattccgtgcaatggtagttgtagattaatgaaggaaatatctatgatttttttttgagatatatatctatgaagttgaacatgaacataattgcatttattataattataattttacaaatattcattataaatatagaaaacttgtcatagaaaaatatagggttccatgagggataattacataatctactatattgttcgtaaaaaatttatatttttatatttatatattttttatatttttacagtactttataaaaataacacgaaaacaataaaaaaattacataaaagtaataaaaattaatatccaaacaatatcaaaacaatagtagaaaataacataaaagtaacaaaaaatcaacaacaaattaacaagtatacaacgtaaaattatatcaaaagactgtattttttgtaaataaaattataaaaatcgtaaaaatatttaaaatttcattcaaccgtatttttataattttttgttatttttgtgtatttgtaaaatgatttcttaaaaaaaccaattcttttgaaaaatgttttctacaagtagagagctagagcttgtggaggaaattatactctataccctttttatattgtcctcttttatttttacctttttttttaagtctatcatttttacctcttt

SEQ ID NO: 122816 - DNA, 1904 bp, Cannabis sativa
  modified_base (33)..(51): a, c, t, g, unknown or other
tgcaacataaaatgatttctaatctttattaannnnnnnnnnnnnnnnnnntgaaatagattttatttagggcacaaaacccaatagaaacatacttttataacatggaacacattctgaactgatgaaagttcaggaggaaaagctagacaacatgccaccagtccaatcttttcgagaatctcaaaaggccctgtaaacctaggacacaacttgcctcttttcccaaaacgtctgattcctttcatcggagacacccgtaggaatacatgatctcctacctgaaattctacatttctgggcttcggatatgcataactcttttgcctactctgagaggcaagcattttgaacttaatcttttctaaggcttcattagtccgttgcactgatttcggacctaggaattttttttctcctatttcatcccagtgaataggagactgcactttctgccatacaatagttcatagggagccatccctattgtactctggtaactcttgttatacaaaaattctatcagtgacaggtacttgctcccagagccttcaaaatccattacacaagctcgtaacatgtctttcagtatttgaattgtcccttcggactgcctattagtcagaggatggaaagctatactgaattcaagtttggtacccatagctcgctgaagactttaccaaaatttcaaagtgaattttggatctctatctgatatagtggactttggagcgccatgtaacctcactatctctttcacgtacaaatctgcatactgatccactgtaaaagttattttcaccggtagaaaatgtgcagactttgtgaattggtctaccacaacccaaattgaattgtacattctcgtggttctaggtaacccaaccacaaagtctatggtaacatcctcccgcatccactcaagaagttttagtagctataataacgcttctgatctttgatgttcagcctttatctgttgataagttaggcatcgggatacaaattctgctacatttttcttcatcccgcaccaccagtattagggtttaagatcttgatacatcttggtagtgccaagatgcagcggatatgaagtggtatgagcttcctcgagaatctcatttcttagttccgtactacttgaaacacaaaccctagtcttatataatagcatcccgttatctgttatcgtaaaatccttaacttgaccaggtaaaacctcttctgagatctctactaattttggatcacttaactgagcaactttaatttgctcttatagattagattgcaacgtcatattatgaagtttgcctataaccaacttgatgctcgatcttaccatgtcatctgctagctgaggtgaaattctaatcatactcgttacatgctcgggacccttcctcctctgggcatcaaccaccatattggccttcccaggatgataaaggatttcacaatcatattctttaaccaattctaaccaacgcctttgcctcatattcaaatctttctgagtagagaagtacttgaggctcttatgttcagtataaatttcacacttctctccgtagagataatgccatcaaatcttcaaagcaaacacaactgcggtaagttctaaatcgtgagttgggtatcactgttcatattctttcaactaatgggaagcgtaagctacaacttgatcgacctgcatcattacacaccccagaccctgtttggatgcatcacaatagactacaaacttatccttatcagaaggtaaggccaataccagagctatccctattttagctcaaagaagcttgcttcacacttgtctgtccataaaaactgttaattctttttggtgagttcggttaaaggtgttgagattttagaaaatccctcaacaa

SEQ ID NO: 122817 - DNA, 639 bp, Cannabis sativa
tgatatcttaaaacttttgctcaactatgaattttaatcagatttcaggagccaaagttgaagtgcacgatcctcgtccaggggaaagtgaagggaaggttgttatatccgggacacctgatcaaaccttgagagcacagagtctactccaagctttcatctaaactacgaagaaatcatgaaaccagaataaatttaatttgatctaaaggactgatttttgaccattttatttcatacagttgagcagaggaggtatattcgaagtgttttcatgttttgtgtacattctactaaaaggtagccaccaaccaagaatagaatcacagtacagtatagatacatccaaggttcttgatcgactagcatgtgacagtgaaattgtgtagttttttttttttttttttgtgagtaactagataagtacacccgttgattcaacatagaaatgcattatgtgtgtttttttttttttcacaatgagttattttatttgcttttgcttgattataattgttccttagagcatggggttgtccattgaagttgtcttgccacatatgtaatgcggtttaatttttcaagatcaattttatgtgaagtgttgctcaatatagacaaggctaattagtaattttt

SEQ ID NO: 122818 - DNA, 2751 bp, Cannabis sativa
cacatcctcgcgatcgagctggacaccaaggaaagctcttcgttcagagacatcgacgacaaccacgttggcatcgacattaacggcttggaatcggtggcttctgcttctgcagcatattttgtcggagataataataatggttatgagtttaagaacttgagtcttgtaagtggcaagcctatgaaagtttgggttgaatacgacgccgttgtgaagcaaattaacgttactttagctcctgctattgtcgttagaaaaccccagaagccccttttgtcattgaccaaagatctttcaccgattttgaaagacaccatgtttgttggttttacttcctcaactggctctgttggaagtaatcactatgttttgggttggagttttaagattaatggccaagcaaaagagcttgacttaaaacaacttcctaagcttcctgcatatgtagatcctagtaataaaacaatggagtatttagaacccaataaaaacaaaaagggatctaataagcctattttgatagttgtgttgccaatagtgttggttatggcaatggttatttcagtagtcatggtttatgtggtaagaagaagtaaaaggtttgtagaagtaatagaaaattgggatgaggttgagtttagacctcatagcgttaaatacaaagatctgtgcatagcaacaaaagggttcatagacaaagaattgttggggaaaggtgggtttgggagtgtctataaaggcatgttgcctaacactagtactgaaattgctgtgaaaaaagtttcaaataaatcaagacaagggatgaaggaatttgcttcagaaatatcaagtatgagtaggcttcgtcatagaaacttagttccactcctgggctattgccaacacaaaggagagctcttattggtctacgattacatgcccaacggaagcctagataagtacctattcgaccatcccaaaaagacattgaattggaaccaaagatttcgagtcataaaaggtgtggcttcagggctgctatacctgcatgaagaatgggaacaagttgttgtccatcgagacatcaaagctagtaacgtactgctcgatagtgagcttaatggaaggcttggagattttgggttagccagattttatgaccatggaactgaccataaaaccactcacatcgccgggaccatgggatacatagcgccagagcttacaagaatggggaaagccacaacctactctgatgtgtttgctttcggggcttttttgctcgaagtggcctgcggaagacgacctatcgatcgacgagagccacaagaggatgccattttggtggacagagtgttctcttgctgggatagaggcaacattcttgaggccaaggaccaaaagctggagtgtgatgatatagtaaccgatgaagtggaagtggtgttgaaattggggctttggtgctctctttcagagcctctggctcggccgagtatgaggagtgtgatggagcacttggaaaagcttcatcagttgtcgttgcctcacatatcacaatttcggttatctgccaatgggctgacgtttctacaatattgtgaaagtttccaaagcagtggaagttgtacttttcaactgtctgttgttgattccgttctctcttgtggtcgttgatagtgtatttggaataactgtctaattactaagcagtgtaattttgagggtacgtaataaattagacgtgagtgtaattaaaatctattttaaggctcgtttggtacaccatattgtattaaattgtattctattgtgttgtgttgtatagtaatattttagattgtatttattaatattaatattattattattttatttaatacaatactatgtttggtattaacttgtattaattgtttgtataaaattatattatctttactataaacttgactccaactctcacccccgtccaagtcctgggttccggggctggggtcgggtgcaggtttgggttcaaagtctggggtcgagtctgacattcagggtccgaggccgggtccaaggctggggtttggttttatggtaataaatcaggtacgtattggaataattattattgattatcgtcgtatcatatgtccaagatcaccatatgtatatatattaaatctgaaagtaaaaaacattgaaagattatttacctctcgaaacctgtcaaggtatcctcgagtcttttagtatgttgaatccttagaacggtgatgtcgaaactcaactacttttgaaattaattagttgattaattaacctaaaaagatcgagtggggacaccctacattagggtcacctacactgtgcctggacacagtgtaggtggtgccttcctctgtcttagttaagacaagggttgtgccatttgtcctcacaacttttattatttcccgatttaattaatataaaaataaattatttattacaaaacaaataattactattttgataattgaaaatagattttttctgaacttccatatacaacttttatttcgcgcgttaatagtatttcaaggtggtgatctatggaccatggacccataattctaagttctaataaaatatatttatttattgaatctcaacaatcaaataaccttatgtattgatttcataatttctccattataaatatgaaattgaactcttagtaattctagaattatatttactgagtgttattgcagtgtccgttgatataattgttag

SEQ ID NO: 122819 - DNA, 549 bp, Cannabis sativa
atactctgctcttcacttttgtcttggtatcagagcaaagtgatccatggctgctcctgctgctgccgattcaactgccactgcagaaagcatagctccggttccagcaccacagtcggctgctgctcctccagtctccatcttccaaagtcttgcccctttaactctaaagcttgatcgaggaaactataccttctggaaatcgcaggttctaccagctttgcgcgcacacgaccttgaaggatttgtactgggaacgaaggaatgccctcctcagtttgttgacaacacaatcggaggaacaaccccaggagaaactcgacagctgaatgttggatacgctctctggcgaagaacagatcaagccataatgagttggcttctcaactccatatctgagaccatgtttggtcatgtggtaaggtgcactacctcttttgaggtatggcacacacttgaactcctatttaccactcaatccaaagctagaactctgcaaattcgttttcagcttcagtcccttaaaaagggaaatttatctattcatga

SEQ ID NO: 122820 - DNA, 813 bp, Cannabis sativa
  modified_base (753)..(782): a, c, t, g, unknown or other
aaaaaaaaaaaaaaaaagggagccaagaacaacacaaccaccaacaaaccacaacaacaagaatgggagacccctaagaagacaaccactatggtgacaactcaaccaacagtacacacgaaggggaatgctgaaaaaatcagaaacactttttcagcattggaggagcaaaaggaggacatagtagctcttcagttagctatagattctaatactcttgatgtttctttaactgcttatggataacaacaatattggttgttgtaatgtgagggggttgaataaaatggagaagcaaaacactgtttttgaattgtgttgtctgaataaaataggagtttgtggtttaccggagacgaaacttaaagggaataaaattagagagatgattgatagaaagttctttaattgggatttttacacaagtcccactattgagaatcatattttgattatatggaggaaacattttgttcgagtaattgttgttagagaagatccttaatatgttcattgctttatcaaaatggttggccaaccgaatgctatgagtcttacttttgtgtatgggttcaacacgatggaggaaagaaaagggttatgggatgggttgatcaaccttaagctagctgctaagccatggttggttacaagcgacttcaattttctctttgaattggaagataggaaggatggaaatgtggttaccctgaatgacataagggatgctaatattgttggaaattattttannnnnnnnnnnnnnnnnnnnnnnnnnnnnnttattaacatcctaaataagaactttctaaa

SEQ ID NO: 122821 - DNA, 2079 bp, Cannabis sativa
ctatcatatgtctcaccatatttatttaggagaatatgcataataaaacactctatatcaaatttaactcctcctactaatttttaccaaataattcttttaatttcatgaactttttattttacctttttttaatatttaaaaaactgtaaaaaactaaatttccaccctctcgtgtttctctctttattttgaggactctcactctcacagctttctctaagctccttgttctctctctcggtagtgcaaaatcgggctacacccctaatcattcaaaaatcattcaccattataatgggtaagttgtgttttaagcattttgttagacattagtaatagtatgtagtttgctttcgttatatgtgtgtggtatttgttagaactagtattttctggtctgaaatggtagatctaattttctgacgaaatttgggttttccaagtattatcgacagtttgttgatagaatatcaatacaatattgatagcatgcgaaggaaagtcagggatgacctttatcgacaagatatcaaaagttttttgatgatatgtcgataaataaagtaatttaaataaaatgcatatatttggcaatatatcgacaatttgtcgatataatgtcgatattttatcgataatgcacttaattaatttaaactgttgttgatatttaggaatatttgctggtatttatgtttgtcgacaatttatcaacattctatcaataaattatcgactttaagacaaaaagattgaaatttttaacacagtcaacacgaaataaatgaaattttttaaatagtatataagtaaagtcttaaacaaacattaaaacaatcataacataataatttaaaagtctttactgtgtccgtgagactcgcaatacgggcataaagatccaggcttgactagttcgtcattaaaataacctaatttgcaacagcgacaccctttgaggaatcctggtggtggatatggatatttcatccactcataatttatttgaatccgtaggaacctccattcgttcgctacccttttattttttaaaatatttaaaagcttctatatattcttgcatttcttgagtagtttcgtcactaggttcctatttgatcttttgggcagatagaagtttgtgtttactctctttactagacatatagaacttataagataaaaacactctatggttaaagaataaaaaaatatgtaacttatgaagatgaaatttgcttttatatagcagaatagttgttgggaatgtgagaaaaatttattaacattaaatgtgtaattgtacacgtgtatggcatgtaatgtacatttatcgatataatatcgataggttgtcgataagaggagaaatttgaggccacactttatcgatattatatcgatgatatgtcgatattatatcgatgacatgacatgcaatgtgcatttattgatagaacacattgtcgatttgatatcgatgatatgtcgaccttctgtcgataggaccatcgctcaaaattctgacatttcttatcaatgatatgtcgatagtttgttgattatatgaattttttgccgtttttagttttttataattttttggcatttttccctaacttatctattttttgtttgaaatttcaggatcgactatgtttcttgctatatcatacgatggtgtttgatgtattgagggttttaattgggtttataaagcctaaggcagtatgacgttgacagttataactgacacaaccatacaacaaatacaccagattttatatgaagagttggaggttgatcctttggcatatgatttgaaattggagatttgttccttgtacatgaagggacaaatggttccgccagagcttattaagaaggaacgccaactgagaacgttcttagagatgagggcaacaatgtcaaacacaaattttatgccattatttgtgactaaggtgagaaaagtttggaatttggagcctaccccgcctactaatcccctcccttagagtgtataaggtcttttgttcccgaaacagatgttgggattggtgtgaatgaggaggt

SEQ ID NO: 122822 - DNA, 1952 bp, Cannabis sativa
atacacatatttataattacattgtacgtattttaatgattgaaataagaggtgtgtaacaaattttacaaataagtgttaattacaataatttttttcaattttttatttgtaacagttacaatattatttctgtaaactttaaaaaattctaaatagtttatagtatcgaaataaggtttttgatattctaatttaccaaatgtatttaaaaaactttaaatttattttcgacacggtaaactatttaaaaaattttaaaaatttacaagaatggtgttataactataacgaatacctttataaaaaaaaatattctaacatgtacttttataaaaaaatttattttcgatactgtaaactatttaaaaaaatttaaaaatttacaagaatggtattataactataacgaatacctttataaaaaaaatattctaacatgtatttttgaacataaaaattgatttaaaaattataatagaaaattaaaacaacactcttcaattttacaaatcgttcaaactaaattgaaacagtgaaaatacaaaagataaatcaaataattcaagaaaatacaaactatttaataattattttgggtggctattgaatatcattgatttataattttttttttaaaaaaaatatatataatataatatatgtttgatggttaaattaattttttatgttttctaaaaaaaattaattgtgtgttttgaaattttgactttctagatatatatattttactatattgacgttgaattttaatttgtttttttaagcatgaatgattgatcattattttgatgtctttatatacttatgttgatgttgaaaaatggtaaataccaactcaccagattgataagatgaatagtaaatttaagtaaaaaaatgaaagacatacacctaatttgaaatagttcatttttcatgacgcgacggtaaatagagtgctacgtctacttcgagttttcatttttcacgagatggtaattacaaaaaaatactaagtgtttaagatctagtttctagagtgagaaactaaatagatgctttgactttgtgggtaattttccaaatgtaaaaaatgagtaaggaagctctccttttataggtgaagcaggcccacaaaaatagaagaaaaataaaaattagatgtttttgaccatagatgatgatataacgataaaaaataacttttgatggtgatagtcacttttcagagcccgacgggacccgttaggtaattcgaaacttatttttgtaattcccttggagtgaaatttgaggtcgatagcttcaaaattgcgattgaagtgtgaaacatgacttaatagagcattgaattagctttgaattgcgtcaatcaagtcaatattgagtgagttatgattattttactgaaggcagttcaagaaccaacactaggttgacatccagggcccatgttgacatcctagtgcccaagttgacatatgttgtgaaaaattcaacacgcaagtatatgtatcatttacgagtaataagctcacaagagtgaggtcgatcccaccaagactgtagttagttaccaaataattaaatttctaattctatttggtaataataaaaatacgaaaagatgattagtttctgctaaaaagaaaacaaagaaaataaatattaaggtgaaattaacaatgattaaagtttagggtaattaatttcatgtgataacggatttactaaaaaaaatttatattcagtataggtcatataaatctcaatctatatgcaaattttctactctcgtgataaatttaaacacataggagacattaagcataacaattttaattgctacacaaactatattaggtactctcgtcctatatcgaaatcttgttaggctaaaattagtctaagattcgggtcatatttcggttagttttcactctttgttt

SEQ ID NO: 122823 - DNA, 936 bp, Cannabis sativa
tatatatataaacaagaagaatcgaatattatgaaattatctaataatattcccttatgaaataagtcacgtgggcaaataggatgaatgggcataaggaaatggaatatgcatttaaatcaatagtttgataccatttttattatttattatattttaaatagatggaagaagagaggggtaaaaaagagaattcatattaagttattagaagtggatgaaatgagctgtgtgctaataaatgacagctggggattggtaaaagggtgaagtaggcgtttattttccccagacgaaaattaaataaataaaaaaaatattaaaaataaaaataattaataaaatttgatttgggttaatttttgaaaagggaaaattgtttagataagagaaagagaaagagaaagaagcttgactcggtgagcgtgacccagacagcacgcccttgtccgaccacaccacctcttacttggcttttggataaccattaaatactctcttccatttttacccttctatttcaaccttttttacacttttctccctcaatccaatctcacttctagttcctcctttttcttttttttgtatttataaaataaaacaaaatgataatccatattctaatgtaatatggagaacttttttattttacttattattgatttatattacattattttaaaattattttttaacccttaccaaaaaaaaaaatagattttttggcctttttttttttttttacaaaattagtgtttcttggtttaggtgtcaactttttcttcagtagattagaatgtgttccagattttattttgatctaaaaataaatcaaatattataattatgctctcaaaattataaattttacaaatgaattataatcattacattataatagaatttttttatatttttattatttatttgagt

SEQ ID NO: 122824 - DNA, 2315 bp, Cannabis sativa
  modified_base (2261)..(2281): a, c, t, g, unknown or other
ataaatagtattttcaaaaattattaaaaaaatatgtatattaataaaaaaaaaatcatttggaccccaaataggagtgggcactaggccctgggcctgagcactggtggtcctaatttcctgtacgcctagagtgaactcagccagaggggttgtcactccttgtcctgttaattgggaacctattggaagctgaggaatggtagggtcaggatctatccttactggatctctttgattcagagaagttttgcacattaggacctgtgaccattggatcagttgtctcattgggattacccctccgtgtttgtacaaccttctttgtgtgtcctgaaaggattcaaaacaaaaattgtgttgtcttttgctcttaatgaaagtactaaaatattgatctcgcttttagccaacgacaatgagtcagttaaagcgataagaaacaattaataataataactaagcattaagaacacgaatttttttatagaggttcaatcccgtgatagtggtaatagcatactctcctttttattgtattaacttgtgaagaaaaaagtaaaaagttctttatcttccttaaaagcttttacggagaatttagtagcttgaatgctctattgaataaatcatttcagatccctgaatagtgaaattgactccaacactatttataagaaataattacattaatttagtttctcaaaacaattcaaagaaaatgataaactacttactttcccataatacaataatcacatatagaaatctcatgaaaatagggatttaattgataaataaaagagaaaagtatttttaaggctttcactatcgcatttatcctgggtagaatatgcagagtgcctgtgaggtagatgctagccagacggtataacataccttatttgaatattctagctttttattcaaatcaattatttatgaatgacatattactttggacggtacaccatggggcatatttcctgtccaaattatgacatcttcttcacgtgtcactcagattgatgtcacgtcaccctgtgtgaaaattggaataacaaccaacgtatcttgtgagtcaattttgagctcgataacatcagaattgtgctattatcatttgaaaagtttagatctgtcttgaaaagatatttcaaatgaaaattgaaccaagtcatttggataagaattgtgcgagttatgcccatttactgaagggttgtaaatatattttagctccaaattcgacttgtgccacatacttacaagttgtaccacatcattgtgccaaaagatggcacatgtcggccatgcatgtttttggacactttgggtgtgttttgactttttcttatggtgagtcatattttgtaggttccagtgtcttgaaatctcatctcgacatctgaaaccttaactagagacctcttttggtgccaaagatggcacatgttggccagggcttgtgagaagtcttttatggtgtttcttacttagtttagtcatgttgatgctagaaaaacacttcggcccacattatttctcgaccaattcggtgggagagacctgtgccatcttttgggtcacaaaaatgacacaggtcgaccattgaggttctccacctcttggtgacttttctcacttatttttggtaccttgatgtagaaaaattacatttggcaaagaatctctccgcctttccttgtggccgacttgtgccacttcattctgcacaaagatggcacgtctcagctgggcttgaaaatgaatgggaaatggttcattttaaatgtgttatgctacttaatgttgggggaaaattttggactagtttcctttggtggtttgagagtagagaatcatgtcatctttttgttgcaaaatatgacacaggtcagccatgccatgggtaatggcttccttgtgcaactttaactttatgttcaagtttagtatttttatgcctaaatgagttaagttcttgttggattccttgttggattgaggtctctaggatgaaaacccttgagcgggcccataaaccctaggttggacaccattgggtggacctcggcaccaaatcaatagtttgttagtgttttcatgagttttctagatgtgtcatgagaccctcaaataggatatcttagcttctttgacctttaaagtcttggtcaaagtcatagtgttgacttaggtgtcttcaagatactcttggtttgtgagcctttgcgggagtatgttgggttttatgcccnnnnnnnnnnnnnnnnnnnnntaatcagatttgcttattaatatagatcagaaat

SEQ ID NO: 122825 - DNA, 2382 bp, Cannabis sativa
atttatggtctcacgtagatcaaaaatctcaaactttaaagagaccctatctcatgcccacaatacttatctttcctttttttgtgttttttctacttttagtaatttatacttttaatttatatattatcctaattctaacaataacataacaatatataatactaattaatatgggtaaagtcgttttctttgaatctatgttatatacgtgattaaaggaagtttgttaattattaatttttatattgtctagaaaaagttcaattatttcattataatatcgagcctattttttaaaataaagtagtctttcacaaattatcttcgaatattaagtttgaactttcataactcaatcattcaagtgtattttttcattaaaataaagtagtctttcacaaattatcctcgaagagctctaaaatattaatgattggagttgtctcttttgtcattattcacgttcatctacactttcgttttgttcctatgcttttgccattgatagagttaagtgtatttttttaataatcagattcaagtgtatctatctcacttatctcttacattttgtctattttttgagtattatatgttatttcattttatcaatgtgaaagagaatttttaataaaaatctaactgaaaattaccttaatattatatttatggtctattatcgtttatgtatttgattctagatatatatttgttgcattttcaaattaaattttgtattcaaaaagaaaaaaaggaaaaagagaaacctaatttgaattattgtgatacaatttgttggtttttttattaatgataccatttaaagtgtttttagtccacaattagtgaactccataatagaacactctaatacataatttttcttaaatctaaaatattacttagcaattgtaatcaaaatatatagctataaacttatgaaaacaactaaaggactctaatgccttttgacattatatcattttaaacaagatcatgtaggagcttgtaatgcgaacctattcaattgcttctctcaatttttcaaattttattagcttctcattttatttgtctcatttaattagttttaattttactaagaaaaattataagtaactgaccaataaatatgctaataattaatttattaactaatgactctctattggtctttaaaattctaattttattaagttacttttgtcataatattcttttatattcattttttgttgctttaatttttagtgacgaagttacaaactatcaatatacggttcaatgagttaaacttgaaagtgctattcaagtgatgtataataaatatatagtcttttaagtttatacaatataattttttaagttgaatttcaaaatgtataatttatgtgtttaatagtgattaatacactattttaatgtgtataaagtatattaaaatgattgagtttacaaatgtaatgtttaaaatatggtggagagaaatatttataataaaagaagttttttgacatttttttattgattatgtgatcatgatattcatctttaatattaaaaaattaactaaacaataataattcatctctaaaaagattgataaaaaaaatactctcaaaagtgaaaaacaatgataatatagagatgtaagatgatactttatttttctaacattttttttatataatttatggtaatttcacattataaatcatatgtaaataattgatttgtctaaaaataataataatacttattaagtaaaaagtgaagttacataattattcaacttatcatttttatttaaaaataaatacaacaataaaatgataacattctctcacaaaaaaaataataattaaaaggttggtggtatattctttttctctaatctctctattttcgtggtaagtttaatacttaattacaaactaaaaataatactaattaattaatctatttaaaaactaattaattaagtagttgcatgtttattgttaaaaaaaattaagtaataattgatattaacataattacaacttattattgaaagttatttacatatatttttttattaattgatctaaaaaaataggatattttacataaatgtatacattttcttaaataattacaaaaaatgtgcaaaaaaaaaaattaattgttaaaatgtacacatttgaaaatatttttacataaaatcatacaaattcttaatttaattatattggatgtatttaatgagaatgactaccataattataattttatcctttttataattattttatggctaaattgtacaacatttaatgagtaagctttcaaaccataatcaatattagaatattactaataaataataaaatttgtatt

SEQ ID NO: 122826 - DNA, 1031 bp, Cannabis sativa
ttattattattattattaacttaattggaggttttttcttttaaaagtaataaaaaaaaagtaaaaaattgagagaattaaaaagagaatagattgaagtattgaagctatatctagttaaaagaaatttaattggaaagtctaagaaatcatgtaaataataatttatatatatatagatttatgaaattgatattttgtttacgatttttgacaaaaaataaataaaaatcaaatgatgaattaaaaaaagaaagtaaatattgtaaaataacacaacgttgttaaaaaatatttcaaaacaaaaaaattataatggtgttgaactagtatgattttcaaaacaacacatttaaattggacttaacataaatatattgttcaagaaaaaaaatacttatatatttatctttcctcatctccataatatcatcttgtctattttaatgtactctattttacatgtagtatccatctgtgttttaaaataaggtgtataaaacatgatatcaaaagaagaatatctttcatttcgtcaaaaaagttaaagcaacatgatttaacatagataggcaaattgtagaagatatatgtcatgtataatataacagtagttaaacaaatcaagtcatctttttttgttggtggtgtctagttcataaataaagtttgtggcaatatgttaacgaatattttcgttaactaaatatataagctttttacgtaataaatgtactacaaagtttaataataataataaatgaacatattttgtagttaaaatctacatactccaagagttcttcttatatggaataaaagatgataaaataatagcaaaataaaccttatagtagtcggccatgagataggccccactaattatattttttcccttttttaaccatttatttatcatttctcaaatatcatattttccaattttaatcctataaattccaaaactatttatttaataattaaaatcaattatcaaataaaaattaccatttaatttatttattaattag

SEQ ID NO: 122827 - DNA, 625 bp, Cannabis sativa
ctacacagtctcagaatcatcctgcttgaccttccccaggcggtgtgggattgtacagcttacctgatgtttctccttacggatcacgggactactgactgtcagagagggtgtccaaaatccaatataatatccaattgaactaattagtatttttatttagtttgaatcatgagtaattagattttgtattgttatacttaaaatatatttgtatatgtgaaaatgagaattaattaaatccgaacattggatgtagccgatttgatctaaaaaatattagattaattcgaaccagttcagtagatatacataaaatacattcaatggatagactatccaattcaatttcaatccaacatttcaatgaattggattgtttcgaatgattgaatttaatagaatcatattaattattaaaaagcatgcatttaatgtataatttgatcgaatttgtataataaacattgtatgtggtctaatgaacaccactagtcgaaatgagaattagtttaggtgtttggttcgatggaataggatggtaatatgtaacattcccgcttcaagcctccattgggtccttacacccacggaataaatggctcttatatacgagtacgccact

SEQ ID NO: 122828 - DNA, 521 bp, Cannabis sativa
atgtatatatgtatacatataaggtaaaaattattttacgtatgagtgatgtatatttattaatgccattcctcacctgggcaaaagatagtgaatgaacactatcatcaaatcaaatctctaaagacacaaaagagtgccacgtttcaaaattgcatgaggagaagagaattcgtctttatggttaataaaaggaaagtgtatatatatgtatatacattaattggcttgacatgaaaaaaagagaaaaagacttctagttctcgaatttgaatcgtggcagagtatgttgaattttcaaattgaaagttcaataacgatgaatggaagatgactcaaagtgtggagaaactcaactttctaaattaagttgggaaacatgcttctttgaagcaccatcagatatttataaacgaataaaatctaaacagtaaattatatcttagatttgattcaattaaaaatttaaattgaattaaaaaatgataactaagtattatgtaataattaatttaattatt

SEQ ID NO: 122829 - DNA, 1242 bp, Cannabis sativa
aaaaaaaaaaaaactaaagcaaaaattaaaaaaaaaacaaaaaacaaacaaacaaacctaatgtaaaggaagcaacacagaagcccaaaacgagcagaacaaaagtagaggagcactgccatctttcgacgagaatagttcacacttagtcactcgttgtggttctaaacggtgaaggtgctaggacaatggaagcacatccctttgggtaaaactcaagttccctcctttatgtctacaacactctaaaaactaactacgagccattacacatcggagccaggatgcttgaatagaaacccacgggcacaaccgagatttgaaaaaaagaatggaagagaaacacaactccatagtccaagttcatacttaaaaagggccaacgcaccccgaaattgaaagagagagaaccaagagaaacccaccaccatcgcgaccctacaactcacggggacagagccatttgcaaccccaaactagaggcatgagacctctcaaaagagatgcctagccactcaggtcagtgaccgcttgcttgaaaaactcaggtgccatggatccagccccaaaatttagggtttgatgaccaaaaaaaaccttccaacactgagacccaacagatagacctccacctttcgcttgaaaatggtaagaagcaaagcccccgagagtcactagcccagatttggccggcaacacccattggagaagaaagatgaacaatttggatcttgtattttacaaaataaaatataatgatatgttaaatttaattttgctcaaattaattttattccaaatcttaaaattttttggataagtctacagtacactcttttaaaggagtgtttcgatagactctctatctgttttgacatataaaagagcttttaagtcaaaaaaaaattatgattgcgtacgttatagttatttaagaccacttgtaaaattttaaaaaattttaaatatgcgatcgcaaaaataaactaaaatattattctaaattctgaaacaaataaagaatctatcaaaataactctttagatggtaaacgacaaaaatttcaaaaactttatattcttctaacagtgtgatatgatttctgatttaatcataacttaaaaaagttgtgactaattataaattatcatttctatgttgtgactaaaaagttcgtggctaaaagtatcagttacaaaaattacaatttgttgtaactaaatagtttttagtcacaatact

SEQ ID NO: 122830 - DNA, 1240 bp, Cannabis sativa
atatttgtaagtttttctaaaaaaatgccatatttagggcaattaagtttttatgccatatatatcaaaacatatattcattttcccatatttttgtaaatagccctttatttaattttattgggctcatcgataaaattggaagtttttttggattttcttacaaaaatattgtattttgggcaaaaatttacaattttactgcaacataaatttttttaaaaaaattctctttttataaaacaagtataaaacaacaaaatagaataattaaaaataataatagaacaactaaaaaataacagtaaaacaatgttaaaaacttaatataatatacagtataaaaaatactcagtattttttaagaaaattccgccccacagtaaaaaagaaaaaaaagtaagaaatttcagtatatagtataaaaaccccaagtttctttttgttgagattattccataatatataaaaatagtaaaaaatttatattttttacatatctactttttaaaaaaaaaacaaattacacgatttttttttttataaaaatacaaagtgttgttattctcttgtttaaaaaaaaaatattattttgatgttgttgttactagaaaataacgtgatttatttttacaacaatacaaagcgttatttttctgttgttccagaacagtgttattttgatattgctgctacgagaaacaacgtgaaagtaacatttttctttaagaaaaatataagtgaaaacctgtaaaaaaaactgtaaaaatataaataaaaaagttcttaaatttcccttttttattttaataaatttgaaattttgatttcaaataagtagaatttacactatatatatagtttcttttaaagattgttacataattgtgttatgtttgtgtatttttaagacatttttagtttgggtaaatggcggcaaaacccctaatattttggttttggtttcactaaacccccacaacccaaatttctgcgggtaaacccccaaaaccactattctgttagcaaaaacacacttccattgaaatttagttgttaactgccaggttggactggagcgaggacacgtggcacaattttattggtccacgtaaaaaattatttaaaaaaaattaaaaaattaaattaaaattaaattgaaatttaaaaaaaaataattataaataaaaaataattttttctttttttctttttcttttttctttttcttttctttctt

SEQ ID NO: 122831 - DNA, 716 bp, Cannabis sativa
  modified_base (682)..(682): a, c, t, g, unknown or other
tgtgcggctataaacaattattttgattgtaacacgattatagatttatattgtgatgattgcatagactaaattaagttatgttattttgctaatgaaaattgaacagaatccattggtaaattctgacccgcactaaaggcctaatgatttggacagtctcggagagagggttggtgtaatagataatgtctgtgaaaagtaggaatagaggatttctgatggatatctaacataaagctgtacagagttatttatctaaacttcattacgaaatagttctttccaacttggtctggaatgtaagcacttaacagagttagggaaattcatcactcggtaatgttctcttttgtatttttcttttgaaacaacaaattagaataaggtcatttccccgaagacaccaatatgaaccccaagaaaggccagagatcctatttcaactctcaaagatgcaattcaacaagttcaattcatgtataatgctaacagtagaatgggattttttttagtttttacttttttatggaatttttaaataaaacttatgtggtatttttcttacattaggcttttaattattgtactatgttgttaagctaagaaactctttatttatttgaaatgtttgtgttttctaagttacatgaaaaatcttatcattattatattataaatnttattgttagtcatataaatattgtttttttttt

SEQ ID NO: 122832 - DNA, 1271 bp, Cannabis sativa
  modified_base (1213)..(1215): a, c, t, g, unknown or other
agccatgttagcagagagcggaggaaactgctctgataccatgttaaaccggttagccattgatgaatgcataaagcataacgaaagagaaagaaagagaagaaaggaaaaatgaacaatggagaagaaaagaaaatctcaatcttattgctgaaccaattgacttatatacacacgagcataacaataaacagaaagatgaaaggaactaactgacaactgccaataatagaaataaccgaaacaattgcaacaccaactaactttctgttctaaaacttattaaaggaaaaaagataaaatttgaaaaatctttgctcttagttaatccctacacgtttgtcttgtattggaccttagcttagctttttctatagtgagaccctgatatagatgatattgcttcttttggtctcatgataaggtttgacaaattattgttgtcattatttttttcattgtggaataaccatagatttttcaatctattacctgttttcatagttttggtgcattggtgcttttggttgttgttatctcgaaaatcgtctaaatgatgtggcataaaattgagtgacacgtgacatgtcaaataactatatgggtggcacttaatgaatgaaggttactaagattggatggctctcgagagagagacaaggaagtaaaacatactatgttagaattgttgaatcagctagacagtcctatcactaatggttttccagttagcaacgtttagataagcagtgtgggccgacttgtataaagaaatctgattctctaataaagggatataagcaattatttggtcggttagatcgatcagataaaacaacttactctaattaaagatccatgaaatcagctcctaaatctttgaagaccaaattatgatgggtgcctaaagactaggaatttggtgaatattcattattagttttatattgtgtaattaattaatgtaattgatttgcttattagcttataaatagtagctcattttagagaaatgagattcatttttgattcaagagagctcttatgctgggaaaaactatatatgtgtaatctttaaaaaattattgggaaactcatttttcaacccaaatgatcttaattgttctgagagtaataacaatctaaggggagtaggttatttttaaattgttggaattaatttaccagtatctaaatttactaacaagtatgnnnttaacatcctaaatatgaactcttaaaacgatatgaaatgaacacatataaagtat

SEQ ID NO: 122833 - DNA, 838 bp, Cannabis sativa
  modified_base (809)..(812): a, c, t, g, unknown or other
aattactgaagcccccattacactaatttggggccaataagcttgactcctcgctttccaaacgtgttatattgttgctgccataacagaagcaagcacctattttttgctcttcgaactcttcctcttccttatccattttataagctgctaaatcatgaacacttaagtcttctagttcagccaaattttgagcacttctatacgtattctgttgctaggacagaaaaagaaaaggtgttgaatcgtctcttcttggcttctacacattacccaccatgggtccaaaatagaacccatcttgtacaatttctcttctgtttgtaatcaagcatagccaaccaaagaataaaacgatgctttggaaggttaagcctttcttacacttcttttctcaaaacaactttgattctagggaggctaaacatattgtctcttgcattaattttgtatagcaaagtagaacaattacgaagctcagtacaattcttaaatctattcttcaccttataaatttgcttccagctctaattattattattgtctaactaactaaaatatatatacattttttttaagaggtataattggcccttgcctctatgtggattagcctctagacattataactcttttaatcactaaagatattttggttatatttaaaaatattttaattttaaggtcctaattataattttatatgaaacacaaagtgtaaagtaatttttttaaaactatagttaccaaaaataaaatatagaatctaaaaatagtataaatcccttatatttatatatatatatatnnnngtgcactcttaatgggtattacctat

SEQ ID NO: 122834 - DNA, 1519 bp, Cannabis sativa
aaaaaaaaaaaaaaactagcatttaacctcatttatttgaaatggaaacaactagcatttaatctcaaaatgaaaactataatttgttaaataaaaacaactagtgtttaatttcaaaaaatagaaaccatttaacttcgtaatgaaaagtatagtttgtgaaatgaaaacaactagcatttaatctcaaaatggaaacaatttaatcacgaaatataaactacagacaaatgcttttgtttttaagaaaaactcaaagattaaaccaaagaaaccaaacatcacataccagaaaaatcatattatcgaatgccatgcacaactctgctttgctatgctcttgaaaatccaaagcaacaacataacaactctctcttcaattgtaaagcaagatattcaacttccagtgcaaatgaagattgagctgagcaactgcaattttacaggtccccaaatgaattcaccaattgtgaaaaggagcaattaatgtaagtaaaatcggagaagtcttctcaggtgatgaaagagtttgcttgtactgatcatgctataatagtaatgaatttgaatagctgattatagtcacatcagaatgtacctcatggaagctgcaaataggagcttttttaatggctctcctgtctggaacattggctggctgcaacaacgttggttggctgaaatattttatcataattcaaataaatttagggcatttataccaagaaaataaattaagctaaccatttatcaaatataacagaaaataattaactttattcttcaaaagcagcaaaaataaaatgatctaagcatttatcaaaccaaccaaccattgatagtcaatgtttaatatatatgttttagctagaccaaatacaaagcaagtaaaacccacttgcttagtctctttgtaagtatgagttatgggcttataatgccaacatataactctatataaaacatatacaattacttaattatactaattttaatattgatatattctcatataaattctcggcgtttggcaaaacaaaacaaacattgacttgatttaaatacttttaaagaatataaaccatatagtacataacacacataatgaacctaagaaatacataattaatagagaattaaagacatcaaagttaaacatttcaagaatttgtttgtaaaacttcaaacagggcacattaccaatcttaggttggtgaaaatccaactaatatttcacagtgacttgaatattcaaaacccaaccaaaactcaaactcactccccacataatgaatgaataaatgaataacaaaaagtttcggtaactaaatttgggagagataattatatggttaaaaacatgtttttttaatatagtagaatgaaatagatagagaaataaaccttataaagttgtatatgggaagaaggaggaggagcttgggcttggcttcaaacgaagtcttcgaggttgggatgaaatcgtcgagcatgcaactactgttgggttttatgccct

SEQ ID NO: 122835 - DNA, 1495 bp, Cannabis sativa
attcgatatacccatttgttgcttatgacatgttgtccatcaggtaaggaaataactatccaagtattattgttttccaaggcctcaattttggtatccatggcttggttccaaatcttttctttacatgcttgagcataagaagttggctcaaatatgtgatatgtagctaaagctgctgctcgaaattcaggtgagaaattgtggtatgaaatgtagtttgtgataggatagagggaactgcttgttttactattggtgttgcagcaatagtcgttaagatgagcaggggtatggatgaccctgcctgatttggtcgaagttttcggggctgctgatttgagtggttcatcagtagcagattttggagaaaaatcagttggaaaaaaatgatcaatggattgattgggagtgttgcttttgaaagggtaaatatcctcataaaatatgacatctcgagaatggaatatgtggtttgtttctatgtcaataagggtataggctttcatatttttggggtagcctatgaaaacacaggattttgctcgaggagcaaatttatgggtagtgtgaatgggtgaaacataagctaaacaaccaaaatttctaagatggttgtattggggtggtttttggtgaagcagttcatagggagtcctatctttgagctgaaccgatggtgttctgttgataaggtatacagtagtttgaaccatatagttccaataaaataatggtaaatttgattgaaaagcaagagctcttgcgacattaaggatatgctgatgttttcgttcaacgatggcattttgttatggtctagccacacatgaattttgatgagtagtgcctttagtagcataaaagcttttgagatttagttcctttgcattatttgtcctaacagattttatgttctgtttgcaatggacattaacaaaggtgaaatttttttgaatgattttgtggagcttctgatttagcccgaagaagatatatcccatgtgtgccttgaatggtcatccaggtaagaaagtatttgtatctttcggtataaggaatgggatatggtccccaaatatctaaatgtattaaatcaaagattgcttgggaaaagtgattgtttgatacaaatggtaattttttttgtttagagagatggcaagtaggacagtgatggacatgtgatgcatcaaatggaaattgcagtgttttattgatcttatttgtaattagtacagacggatggccaaggcgtgtgtgccattggtttttattttgtacattacaagaaactgcagtaaaagctcggtagtagtttgcatcttgatgtatgtaatagagcttgccaattcttctagttgtcacaatcgttaatgtctgagaatggtcttgaatagaacatgtattagttgtaaaagagacatggtatgaactatcatcaattaaagaagtaatggatagtaaatttaattgaaattttggtacaaacagt

SEQ ID NO: 122836 - DNA, 688 bp, Cannabis sativa
tccaataactatccgaatgtttcggatcagtaatgatccgtcggatcggatcactgatccgatccgaatgaatggatctttttgtcatgcctagtcaaaaagaaaatatgtatagaactatttttgtgtgagaaatgctaaaaggtaccagtggtatttaacaccacttaaatgtcatgtcgctattatgatatatcactaactatttacaaggggccacactaatagtgtgaatgcctaagagcatctccaatggggttgctcatggagtggtttttgccacatgtgcattttggtcagcattttaaacaaactttatgaacatcattgtctaaaatgagcaatgaccatgtgacataatttaattttttttttttttccaaaagagctacttcatcaccaattaattttttgagagaatatatataattataaaatataagtaaaaaaagtagtatgtgagatcatgatggttaacttttagatttgtccaccattgaagtaatttttgtaggaaaatatatcaaatcttatctcgttaccacaaaaaataaaaaatatatattttaaaataatatgtgtattttgataagagaaatttgaaaaaatatgcatcaaataccttaatattttatccctaaactaatacatatcaccattgaaaacatatgaccactttatctaaaac

SEQ ID NO: 122837 - DNA, 850 bp, Cannabis sativa
  modified_base (39)..(39): a, c, t, g, unknown or other
gggcgggttgcacttaaattttagcaacccgaaatttanattgggttagaaaatatataggataaaccgcctaaaccgaccaatgtacagccctagagaagagatacatatatttttatgtaatgctagattgatgcctaactttttggcttgtatagctttgtaattgtttgtgattaataaaatttgttctttcttcataaaaaaaaaattaagagtaaaatcagtcgaagaaaccacaaagagaaaaagagaagtatattggataaaaatattaattgtgacttctttttttgcttaacatattacataattttacattttaaataaataataataattagcccctaaattcttacgtcagtcttataatttgttggcagggcgacatcatacttattaattgaatttggatttttatatattttagatattttccaataatatgtataagaaaatgaatccaaacaaaaccttgcgtctcagttcatatcaaagactcccataaataaatttaattaacaatcttatttgatgagaaaattgtgaagatattacaatgtttttttttttattttttttaaaaatatatagcaataaaagataattataaattagatatttgtactaaatatttactaacttgtacaagattgtaacattaaaaaaaatattgtaattattatgattttgccattatattttcatagatatttaaacaaaaaaaaatgtacaaaaatataaatttacagtctttatatatatactagaagaaagttacgtgcaatgcacgtatacttagttttatgttaggtgctctataatttaattgagaaagattcaataaata

SEQ ID NO: 122838 - DNA, 1347 bp, Cannabis sativa
ctcattttagttttttgagatttgaactgtacaacttcattaatccattataacataaagggaaatttgcaacataagtcctaaaaacttatgttagatataaataagtagccaacctcaaaaattggcattaaaaatcccaaggtgacaattttttgttagtccttaagttaactcattagtttgatccttacacaaatgacacatgttaaaatattattggttcaaaacataatttaaaaaataaaaaaaaatatattagaaaataaaaacattatattttttcatcttttttcttttttctttcacattctttcttcttcgtctgactttttttcattccattactgaattggacaaagaaagcaatcctcttatatattgcttggaatttcaacccctccaacatgagcacatttcaagcttagaccaccaatctgagatcaccgaagatccaccgcgcacgatggccatctacgatcgacaacaagacatgaagaaaccaacaatgagatctacaagatctttatgagtagattattaattattctttttatttttaaaattatttttaattaaaattatgatttccactgataatactttcatttttaaaagaacaaactgaataattaacttaaggactaacagattttattgccaatttttaaagttagagacttatctgcatcaaacataaacgaattgggctcaatacgaaaacacaagccaacactcacttggattattccacaatccaagagattggtactcatatgttactagggagagctctaactaagtagcaaaccagaaacagtccactctcaaactaagtagcctttctcctctgaaataggaggaatatcacttctttagggagccatgccccaaaaaaatactaattattcttttgcttttgattcatttttagaaacaaaacagcacatttatatttataagcaatgtgaaagtgatgtttatgattcactataatattattgttatacttaattctaaattatacttaaataaaggccagtattgattagaaaaataaaactggaatttaaccatagagacaacaagtttaatcaaatgagtaatttctatttactagtttctcaactagtcaaaaaaatcccttttcttttgaagaaaaagagtaaaagtatgtgatctacaaaattgttttatgagaatctatgttagtactacaaattacatcatcaattcaactgagatgtgatatcaatgaagatgttttctgtgcaaggaattgtgagtccgcccatgggatgctcatatccgaattcttcttctgccatactaagcaagtcttgaaat

SEQ ID NO: 122839 - DNA, 1701 bp, Cannabis sativa
  modified_base (1628)..(1661): a, c, t, g, unknown or other
gtatctcctcagtccattttgtgcgtttcctactgttctttgtaagtttctttcttaaaaagttagcttttgtctcttcgtggttgttattggggacaatagtaactcacgtaaaaacttaatagaagggaatatctttgataatggggcccctgaagttattggtgatattccttctcaactacctcaattgtctgaagttaatatggtggaatctaataatgaagcaacagaagggttggtggagccgcctaccaacggtatctctgaaaagtcaaatgaagacatcaaagatttgcgaaccaactttctggagtcaatgactcttgaactggaacctgatttcgagcttacagctgatattgttaactctggtgtattagtcagctttttcggtggtaagggtgtttccaaatccaggctaagagagattctgaaccaaatctggaagctcaagggccactggaagtttaagacaatgaagcccggggtgtggggcatcttctttgatcaggctgaagattgcaaggaaattcttcggaataggccctggattatcaatggtaaattactaattattcgtgaatggccagaggatggggattggttcaatgtggatatgtggaaggctattttctgggtaatagcttctggtttttcaactccatacctcaatggggttaatactcgtaccatagcagctaaagcagggagatttgtgggaagcgacttggcaaatcaacgtaccgtaactagaaggagctttctaaaatttcaagttgagatagataccttccatcaactaacatctggttttttcttggatattaagagaggtaggaaagaatggattcagtttaggtatttcaaattgcctaagctctgttataactgcggatacctcggtcgtgataaaaaagcctgcttccgatcaactgcttatgcgtatccacctcagggggctgcagtgcccgcttatgggccgtggatgaaggctgaatcagcagtcttcagctacttcaataaccggaatcagttttatttttttcagagaaggagctggccggagcttcacaacggtaaacacttcaccagtagctgatccgaattccaaagctataggaaaatgacaagttcaagacgttaacagagttcagcctttgcaacatacaacttgcaacagagataagtctttgcatcagacagcttgtattaaaccaaccaggaaagtcatcagagtcactaacaatggcccaagtgctactttaagaagaaatttgaaagtggtggacaaaacaagtgtcaaaccgctagacattaacattggtcacaagttctctgatacgctggcaactagacatcctaggaaggaaagaaaaggcaggtcagtttctcctagtgtgctacggagacatacacaaggtaataatagtcctctttctgatactgatattttaaacaaatattcctcgagaccccctcccaattcggctgataatggtattcttacaaccattatggccaacattgagcccacttataaccagatggtggaaaaggcccatgttgaattgtgccaatcaaggaaacctcataagctgttggaaattattttaccagaatcttannnnnnnnnnnnnnnnnnnnnnnnnnnnnnnnnnatatgaacttctaaaacgattatttggcattaaaataatg

SEQ ID NO: 122840 - DNA, 964 bp, Cannabis sativa
  modified_base (55)..(56): a, c, t, g, unknown or other
  modified_base (906)..(915): a, c, t, g, unknown or other
actaatacttttagccacaaacttttagtcacaacgtaaaaataataatttatanntagtcacaactttttcacttttagtcacaagtgttcttgtgactaaaagtaagattttttgttgtggctaaaatgtactattggtgcttagtacctttctcagtattatatcgctattgttttaattaagtatcatatcccatataacttaagaaaataacttctaaggaatatcgaaaaccaaacgtagagtgtcacctatagaaaatgatgggcaccactagtacccaataacaatgctcactgttaacggtaagaactcgtcaactaactttattgctggaaaattagaatctaaagcaaaactcataaaaaatatgaaggtgaactgaaatgcaagtttaaatggctaagagatttcttaagtaagagaatgattctttctattgcatttagtatgtgaagttacacaattgatttttcaacatttgcgaatggagtatttataggctctaatcgcctgagttacatggtggccctaaggagacaagctgtcgttttcggattgcaaatcgcaagagcaggaggtggtcttgtgcctcgtacccttgtctagtgttaggtggtcccaggttacaaaggtggtggctacaacgtacccttggtcgggtccttagaccttgcaggtgcagtgccttcactactcgtacctccttgctttcaaaacttgtaggaggcgtggttgtacacttttcccttgcacgccttgtcttttactttctcctctaacgacactcttctcaatgcacattcaaattttaccctcgctccatgttacacatacccaacacacacacacacacacaacacagctcgcacacgagcccccaccattagggtgatctatacnnnnnnnnnnacttacaaactacttatcatgtgaggttaaacggtgcgaaattgctaat

SEQ ID NO: 122841 - DNA, 744 bp, Cannabis sativa
  modified_base (154)..(159): a, c, t, g, unknown or other
cccaattcaaattgcaatcaacatcgcaactcgtgtaataatttaaattgtaacgaatagagcaacttaaatcgtaaaaataaaaataaaataaaaagtgagtgatttcttttcaaataatgtgtgtgagttatataaatatgtatatatatannnnnntatatatatatatttatagaatatgatgatcaggtgattgtgaaaaagagctctcattttcaaagtttgttcacctatcaattttacacaaaacaacaatataagcttcttatattaatgcatttaacacctttttaagttatgactcatattaaaccatgtatatatatatatatgtatatatttatatataatatttgtttggacaaaaagagatgcattttgggaataagaaagtccataagtgcttcataaattctgattatatgactcaggaatattaatgttagtaccttccttggagctgagatttctgaaatgaattttgtaaaagttaataaatgaatatgaatacttgttaatttcttcttaaaaaaataataagggaaattaaattatacattgttgagaaaatgcatgcatgcaatgcaatccctggttttgattaattattgttacactaaatctaattattaattaatttgcagtaaattttcaacaaaggaaagctaaaaagaaaaaagaaacagaaataataatagctccccaagttgtgattgcatcacaaataataataataataat

SEQ ID NO: 122842 - DNA, 688 bp, Cannabis sativa
  modified_base (651)..(663): a, c, t, g, unknown or other
tactatgttaaactttaatttatcctaaaatattatatatttaagtgtccataaaaattaatactagatataattttacataaaaaaaaaaaattaataaaacaatactgtgtaatatttttataaaacacaattcaatataatactatacaatacaatacggtgtaatacggcgtattaaattaatcctaaattaattaattgtgtaagacccgattctgaatctcgccaatagtaatatgacaccttaagtggatgcttatcatcattaattagtgcgttttaggaaccttagattcatcgaaacgaaaccttggctattcgcacccttcatgcatctaccctatatactagatctttaataacaattttttctttttttgtttttcatgagttgaaatacgtgtttcaatctacaagttaccacattcaattattttaatgctatttacctaacaaatttaataatatagtagaaaaatggagcaattggaagattatttgaaagaattaatgctgatcatcagatttttcaaatacaaaaggactaaaaaatctatgagtctagaattgagagtactgggtatctatttgatatatataaatatatatgttttatatattgcaaaacactacaaaaaatcttacttnnnnnnnnnnnnnaacttgtgactaaaagtgaaaaaat

SEQ ID NO: 122843 - DNA, 1641 bp, Cannabis sativa
gtttatactttggtgtccagtgaaccataataaataattagggagtagccacaaaatcctaattatatctaaaattatataattggggagaagtttggggaagatttctcattcccaagaattctttctttattttgctggttgtgcttaactgtctacaaacaaaggataggttattatgattcagcattgttattgatggtaattgtttgatttgtgaccaagaggataagagttctctccacttatttttttgattgtcattttagtaggaaatgtcttaaagctattacatattggcaatgttgacctatgtattttcttgatggacctatttttacacatgtggaactaaaaataaagattaattttaagaagttatcttgttagcaagttgtttgacacaatattgaattgaaataccatttttattcattaatgtgtcttaaatatgtgtttttgttgtgcatcatacatttttttttattctaaaagcttacaaaattaaaattgttcttctaaaactcattcgatggctacccctacctaacatgtcgggtaagggccatcactgaagagtgacggatacttagcacttttctaaactaactcttataagtgagttgtataggactgctacttaagagtagcgttctcacaaattggtcattgatagtactttctgagatgttcccattccattatcttggtaggagaactaactccatgttctcactataccgccaagcttgtatgcacctttgcctgttatctctgtaacttggtacgggccttcccaatttgacccaaacaacccttctacaggatcttcggtgttcaagaacactcttcaaagaactaagtcccctgcaaagaatttcctttccttgacttatttgttgaagtacctggcaaccttttactggtaggcatccagcttgaggttgtcttggtctcttctttattctatttcgtcaagggattctaccaacagagtgttatttacctcttggtcataggttatcctcctatgggatggtggttctagttctacaggcaacattacttcatagccataggctactgcaaatggtgttttccccgtggctgtcttcttggtggtcttgtgtgactacaatacatctgggagtaattcgggccaatcaacttttgcctcttcgagatgccttttcatagtttccttgagggtcttgttcacaacttccacttgcccatttatttgaggatctttggcacttgtcacctttcttaacataatccattgaatctccgatcatggtaggccaaaagtacccttgtttgagtatctttttgtacagggtttgcccctggcatgattaccacataagccttcacgcactttcactaatagcctcttaacttctatcttggtgacgcatcttagaagtggcattgagaagcaacatctgtacattaccccatcaaggattaaatatcgagcatctttccttctcattttcttgcatcattttcgttttcgggcaatgtaataccctaggattaagaaatggattagcaaaaccctaattagataattatgaattattaaggaattatattattatataatttaatatatgagaataaatatgatttatg

SEQ ID NO: 122844 - DNA, 1751 bp, Cannabis sativa
agagagagagagagagagggtttacagttacaggagtggtaggggtttgatgatgattaggattattttgctgggcttctttcgatttctccataataatctctacactttatattatttatttgaacactatatatgtttaaactttaaataagagctatagcctatatatatttatagagaccaaaatcaagagattatccctcttaattggtcttaattaatttattaattaacatgttagttggagtggttgttgtttaccttttccaagtaaataatcgactgcttattatttttttttatatatataaatataataataagcttagacttttatgttttgtagattcttgttaaggtcaactattgttaattatataatcaatttattgttgagaattaaataatacattggtttgattattcaataaggaggaagttcttccaattaaaaaatcttatttttttatctgtagtgtatattatactaattctattgcggtattaccattttgtattatatgtagtagatatatacccggaaaaacagataacaaggatccaataatccaaaaaccaactccaatcagagacaccttcagaaaaagaatagactgaatggacaacaacttcaacaacactctctggctacaaagaaaacaaaaaaaaaaaaaaaaaatccagcaatgaacaactctcaataggaggaaaatcttagcaacataaatgtgagaattttgtagttgtgaagattgactcccttgaagaaagaaaatattttaattgcaaataaacaaaaaatatattagtaataaaaaaaataaataaacattataacaaaaaaaatatcataaacttaccgtaatatcttttttaagtaattgtgaataattatatgtttaggatttaataaaccttatatattaaacctataataatgtataaaacatgtgaacaaagcatatgacaagttcaagttatgatttatgatctttattaaaaataaataagattacaatgaaaatcctaacactaaagatagatatcaaatcattcaagcatctcaaaaaatacctaaatccaaataaatcaagtattgggtacttaggttttcatttatgtcaacctggccccaaaaagtcaagttgttcttgcagtcacttttctacagcgcacaccatatcaaaatgatcataactctctcaatttgtatctaaataaaacgattccaatagcaaattaaagttatttttgttaggttttgtgccctaactaaaattttatttcaatgtaatcttgaatttcatcatcaataaaagaacataaattatttattacttgtttagtgtaatcttgattcacatgtttatttcatgataatatatttgatatataatttctattaactctttatcacattgttattcatgattattgtgttgtctatacaacgaaaaataatcaagatcgtgtgattaaactaattagttctataatttattagtatactagatttacactgatatgataatcaaaaatttggtttacttacacttgtccagtagaatgtccttttcaagacattagcaaagtaagtttgtattggatgtatggttatacatcggactaggccgatattcatagtggaaaaaatatcataaacttaccgtaatattttttctaagtaaatatcacttagttgatcttagatcaatgatctcaactctgagatgattaggttctagttt

SEQ ID NO: 122845 - DNA, 2615 bp, Cannabis sativa
atagaaaattaaatttgagttgataattaatattttaattaattttagaccaactttaattaagtaattttattcatatttatttaaaattaatagtaaggattttatttatttttggatatgcctaagtatataattttatgaatattaaattaaaatttatatttactttacgaaaattagtaattttaattagataaatatattaatattaaaataaatatgaaaatgaaaatacaatatattttaaaataatgagctttagttttaagatattcgatctctattattggttctacatggttcttgttttaatgagattcactcctaatagatgtttattcattaccaaattaacattgcagaatttcaaaagataagtattattgtaaatcttttattcttagtaacgatcaccccattagtgactgctcaaaatagggtttccaaaatataagacaatggtaaaagctcatgaaataagaatgaccttgactctcgcccaaacaggacaacgccagattcttattttgatcaaataaaaagttgctaaaatggtgtccattttagatgagctaacaactctattcaactgatgatgtatttgactctcgcctaaacgggacacatataacatctagtaaaaaaccttagaaatatttgagatgtgtttattttgtattttcacatgtcttcattactttttaaatatttactaatttttgaaaattatatatgaatttatattgaacctgtattattttctgctattgattatgtagaataaattttgaatcttcattgttggtctaacttgatttgttgtttttaatggaaaaatccccaatagattgtcatcgattggacaacataatagtgtttgatctcgtaaataagtattctgtaaatgcaacatctagttgactcatccctaaaagatgacaacttagactagtgtttataatatgaaactgttgacatcgcttctagccaacgatagtgcgtcaaaataaagtgattgaacaagataaataaaagaaagcaaaaatcgtaaagtaaaaataacagcagattttaaagaggtttgacgccgtgagaatggtaatagcctactccccttatatttgtatcgacttgagagaagaaataaagtattcttcctctctaaagctcttacaatggatctctgagttattttctcccctagatcactattctctcttgaatgtgtttctagattaatatttcatcccactcaatagtgagattatgccactatttaaaggggcttcatacatgaagaatggtttcccttaatctataatgaataaaataggaaactacattaattctataattacaatgtaaagaatacaaaactaaggcgtactgcctttattttgtgattcaatcccacaattatagggattgtatttacgtctttgagatgacaagactaatctctggaattgtcaacttatattccctactcgacacctgtatcttggtcggacgtcttcttgactatcctgttcagacatccgagggatacagatgttaagattaatgggaatacttccctccacccaggtagcgaaaatgcgagacacgtgtcattcattctcattgccacatcaaggtgtaaaaaacaggataatatttgcctcccaagtctgtgcgagaccttcttggtcgcacgaggacttcacttagcctagagtcttatccgaatgggtgatgcgtgtattcaatgatggatgctgatccgatgtgactctgactaggggtttctttgatatcagaccatttaatgcctattgatagctatacctcgaatcacgatttgatatctgagcacgctagacgagtgtactccctgcaatgagtactaacgtctacttttgggggggaactcgatcattcaattttggaaatctttaatttcctattcagatcacttataaataggactaggatcctttggtgatctttttagccatttcaactcttaaaatactagagcaaaaattcccacacaaattttctcttaaattcttcgaaagattcataggaaaattcttgacgatatcatccaagcagagcaagaaagcttcgaattggtgagtaagttcttaattcaattctcttatatacttgcaatgaaatgcatgcattatttcttgattctttgctgtgaactttacctgttcttgaactgttctaggttaattgtagaacaactagatttagggcttcgaaatttgattgatttttaaccataacgcctacttatttgactgcgctttgattttaaccttaaatcattcattccttcccatcgataaggttctgacaaaaaactaggttccaattgaggttttgaacttctgggactagaaattatatttttgggtgaactttttccttttgattctcaattaggcctggccggcatatacaatctgtttttcatttgttactccgaccaactcttattctcttgtcacccatcttttgtagatgaatcctagtgatttttggggaggcaagcatcatatcgaccaggacttgcttcaactcctatacgaagatcatgttgggattttatgccctaa

SEQ ID NO: 122846 - DNA, 956 bp, Cannabis sativa
atataaacacacaatatatattaatacaatattaaagtgccgtttgataacacttaacgaaaatttaataaattattaaacatgcattcttgtattttttttcataactaattttaagaaagcattatttaatacatgaacataatataaatagttagaaattctcaaatatgggaaaaaaatatttataggctataagctcctctaaaaagaggagagatactgatgatgattacatatataaatataattattatatgaattatgtaaaatatggtatggaattctttattgggaattcctttaccaactataaaatctttcatgattgaccctaataaagggtctttttatacactagaaaaaatattaggcctattatcaacttgtaacttaactgttagaacttgaagattcagcctttgtgcttgaacaacaataataaatctcaagagactgacatgtctgcctccacatcttctgatccagagagatcattttcttcaatcttgctgtctgaatcgtcgttctgtaatggcgaaggctcggggctcttctggggttctgttccaactcttcttctgtgctctgtagaatttatgagacatgaaatcttattaagattgttgacatgatttctttttctttttcatgtgttgaataaggaaagattacttttgtgagtgatagcatgccgagtcatggctagaaattcttcccatttgaattgactcagctcctttttctccacctctgaaagctcgaaatttggctcccttccacacatgaaagcagccctgaacataagtaggagccattagtttttaagtatgacaacatagctgcaaaagattctcattttgccaaaagagctaagcatgtagaggaattgaattctactgaaacatgggaaatgatgcaacttgcttttcaaaaaggctaattagaatcccacc

SEQ ID NO: 122847 - DNA, 1398 bp, Cannabis sativa
gaagaagaagaagaagaaagtgtttatgtgttttcttttaatttttcctaattttgaataaaataaattaattttttctaatcagcacacactacttaatatagtcttactaaaagacaaaagagataaaaggcaaaaagatcattttgtccttgcctaagccaaaaggtaacattaccacctaagggtattttggtcattcaaaaacttgtaatatttccgacattcccaatgtctaactaagtcaccctgctaatactaaaatactaaaatgtgattctattggccaaacgctgcattcctatattgccggacatagaacatgaaaaatatagaatttcatacatagcataaataacacacctagaattcaaataaatcaccataaattcataaattataattaataatccaatttaatatttaagtcctaattatctgctaatttccatattaaacctaagcggtctttacacagacagtcgttctggatagatgagttggcatgagaaagagcaagaactcttgaggtagtggtggtgctccatgtaaggggtgtggtccaacacattggatggaagtatacactagttggtggagagtggatgaatggaagatcatttaaggggaggcaagatggtcatttgtttgaagagatgattgttgtgtgtgcaaccaaagtcccacattggctagaaatgagaaatatcatgggtatataataatggacaatatcttcgttggtatgaggtcttttgggaaagtacccaagaacaaatatgtgaggatcatatcaaagtggagatacatggtgttcgaagattcctaacagttgatattgttcgataaaattgatactcaagtatacgtaatcgaatcaagtaatataatgataaatagagtatcgttcccacgagaactgattatcaattaccaatcaattaattttttagttttatttgattaataaaaattattggagaaaagttaaataaaacaagacaatgattattaagatccccaactatctatattactttctaatgcaattacatattttttcttcttcctattcaattgacaagttgaattaagtatattataatctggttaagacttataaacctaatctatgtgaaaacttcttatatttctatagtaaagtttaatcacaaagaaagcattaagcaaaataacttataaaatcatacaagtaattaagataatttcgtcctaaattactttacatccataaaaatcatatcatattcaatctcaccttctaaaattttgatttaaattcatagataacaattatagtgtccaataaataattataaaattaaaatagattgtatggaattgaattcaaaaaagaagaagaaattgaacaatcac

SEQ ID NO: 122848 - DNA, 823 bp, Cannabis sativa
  modified_base (48)..(58): a, c, t, g, unknown or other
  modified_base (797)..(797): a, c, t, g, unknown or other
tagaaagttcatatttagggtgtgaaacaacatacttgtgagtagatnnnnnnnnnnngtaaaataaattccaacaaatatttccaacaaaagcgtgcaccgataaaagcatgagaaaaagaccaaaggaaaagtacttagttgggtggtctccttcagtatttcacccataagcagctccacgaacatgtcctcccctccgaccagttgatctttcattacagaaagcacccgatcctggtagaattggagcatctccttacccttctagtctcagggttcaacacgtcaagagtagctaagcatttgggcaacccaagcccatccgcacttccacccttggtgcctttagatgaagctactgttgcctgagacttctagttcttcttatccaaaggatttacatccaaccctgcctcctcgggaatctcagttggaggcacagatggactcttctcaacggtcaactgaggagacttttcttgggcagaacatcgtccacctttgaccgttttgctcgggactattttcttggacagaacattgtccacctttgaccgttttgctggagacttttagccggaagcatcatcccacctcttctttagcgcgtgaagcatcctctaagacataactacacataagtaaaataagagggtcagttaagtatgatctaaataaatgcaaataagtttacaaacaagataaagtacccttcatgtgggtaggagcaacctcttgaacaagaaaagagggaacatcctcgtctgaagaatctgttggattttatgccctanataaaactctttacaatctgattagt

SEQ ID NO: 122849 - DNA, 809 bp, Cannabis sativa
  modified_base (761)..(772): a, c, t, g, unknown or other
tagttgcaacatgaattttgtaaaattttgtaaaccataacctcatatatatatatatattcacattttaatttaaatttaactactatatttaggaaaacaaaattgttattaatttatctatgaaacatatttgtagaacagttaatagtttgttctaattgggcaattgtattgtaatattgtagtcttaaatgcaacatatttaaactaagattgattaaaatcttttatcttatttaaaaaaataattcaatgaatagtgctaaggaaactctctgttacacttttttttgcactttttctttatctttactacaattgtcaattattaaacaatgtcaattttttttttattatttagttataatattattatttttaaatcaattaaacataacattaaatgagtggaactcatcttaaaagtcaatttcaatattctacaattcactacattttagtggccataaaccccccctccccccttattttcacaaaattaatggtacccattttatttttaaatccctagatagggtatttttttaaatctccacaatagaagagtcctaactatacatataaatgtgagatatgagacggtgacatgatattttaaaatctctctaaataacactattagctaaaaataacatatctatctatctatatctatatatatatataaatctaaagtatgaggcagtgacagactctgttattgtcagtacagactaggggtgtacatcaaaccgctnnnnnnnnnnnnaccgcaaaaaaaatgcagtttgaaattcttcgcggtg

SEQ ID NO: 122850 - DNA, 2841 bp, Cannabis sativa
  modified_base (1673)..(1675): a, c, t, g, unknown or other
  modified_base (2410)..(2410): a, c, t, g, unknown or other
aattgttgagcccatgggttcccaagcccatggcaattccaggatataacactcatgatgatgggtgggcctgcacaccaaggcccacctgtgattagttttttaacccaacaacactaacaaccccactaaccattttaaccgaaatcccctcctcaccaatagcaatcccagcccgcccagtacgcctccttttactttccaacaacataaccaaatcctcctcattactagtatcttcatcagatgccattaattgagaatccccctcactaccaggttgtcgagtacccctttcactttccataataacctccttcattttattctttcctaaactcatgggatcatgatcaccaacatggtcaacacaatcaacatccatgatttttgggagagcattaactccattaccgacaccattcgaacgcccactgccacgaccagcagctgctccgccaccatcattcccagtctgaagccactgtgcaccaactaaataatttttctttttcgaatacgcacgtaaagcagcaccatacggtttggccaattgttctataggttggtcaaaatgtattggacaaaatcgctccgaatgcccaattattccacaaacaaagcaaaaggtaagaagaggttcatatttaaaattagcccaagtccaatctccattctccttacagagtttcatcctcctctttaatggtttttcaatatctactgtagtacgaacacacaaatattctcgccaaatgccattaaaattcttgggatcagattttacaaacgtaccaatatagccacccgcactctgaacccctttttccaacagaaaaccggatttcagatcatgaatctgaacccagaaatcaatcttgtgtaggggcacaaccttaggatcttctccctttctcagtcgatggaagacaagaggacatctattgaacgtccaagggctcccgtctataacagtttggatatccaactcatggaaaaactgaaaaagatatttattcgtacccaactctttgatgaaaacacccttacccggctgccaaagtgaagccatcaaatgccgcattgcatcaaaatccaccgccctacccgcaagaaatttccccaccaaacaccaccgatgatcaaataacgtctcttcagcctcatcatccccaccaattaagattccttcttcctcatcttccaggcttatctgaggatactgctcatttaaatcaaaagtatcgtgactactagaaaccatgaagaataaaagacaacaaaacaaccttaaaaactggagagaacttttaccaacatgtcatacgacaagacctctgtctgtactagtatagatattaaatataagaaaaatagacattttgaagaggcatatgcccctttttaaaactatttttaaatttattttaactaaaaaaattaatattctacaccataccattagatcactgttgaatagttgtaattaatttagaaattaaaagaaaaatgaataataaatatcttgtaacttgatactttatttccttataaaaatttaattatatttaaaattaaagtactaataattattaattaattttatgtaatttgttaataagtaaagatcttttagcaattatttttttaacttaaataattaaaataattgnnncaaaactccttataatttaaaattataaaaggtattacacacataactttaataaataataaatagtatgaatgacctctaattagaggtaattttacgctcaatcttattctttaacacctttacgtgccaatttagtgtgtcagtctaagattagttcaagttatttagttttttttttcttttacgaaatgaaaaattaagtaaaaaaatgtaataacaactataaaattaatgattattaactatttttgctcctcgttgaaatcatcttcatcaatcgaaatattgtaaaaaaataatcaaagtagattaccaattaattaaaattgttacttctttttcacaaataagcataacagtagaaaaatagcaagcaaattattaaaaatcaaggagaaatctaattgtagttggttgaatagagaaatgggtttgtgacagagatgtaggagattgtatcgaagtggaaaattcacataatgttatgttggaacaaattgaaatcctagttttaattttttttataaaggaggaagatcggtcatgcggttgttgcaaaataataattagatgtaatttttaaaaattaattaagtattaaaaatattattttaggaggggtggaagtctaaattttgtaaaaaaattgaactttattgtaaatattatagttaaatagtttaaatgttaaaaatattataagagggacttaaatataaaaataaaattatntataaatattaattgctaaaataggtcttgttaaatatttaaattaaaattaattattttaagaaaattattaattatgattaatttaattctaaaaaaagaatttttatctattagtaacctgctattacaggtaaaaaaaataatatagccatcatggttacaataaaaatgtaagcattaagtagtcatccatgtgtaatatactaatatgtttgatgatacttcaaaacttatagggataatattaattacataggacatcagtttttgtaaaaaaattatatttttatgtttaaagaattttttttttacatttttatggttttctgtacaaactacataaaagtaacataaaaataacatcaaaacaacaacaaaaaatagcatacagataacaaaaaataaataacaaattaacaagagtataa

SEQ ID NO: 122851 - DNA, 2997 bp, Cannabis sativa
ctcgtaaaattactaactgtccttttgagtgtatttttcctccctgtggatacgacatatagcccgtttactaccgcgaccgcagtgtaactaattgggcgacatcacgtccttaatccttagggcattacaattaaagtattgagaatctttaatatggaactactaagttcaatttactatacactatacttctagtgtgtgtgattttgatttggatcacatatgtagatggacatgtagtaaaggtattgtgtataattagattatgcatagctagacatccaacttgttgtttactatgaaaaaagtttatcatatcaaaatgatgatcattagtagatcagcctcaatcatgagtatatatgaactcctgtttatgttcattgagttctttgattcactcgttaaagtttctcaaagaagatgattcttacaacttctattttgggagcttaataacacaagtggctacaaacatgttatacaatagtggaatccaaactttcctaacagattgaatatttgttctctaatagtgttaagtctgggagtgctaacagttatatctaaatttataataagttataaaatagttcttcgcattaaattaaaggtacataagctagagataattagaagggtaaaacgttatttcgaccaactctaattatgaactaaaaattagaggaaaatctaattatattgattatatcaatggaatataagtaagaattctgtaaatataattgtatattgtcaaagaatgcaattctatatttatagtggagtaataatagaaccaataaactagattaatcttgggaaatttttatatatatacgtaatatatattctaataacgtaaataatttcgtccaattaaatagaattatataatgtgacacgtaagcaatatatatcgtaatataaaaaaaattacttatcgtaatcaaaaataaaaatcagccacttcacattaggaacatactatcttctccattaattacaacatcaagactttgaattagtgcatgaaacacaaaccaaaataaaaacttataaatttacttcttgtaaaataataaatcacaaatcgaaaactattttccaccaaaaaaaattcattaatgattaaaaaaaaacttcatccacaaacaacataaaatcgatcatgagttcgtaactaaaatcgtacctcaaactccaacaatacctaacaaattagagacgaaattgtagctaaataaaagaacaattcagtcaacacttcaaaaaaatcgatccaaaatttcatcggaaaaactccattaaaaccgataaaagcttcaatcgtaaattagaaattacaacttcgaccacgaagtgacaaattaaccaaatagtcgacacataaaggtgatcaaaaatatgaaacaaaatgcaactttacatttctcattgtgatagattattacaaaatcttcattatcatcatcaatgcttcatctctgtcgtttttcttattacttcaaataataacccacaactaaaagcttaaaacatgaacctaccatcctatagcctaccaatcactaccataataaacagacaaaaatgaactataatatttgtatttacataacaatagcctttttatatagcctatcatcatatatactaataaacctattagtttatttcagcatatttaaaaaaaattattttgatttttttatagagttgtctatagtaaatattttagataaccatttcatttagcctaccattagtttatttttgttttttttaaatatcatccttaaacaatgcataatcatcctcgacatgttttctcttatatcttataaactttatatcattcctggaataattcaggttgacttgttatataactcattaatatcaaaacttagagtattatctttcaatacctaaaatattaaaatttaaaaccacaataaatacaataaatcagtaaaccaataatagtggtttacaaataaaatgttcatagaaaaaaaaatatattgaaaattgatcagtaaataataaaatatatagcttacaagtaaaaataaagtgtaatatgtgtagtttgaatatgtcatctaatccaacactttcaactctatctttattttccacaccaacaacttcaacatcatttaaatcatcttcctactaaaaataaaaacattgacatgtaaaatatatatatatatatataaataccctaatcatatgaaaaatacatatataatagccctataatatataaacttattttttaaaaataaaaaataaaaaatcctaaagtatacactatcaaaataatatccgatcaaataaaattcataatatatatacacaaaagattttataaaaatcacaacttataaattagcatgaatattaatggcaaacaaaagtatattaatcaccaaatatataatcaataaacttaatcagatgcaaaaaattatagtatacagtatacaatcctataatattaaaaaaaaacctaaagaatacaatatcaaaaacacattcgaacaaatatcaataaaatcctaaaaaaacgaagaaaaaaaatccttaaattatacaatatcaaaatcacacgaggaatgctaactacaacatcttagtcaacctctgcgcccaaaataacatccctaattatttttttaattttttcatagcggtatttgttatagttacaatatcattcgtgaatttttttgaaaaattccaaatagtttatagtaccaaaaataaaatttatgatatttctgtttaccaaaaataacctggattataatcaggcgcccatacactcaaccataatcctaatcctgtgtccagcatggtgctgagtcaagaacgattgtaatacagtactacggaccataatatcagcctatactgggtgcgctagtcgtactctagttgtaccgatgtgatactatcaagtagtacagtactatcgaccat

SEQ ID NO: 122852 - DNA, 563 bp, Cannabis sativa
ataaattaaagaactagtagaaccaatattggaaaagactatcaaattataaatgaacaagaatgtcctaatttattcaaaaaagaattcaaaaccaaaactcatgtaggtgatgatattgtataacccacaggtcccaggatcgaaacatggctctgataccccttattagaaatctttatcactcatttataaatatgtaaaatcaatattcaactccataggtaacatattacataattataagtgtgaaaaatacaaatctaaagaatacctttgttgattcaaagagaagaaaccaaatagcggaagtgtaccttaatccatagatagtgatgatcttaatgcatcttatagagatgatctttgtggtgattttgggtaatgatcttccaagaaaacaagacttagagttttctaattttttctcttgatggtggaagatcagaatagaaatcggctattgtctcttggggaccaccaccaatttataacctcctagctaggttattaattttaagtatttctaatttagcccctcaataaattaaaaatatcgctta

SEQ ID NO: 122853 - DNA, 1041 bp, Cannabis sativa
aaacaagaattatcctctcctcgctctcgctcaattaatatccaaaaaaaaaaaattaaatactattttaatctggatattacattggatcattgttactttaccccctcaccaacatgctattggttgcaaatgggcatataaaatcaagtataatgcagatgggagcattgaaagacacaaagccaaacttatggctaaagggtacaaccaaaaagagggagttgattactcaaaaacctttgctacagtcactaaacttatttctgttaaacttatccttgctttggcagctatcaaaggttggttccttcactaacttgatgtcaataatgcttttttacatggggacttacatgaggaagtgtatataactatacctcaagggtatagtcctaagggggagcttcctcctaatgttgtgtgcaagcttcaaaagtccttatatggactcaaataagcttcaagacactggtttgagaagttttccacaacaatcattgaagaaggcttccaacattctacctcagattactccttattcattagacaacgggaaacgagtattgtaattttacttatgtggatggtgtcatatacttgctgggaatgatttgaaagccatgaatggattaaaggttagcctcaacatcaagtttaaactaaaagaccttggtaagctgaaatatttccttggaattgagattgctagaactgaacaaggaatttttctctcacaaagggcttatgctctacaatttcttaaggattttggctacttgggaagtaagcctgtaaatactcccatggaaactaacctgaaactaagccaagaaggtgaagaaaaattggatgacccaaaattgtataggagggtgattggaaagctccaatatttgacaataacaagacctgatttggcatattcaatcaataaatgtaacgccccgatttcccgagacgtcacactagctagtccgtttaaaaccatttaagataaagacaataaaagacttctttaatgaaaaataactaagcatg

SEQ ID NO: 122854 - DNA, 1607 bp, Cannabis sativa
  modified_base (26)..(41): a, c, t, g, unknown or other
aaaccaaaccgtaaatttaaaaaaannnnnnnnnnnnnnnnaaatagtatataaggtaattccccttttcatttattaaagtagtaacatgtattgtataataatatattaaactgatgtataatgtattatattttgatatagtgaaataggtatttagtattttttcttctaaatcaacactaaaatttatatttagtattcaccttatatacatataaatattaatgtacatattgttataaaaaaaaaaaaaaaaaaattgtacgtacatataaatgtacaaaattaaatttaagtacatcaaatttaacacatataatattattaaaatatgatatgtaacataatttaataaaataatatacaataaaatataatctaatatgtctactaaataaacacttaaataattatatagcctattattgttataagtccacaatatagtttatacgtgcaaaacacgtgcttaatttaacttctatatatacatacacacataaacctgaaaatgtaataatgtagaaacactacaaaatttttaaaatcaaacaaaaataattaatttataacactcagatttaaccaaactaaacatgagctcatgactgaccctgagattagttaggttttaggaaaaaaaaaaaatattaagccttttatttaaaaaagtgtaatattatttttaaaaatcgtgaaatatatattataaaaaaatatatttttgttagactcggtgagctctaagcctaagtttagactatgtctaatgcaagatttaaaatttgtgctaaatttagttcaaaagaataaatttgtattatatttaactattacatgatccaatgcacaatatgtaaaataagtttaaataaataattaattataataacagatatttaatattttaaaaaaatatacaaaaataattatttttatttatttaaataataattatatgataaataaagaatgttaaatttaataaaaatcaattaattataataattagtaacattataataaataaaataataatattaattataaattaaatttgacataatattatattttatactaaatttaatataagctttttaaaatatcattgagatagtaatttttgttaaactctttgagaaaaaataataattaataatagtaaataatgattggtaggctttttgaaaatcacgtgcagctgctacaaaattagagaattattgctactttcacaagagtatggctaggctaggctagctatagctatctcaattttgaatccgatttggataaaatatgatttagtggcttaaacaaaaatagataataatgtattgcatgacgtcactttcattactatctcattttatttcgcatctaatgactaaacttttaaacaaagatactaatttcgaacctattaatgccaatgtctctctgttgatcttgatcacacacactcactattatgttcactatgatcacacactcacataaaaatccagttagagaaaatggaagcttttcagtttataaactgaattgtattaatatgaatatagggacaggatttggtcccgttatgccaaaatagggaa

SEQ ID NO: 122855 - DNA, 870 bp, Cannabis sativa
  modified_base (706)..(708): a, c, t, g, unknown or other
aaaagaggtatgtttcaattaaatataaaattagaggtaaatttaattaattaattaataaaagcggtatttttcaacttacctctttattttgtacttcaaattgaaaatcgaacatatcttaattacatagtttgtactttaataatatgatttgagggtgtgttttattttattgtattataatgtagtaaacatcttacatatttactaccatgacaaatatgattaataaaattttattaatataatcaaactgattttaattatatgagttttaaatttaattttaattttttaattacatataaatgagagtagtttagtaaaatttataaattaaaattgaggatcacctaccaaatatgtaccgtatgcttgggttaagggttaagctctcgccatgaccctcattaattgtgagggattatacttggcccttaaatgctgacctgctgtggcaggtcatcattctctatgaaaactctcatgagatataataccgatgacttaattaaaattggaagaatatatggctcttaactaacacgtgattcttggaatattcaaagcaccaaattgaagaaaggatctgatcatttattaaaaatacaaagtaaacatttatttttaaaatttatatatatggaacacttctcaatagtattatctattgatggttagtaaataaatttaactataaatnnnaattttaaaaatattaaattattatattttgtttcaataacgaataataaaataaaaatttaaatttctatcattaatttagctacttaatttaaaaaaaaatatcaaaaaatatctttttttacactatatcaaaaatatgtttatatacaaaatacttaa

SEQ ID NO: 122856 - DNA, 1993 bp, Cannabis sativa
  modified_base (1926)..(1957): a, c, t, g, unknown or other
aatattactcctcagataacctctccgaactagttcttccttgcttttctcttccttcttaactaagttgccaacttttttagcaaggatgggaatattctcattcgataaaaatcgtgtaggcaggcaatggaactgcacccaaaacgatgccacttcaaactcaccactgtgaacctccccctcaaccggccaaggtttaatgttaaggaggacaccattgatgatccaaggccttctttccatgacaaaatggtaatcatcttcctcatcaaaaagaacccaagaacatcttccccacacttcttcattctccaaaagcgcagcctgcgccacactcctccaaggattttcttcaccactgaggctggcatgttcttacagcccactaccttaccaacacacgccttgctagccaccacatcttctagtgtaatatcctcaaaaagctccagcatttccatctcaagattactatctcgtttcataatctcttccttctccatgtctacagaaactacttgaatctctttgcccttttccccatcacaaaagaccacaacaatgaagatgaaaactttaagcacaagactcacacaggaaatgaaacaagcaaacaaaagactcggagagactaaaaacttgggaatagaattagaatccacaaaagagacttgtcaccttagcattcacgctcttacaatagtaagcagactcgacattggagccaatattactcggtttgaagttgataaatttaattgcgcacaaatgattttggagatgacaagaagatgatgaaggaagttcatattaaggcacacagtcccatattattgagtttaggagatgaagtactcaaggaagtgtcaagtgaagacactgcagtggggctatgggaaaggttggcttcaatttacctgaagaagtcattggccaacaagctttacccaaagaagaaactgtacacaatgagaatggatgagacaaaggatctaaggaagcatcttgatgaattcaatcgaataatcttggacaaaggatcaaggaatcttactgcttaatacattaccaaagagtggcgcactttgtgaacaccataatttatgggaatgaatcattgaccatgacagaggtgaaatccgcctaactccaaagaaattcagaaaagaagtaaagatagatcaaatggctatggtgatgggttgtttgttagaggcaaacaagaaacaagggaaaatagagggggttttcacaaatcgaatcacaaaagcaaatagtacaaaggctctaatcaatcacacaaagcaaggtccaattccaaggcagggaaattagtgctactattgcaagaaagagggtcatttcaaagatgaatgcaggacattaaagggtaaactacaaagagacaaaaacaaagaaagaggagatgctggtgttgtgatagatggctatgaatcagttgatgttttggttgtgtctagccaagaatcaagtgactcatggatacttgattcagcgtgttcattgcacatgacaccaggaagggaactatttgacagcttcaagaaattaaatggttgatcagttctattgggtgacaacaaagcctgcaaagttgtaggaattggaacagtgaggctcaagctgcatgatgaccaggtcaaaacaattcaagatgttaggtatgtattagatttaaagagacattcactttccaatggtgaattgattgaaaaaggtcacactataaagatagatagttcttttaaggtcatgagaggatgattatttgtcatgaaggggaacttaagaatggcatctattatctaaaatgaaaaaccatcacttgtgaaaatgacatggttgttagaggtcctgacatggaaagcactaggctctggctgttgggttttgtgccctaannnnnnnnnnnnnnnnnnnnnnnnnnnnnnnnaattaataaagatcagaaactgcattttatgttgca

SEQ ID NO: 122857 - DNA, 888 bp, Cannabis sativa
ctgtatagcatagacctatgttttacgttcacacgtctttttaatttatttaaggccttaatatgttttatcgcagttatagttactgagtctaaccttgttatgccttactcgcataactctattcaattatccacttaacatattattgcatattcatcatagtacgtacttagggtaataactccaattcacggttctataataacaatcaaataacatataactatgccatcacactatactctacgtgcttagtttgttgtcttacctgattttcaatgtatgtaaaagaatcccaaatcacaggtgattttgaccaagcgctactattcctagtcacaattcttgagtttcacaaactaggattaatccccaaaataacattatcaataattcacaattaattctccaactctagaccaaataacagagcttgaaacgagctttctaacgatatatagaacatctaaattagagtttggagtcaaaagttatgctcaaaacaaaataacaaaaattgaactgtcgctgccatcccttcgcgaccaattatcgtcgcaactagattgggctcgccacgaccagatagggccaggggctaaccccttttttgggtttgagcctcgtcgtggtgaccttatatgtaacgccctaatgctaaggcacgctatagtaatttttcaattacagtgctatctttgctaatcaaagaactttctcaaaaatcgtgtcaaattaaaacttttatattaaatatgaaactttataaactttacataattaattacaaaaatcgggatcccatttctaaacctttttgcaaaatattccaaaatacatatgtcaggttgcacaacgactacaaaatggaaaccccagatgtcc

SEQ ID NO: 122858 - DNA, 9185 bp, Cannabis sativa
atttttaacaaaattaagattattagagctttatctcgcatggttactttcaacaatatgtaaagcgacaaggcaatggacaaaaccatccaaataggcaaccaaatattacaacctcctcctgtagaaggagaaaggagaggatatcttggtcgtcatctcaggagggccacatctcgctagagaaagtagtaatgccataaagagatatgtcaaggaaattaagaatgagcggtcagctttcgctctaaaactgtcaaagtaagctaggactgagaaacctccaattgtgttttcaaaggaagacacaaaacacgtgaggtacccacatgtcgacccactcgtgattataatctagctcgccaacaagagaataaaaggggtgttggtggataatgaaagttcagtaaatatcctctacaaggacacactgaagaaaatgggactgcaaaatgcgaagttaaaaccttgcatggtgaatttatgcggattcactggggacagtgtcgccagtcaaaaaattattgagctcccgttaactctgggcaagccacctatatccacaacattgatgcaagattttctagtcgttgacttaccattggcctataatatattgttggggggtcctacactaattggactaggggcagttagttcaattaaacacctatccttaaagtttcaaacactgacaagagtaggtgtagtgcaaggtgaccaactactggctcgggaatgctaccacatagagctgcaaaataaaatagccagccatcagttaatgtcaatcataacggagaaaggcgagaaataggataaggatctagatccttgacttcaagatgaaaagaacctgctaaaaccaattgaggaattagaagaagtttttttagatccagaaaatccgacaaagtgtgtattcattgggaaaaatctagatgaaaaactaaaatagcaactaataagttttctaaaggcaaactaggatcagtttgcctggagccattcagatttgacagggattgatcctaaagctatttgtcaacacttgaatagacccaaattacccagctaagagacaaaaaagacgacccttggattctgaaagataaggggcactcaaagatgaagtggataagttgttgactaacaactttatacgcaatgcattttacccctcgtggatatctaatcttgtccttgtcccaaaaccaaattgaacttggagaacttgtatcgactttttagatttaaacaaggcatgttcaaaagattgccttccactaccaaggatcgaccagttagtggatgtaactgctggacacgagcttatgatgttcatggacgcatattttgcatataaccagattaagatgcatgtccctgatcaacaacatacaagtttcgtaaccaacgtggagctttattgttgtaaagtcatgccttttggtttgaagaatgctggggcaacgtatcagcgactagtgaataaaatgtttgaaaaataaatagcaaggaacatggaggtctacgccaatgatatgttggtgaagtcgataaaaaatggagatcacacaaaagacctcgcggagtgctttgagatactgaaaaattacaatatgaaactcaacccaaagaagtgctcctttggagtttcctcaagaaaatttttgggattcatagtcaacgcgaggggcatcgaggcaaatcctgaaaaaattaagggattgatagaaatgttgtcaccaataaaaccaaaggaagtccaggccttaacaggaagaatggcagctcttaacaaattcatctcgaaatcaactaataagttcctaccattcttcaatgtgttgtgaggcaacaaaaagttcgaatggacaaacgagtgcaaggaagccttcacaaacataaagaaatatctttgaacccctttaattttggttaaaccaataactagagagactttacttatctacttggctatctcagagaatgcgattagtgcagcattagtgcgagaagaggggaagcaccagcaaccagtttactatgttagtaaaaggttactgggagaagaatcaagatatttgcctcttaaaaaaattgccctatgcctaattcatgcatctcaaaaattatggccttacttacaggcacatccgataaaggtgttaactaatcaaacactaagacaagttttgtcaaaattagatgcttgtgaaagattgataaaatggtctattgaactagggcagttggacataacttatcacctaaggacatccatcaagggccaagctttggaagatttcctgatagaagggataattctagatgaaaatccacttatccagcgagacacagacagttggaagttgtacgtggatagagcatctaatgaaaatggctcaagtgcaggagtgatacttatctcgccgaaaaaaatttaagtttcactatgccctaagattccaatttgacacttaaaacaacgaggctgagtatgaagccttaatagctggtttggtgcgttacagtgacttgcatttaattgtaaatcaagttctaagtaattgccaggaaaagggtttaaaaatggccaaatacttggagaaggttcggaagaacatgggaaagtttgattatttgaaaatcaaacaatttccaagaaaacaaaactctaatgtcgatgccttggcaaaactagcctcacaaaacgaacttgatgaattgaatttggtaccggtggaagtgttagacgaactgagtatatgtgaaaaggaagaagttgagatgattgacagctcttctacttggatgacacccatagtcaactatcttcttaatgggcaacttccagtagacaaaaacgaagcacaaaaactcttgtattcagtgcctcactacacgatagtagaaggcaaattatattaaagaggttattcaatgcctctcctacggtgtgttctccccatagaaggaagtgagataatcaaagagatccacgaaggcttttgtggagaccatgcaggttggaaaagcttgttcaagaaaataatttggcaaggatgttactggccaactataaataaagacatacatgaatttgtcaaaaaatgctataagtgtcaaatattttcacatataccttgcgtaccaccaacggaagtaagaatgatgacctcgctttacacatttgcgatatggggaattaatttcattggggcattgcccacagagcaaggaggagcgaagtacgcagtagtggcagtcgacttcttcacaaagtggatagaggctgaaactctagtttctataacctgcatgaaagttcttgactttatcgtctgtagatttggaatactcattcagatagtatctgatcatggaactcagtttgattgtgagttattcactgagttcggcgaaaggagcaaaattattaagagttttttgttagtatgaaggcctcaagaaaatgggcaagtagaagctgttaataaaaccttgaaggatattatcaaaaagaagttggacgcagtaaaaggtagatgtgtagatgaacttccacaagtactttgggctcacagaacaactgagaaaatagcaacagggcacactccattctcacttgcatttggctcggaggaaatattgccagtagaaattaatattgtgacccacaggcgagatttctataatcaagaagaaaaccaaaaactcttgaagttgtccttggatctacttgaagaaaattgtactgagtctcaaattaccaatgcagcataccaacaccgcatcacaagatatttcaataagaaagtgaagaaaaggctctttaacgttagtgacttggtgctaagacaagtatttgcaaacacaagagatgcaactgcaggagtgtttaatccaaactgggaaggtccttacgtaattgaggcaatagtaggaaccagggtttacaaattcgctcggcttaattgctcgctaataaagaaccactagaatgttaagcatttgcgaccctactaccagtaaactcacaaaaatgttgtaatctctccaattgatgtaatttttaaaattcaattattattaataaagttgtagtatttttcaagtaattacaaagtattattctttaaaattacttgaggggcatatatgtgtatgatcaactggaatttatctagaaatacataatatattgcaaacccactccatttcaaaaaatttttaaagttttcatctataaataatgtaaagtcaaaaattgaacctttttcaccagaaaggaaagtcaaaagtagcagttgtaaatgagatttaactcgtaaaagcaatactaagttacatgcgaagctgaatatctaacagctcgcattttatagggatgtattatgaatgagccaccaagatgccttgaaaagataatacttaacctaagatataaatagaaggcctaactattcataaaagcaatcaaaaatgtacaaagtaattcacaagatgaattatttatttcaagtatcttgaagtttgcataaagcagattataattgtttacacgaagtaaaactgataaactgctcgcgaatagaaagcatggtagacgataattgctcacgtacatagtagattattaactacttaagcaatatcaataggaaaacaagatctgtggaaatgcttacttaaagtattttaaatttgatcaaagtataattattaaagttgtgaataaaaatgcaaacaagcaaatatattaagtttaaatgtaaagatgcgagacaataaataaaaaataaaataaaagtaaagtaaagttggccatccaacaatgcaaatttgtctttacaaaaagtgccacaatgggcaaaccattgatattgctattgtaggagatttagaaagatcttcttgttccacctcaaccgcttcatcctcgccaagttcttctctccttgttttctcgcataggacaagcatggcattggctccttcacccaaaaaagttgaagtccatatcagggttggccgaccaggtttaatagatggttctcctagcgatgttgttgaccctgtctttggtttcagcctccatctctttgagttttttgtcatggtaaggcttgagggacttgagagaatccttaagctccttaatcttcttttgtttggccagacgctgcttttctacctcttcctttatgtgagaaaccttggcctcggagtcattccatttttttttgactaaagtgtctctatgctcgctgagatgacctacgatgagtagcaaaggagagaagggatgcctgcgagaaggaagaaaaacaaaattggtaaatatgataaaatgaggaaaagtgagaacaaggagaaagggaaattaacctgatgcaaaagttcgtaactccttttggcaagatcctcaaagttgcctcgagtgagaagctcccagtcgccagtcccaagagttatgaagttacgccaaccattggtagcatgtagcatgtagagttgcgagccttcagtcctagcttcaaggggtaggggacaggagggctcgaggagaaccatctctggacgagaaccgtagaacttcacttggtgcactagcccagtcgatttttcattggcattcgttgcagctggaacctccttctctagagacttggctagctcgatggtgagctagcctgatgatttcttcttgttggctgtggttttggtccttttgggctctttagaagaacacgaggcctcaccagcttgggcaactctcttcttagacttcttgtcgactgagggaactcttgaacatgttctccaaatccagctccatatctgcaaggtgagggaaatacattagcacttaagcaaaataaataagtgaaagtagagaacaaactcccacttgagaaagttaccgtaattttaagaagatcaaaagggaggactataatatccactaaaatccctagatcttgtgatcataaatgtcataagggtttagtggatctaaatcccacattgaatctatatgacctgatctatccaacatagtcccatacttgctccacaatcccatagtatgaacatatacaactaatctgaacgtccaattctgggtaccaactatcaaacctatgtgttatgcaatctatgagaaagggattccaagtgtaaaaaattgtatcgactatctcggaaagatactagggtgaaaagtttagccctaagcactgcgggtgaccacccacattgattacctcgtgatgctccttcttctcgaggggcggttctctagagatagtgtgttcgagcaacgtagtccatgctttcttcgtcgactgggactgggaccttttgccacaaagaatacttgggtactttgtagtcacaagtaaattcatctgaggcaagaaggccaacattccttagattaatttcattgcataagaagtctgccaatctcagccggaacgaaacattcaacaagattttgtgacgctcggctatctcaggagaaggaactggttttcgaggaaccgctatgaacaaataaaagtttaataagcgacctcaaaatacaaattgaaatatttcaaggttaagtttctaagaaagagaacttacttataatccaaaaggcagttttatttattggagagaggcatgtcgcctagaagaagtcttctttaaactctatcttgtttggcaacctaactataatcctgagatcgttcgtgtggatttcgagacagtaaaggctcctgcaacatgcttatttccaggaactgccttaactgagtaaaaaaagactatctccaaaggagtagggcgctcccatcctaaattattgtataggaccttcaagctcgcaaggatcctatatgagatggggttcagatagaagggggaaaccctgagatagttgcagaactccttaaagtaatccctaaggggaagaaccgccccagccttgatgtgctcgaggctccaagcacaaatgcccgaggaattgctcgtgtcaggtccactgcactcctcgcaaattagcctttctaaaggaaaacaactgaattccccaggtgccatagactttatgacacaaccttttctctacttgataccgtaggactttagaatgctgccaacataggccccagttgacctaaccttggattcgatgagttcagccttgaaggtgacactgggatcctgtggggtctttgacttacaaagcttaagagacataatgtcaaacccaaggtcacctggtgaaaaagcaacaatgagtttaggtaaaaataatggtctcacgagtggaataaaagataatattgtgggttcaggtcaggttgcatctcataaaaaatgacgtttgccttcagaaatctcttgtagaaattgcctaaaatgactggcaatttcttcctggttgacttaatcaaatggtctttaattttggcatcgtttatctctgatttggaccgaggttggaaatttcttggtttgaatgggaaggctaattgcctaggatattttgtttctagggactttggagaataaacttctgaactagattggggcatttctacaaaaaagaacaatcctaattcccggataaaatttattaaaccagaggcttaaagaatatgataaacctaaatttatatcatgcctaaaccctaaaaatcacctagaaaacttaaatcaaaatcagtaaaaccaaatggagtgacaagatgcaaaataaaagatcataacccagaaaaaaaaaagaacagagaagaatgggtcacttacagtttgaagtcgagtaatcgtgtgatgaaaagtcctacaactagagacggagtgaacgacgtgatgaactttttgaacacttgaggtcgaaaagcaaatccgaggaagtttgcagaaagtatgtcaaagacaaggagagcttgcaaagtttcatgaaatcgggatgagaatatttctcaaaaaagcttgagtttttgaaaagacaaaaatggtggaaaaatggattccttaccgttttatacttcaaacttagttaccgttggatcaaaatgtagaagatccaacagatcgaaatggaagagaaatggaaaagatggttcattaatgctaatgatgtgcctcaaaaccacaaaaccgccaaaatcaaaggcatgcatgtttcaaattagattatgacggaaatacccatggtaatcatgtttcaaattgacgaagtgaattggttattagaacacttagcgtaaaatatatattataataactaagtgtaataacttgaaggacatgattgtccagtctacaaggccttatggtcaaagagtagttcttaagtttgctcaatacactagtgctcatgccattgctagaatgcaagtaaactaagtcattaacttatgtactaggtgagacacctcagcgagatacatttggcagtgtgtcctaatccacgtcaacgttgacctcattacaaacggtttaaatcacagctatgtcattttctaatattaactacacgtatttaagtggagcataattaaggcccaaaatttcggggaatattgttatgggatttgaacttaaatgtaattaactgccaacctatattactatagataggggcaaattatacaaaaaagggaatgaaaaatcttagagaaaaaaaggagtatactgattgtaaaaccctaatcctgtatctatcaatatctgaataagatagactcgtggactatgaaaagttatttgcaaaaccacgtaaaaattttggtgtcattgttattattttctttatatctgtgcttaatttattacaaaataggctcataatcactaacgaaaactacgttgacacttgtattctcaaaatcttgatttatctcctcttccattaataaagaacaagcttttgattgttagaaattttattacaatggaagaaatcaagacattacaactctattgcaatgtaatacaaggaccaacaaagagattaaataaatgttacaacaacatatactacactatatatatatttatatgggtgactaattaatggttatatttttattctaaccatcatggttacattttccttttacctataatagtaggttaccaataggtaaaactttttttttagaatcaattaatta

SEQ ID NO: 122859 - DNA, 852 bp, Cannabis sativa
  modified_base (801)..(806): a, c, t, g, unknown or other
aaaagcatcatgagcaaaatttcaatttttgaactcaaatacttattatggttaccatcacctttctgactttgggctaagacagttggaagtagtatcatgcagatggtgaagtaataaactagagccatttctgcaaaattattttaaaaagttaataataattaataatataacatattaaagtaataagtaaataagaaaaaataaaacaacaaagaatgaaataaaagtaagtaaataatatttattttctcctttttttatgaattatttagtttctaactccattaatattctctagctaagatatatatttatatatataacaaagaattgggttcttgaagtatttgttagattattattgtcagaagagttttacaaaaaacctcactttccttgatcacaaaaaaaagaaataattaataaatagattttaagcagcttagctgaatatatatgatattaattgatatcaagtaataataataatctgatgtgaattaacccaatatattaatttagtacgtgaatattatgtgcttttattaaatgtttataatattgcatgtacatataaatatagatatatatatatataaggcatgcatgcatgcatgcagtagttataattaattaatttcataatatgatgagaaaaattagaaacaaattacaaacccaaattaaagctcagaagcacatgttcagtagttttagatcatgtattaattaattgttttgatcatcgtttgtaattgtgtacgtctatgcatgtatatataaatatatatatannnnnntgtatatatatatatataataatacgtaccaggtggtttggtgaag

SEQ ID NO: 122860 - DNA, 687 bp, Cannabis sativa
gttgtcaagtggttcaccaagttcattgtcgaatttgagcttgggatccataggagttttggtgggcttgctgcctatatatcccgtgtcctcaagaagctgaagagtgtactttcgttgagagataaataggccttgtttggcacgggcaatctcaaatccaaggaaatatttgagattaccaagtgccttgagtttgaatctctggtgtaatgagtcttgcagattgttgagaagtgagagattcgggccagttattatgatatcgtctacatagacgaggagggctatgaatgtgtctttggttcctcttgtaaataaggtataatcagcttgggattgtttgaaaccttcatcgaggagcgcatccgagagtttcttgtaccattgccgagaagattgtttaaggccgtaaattgatttgtggagcttgcatactagattagttcctgtatgaagagaagatggcaatgttagtcctttaggaagagtcatatagacctcttcatggaggtcaccgtttaagaaagcgttatcaatatcaagttgtaggataggccattgtttaatggtagatatggcaagtaagagttttagtgtaaccatcttggatacgggtgagaaagtgtcaaagaaatcaagtccctcttgttgcgaatacccttgtgcaacaagtctagccttgag

SEQ ID NO: 122861 - DNA, 787 bp, Cannabis sativa
  modified_base (244)..(248): a, c, t, g, unknown or other
ataaatatacccaattaaatttcagattaatcacactttattaaaatgctaataaataatcccaaaattgtatttcggcccgaaatacccggttgtgactataccgcggcgacttgtcagaacatacctgaagaaggacaaaataggcatactatataataatatagttcataagcacgtaaataaattaaattcacagttttacccctctcgggtcaacattactaaaatgcccctagctcannnnnggggtcttaacatgtcatttctcatattaatttgcatataataaattataatataatataattctacaataatactcaattaactagttagggctttgctaatcgatttccttaattccagggtattacatattgctaatgatttatcacctaagttagggagcatcaagacagtcaaacaatctcctgaaaatcattttgtctaccaatgatgttgtctaaatacctattgaggtattgagcttcctagaaaagcatcaacacaaccacacacttttaaaagcacttgaattacaaaaatctacatatgattattgtagtcacataaaagatatgtaccaatagcttatatgacaaaaccttaggcaaatgtagttagctacatcagattttttttcttttccttgctcatgttagtatgtaatagaagttactcgagtggacatgagtcacacgagaactgtaaaccataaaaatatatatttttcttttttttttaaaaaaaaaaagaagaagaaaaaagtgttggaaattatttt

SEQ ID NO: 122862 - DNA, 916 bp, Cannabis sativa
aactttatatttgtttatttcattgttttagaattcatattaggatgataatgaaacatacttgttagtaaatctagatcctggtaaaatatatccaacactgctccacccacatcacctcttgtgggggcatatgctccacccccatcgcctcctctcagggcgtctactccaccagtactaacaccttctgttatatcgaagaaggtaatatcctttcgcttattaatttaatttgttggtgcattgttattaactataatgaaattaattaatatattaattgtctttttgtagaaaataaagtgcaacctttatgtggaggatcactccatgaaaaagccacccctagttgcaactaggcacgaagttgtacaaccaaaactctagaagttcacaatagatgaaaaaagattacgataacaccaatgaacaacatggctatcacaaagtgagagaggcaattgggtgctatgttgcttggccaagagcatatacagtgttagaaaaatttaataaaaaaagggtaatcattggtagttgactaaacttatttgatttaccaattaatattgttaaatctaactttttaatggtttttttttggattttttttttacctttacactttaaaatagttttttttttttttgtatttttatggaattccacacataaactcctatgacaactctaatagaacaaacttaaattgcaaattaaaattcacataacaactcacatagaaactactggaccaactcaaataataaattttaaaaaaaaattaaaaaatagtgtataaagtaattttttttgagtaatttgcggtaaaatcctctcaactatcaatttacttgcaaaaaactatccaacctcatattttggtggcaaaaccctccaaagtactgttctg

SEQ ID NO: 122863 - DNA, 632 bp, Cannabis sativa
tcgatgactccctggacaagctctctcacgtggtgagagagcttgtcgtgagttgtcatgagcttggcatagagttcgagactcttgatgtcatcggcacgtggaccgatggtgaagatggccgggaggacaaaggggagcttttcggcactcatggcttggacttcgaaggtgtaattgaccggagagaggtcaaaggctgtgcaagattgacctgggagaatccatgcttttttcactagctttacgtcgtcgattccggcgccggtgattaccaggtactccgatgcctttgcaactttataatacattttgttattatattatatttcccaatattgatcaataattccaatgagtatttataagtaggatttgagaagttaatgacaatggttttgcaatttaatccttaattaaataaattcaattacttttcttttctccttaatcattcactttgaattggtctctatcctatttattattatttatttatcattttttatacgataaatgtggtatttaatttattattattaaatttgaaattaaggattgtttttgtaagcatttaatttagtttcttttttggttttattttctctttgtgtttggtaaggtggtaatta

SEQ ID NO: 122864 - DNA, 1281 bp, Cannabis sativa
ttttttttggaaaaactgtatcttcatttagataaacaatatgtcttggttaaaatttcaaagagttcaaaagtttggaaaatcattcattacaagaaaaattacttttgtttagggatatgttgggtgcagatagtatactttttagttattttttcaaattaaactgtgtatgtaacttttgtaattttttaaattaggatcgcaaacctaaaaactacaaagaccacaccacaaaaatgtagtgtgatgttcaatttttagtaattagaaagaaaaaataattaatatttaattttttttttcagtagtcgagttaattctaacattttgggatagcaatcacttgatacatacctcttcattgtatatcatgttaaaattataaataacagtgactagaatgactagaatagagtaaataactttttttttttatttacttgggactcgaatctatgacctccaacacacacctactatggctcaagtggtttaaaatactaaaataaacaagtttttattgtaacatacctacaaaattcttttggtcgtataaaaatcgtattgtattaaataataaataatattacgtttggataaaatattatattgcaaaaaaaaaaaattatgctcataaatttattatattgtaaattgtattttttaaatagagtaaataacttaagatccaattttcatataaaaaatactaacaccactacaagtccacaagtatatatcactaaaaccaactaagtgcacctatattataaaggacaaaaacaattacattaccacctacatagacaaagtatatgtgtcaacaatacgttattatattatatgtgtcagaaatattttatttactgaagattatatcatttttatttcaaatctttttgaatgatttaagcaataaaaaacaccaaatataatacttaaagggttcaccaaaaaaagtgggttgagcttttataaacacatgaaatattcatatataataaaattaaaactatatttaagaaatttgtattttcataccaatacgtagcggtgcaatttgaacaacaattattatatttaaaaccgcaaactgttgagaatattttatcaagatctagatttactaacaagtatattgattaatattctaaatatgaatatctctaaaacaatgaaatcaaacacataagaagtgagaaatcttacattggttgcagtaaaattaaatgactcattccgctcagatttctgacccttgttcctttttgtcacaga

SEQ ID NO: 122865 - DNA, 1424 bp, Cannabis sativa
ttagccgcaactttaatgttgaggctcatagattggctaagcattcccttaggatagacaatgaactttcttggatggaagaaatcctcccaccaactgtgtaacttttgtgacatttgttatcttatcctttattggttaccccaacaaaaaaaaaaaaaaaacttaatgttggatttaatagcaaacggttgttttattgttgataacatgttgttttatggttgttctcatacgtctggagcaggttttgaaataacgttcataaacgtacatgaattttattgagcacgtttctaactctgttatccaacatttatattctaataaacactaattaaagtgctggtaatgcatgtagtgaaggaattttgattttcatatatgattctcaaaatactatcaatagagatttttgggttgactttgtgtaacaactattttttaccaagagagcacattgctaaaagtactttaggtttaataaattcaaaaaactatttctattcttctcttttccctaagtgcttgtagtaaggggaaataaactttgggacaaaggtgtaagacattattcaaatttggtgattcccctcttatacacttgtggtgttgagattgcttttatatttcttatatatatatatatatgctatttatatattatgttttattttgtaacttatttatttgagttgttgttctcatctttatctttatattctctagtttatatgtatattttatttaatattgtaacattattcatggtcggccaaagggtggggcagccggggcctaggccccaggccccaccattttcgagtctcccaaaaattaaaatttttatatttatgtatatataaaaaaataaaaatataatatatattttagtttgataaatttcatgaaagacttatagtacaattggtaaaagtgagtgagtgaattggttttagatgttgggttcaagttccagctatctcaccttttcgactattttaaaaaatttagaattatatatatatatataaattcattttttataaaagagttttatatttaaatatgtttggtttttttttttcaaaaaaaataaatgttatgttatatatattttttaaggagcaaataatatgttttgtacataatttttcagaaattactctaagtgcaattaaaagaataaaaaaatattgtaataataaataaatcaaatatttttaaaaataattaacaagaatattatagcttaaacatttaatggcaacattataacaatattataacttaaataaaaagtatatttattaattattatgtatctttttaaatttatacaacttttaacatgaataaaataactacaaaaaattttacttttagtcacaataaaacttgtgattaaaagtaaaaaaaattgt

SEQ ID NO: 122866 - DNA, 1029 bp, Cannabis sativa
tctggattacattgaaatggggttttatttagggcataaaacccaatagatatttctatgcttacgctcaactctcccattttgagctaaggtgtgagagcaggggtgatcgaagagtatgccactgttattgacgagatcattgaatgtctaatactccccaccccaatctgtccaaagcttcttaattttcctatcgaattgtgtttctaccatgactttaaattagataaatgcaaataaagcatctgacttatttttgagctagtacagccaagtatgtctgctatgatcgtctaggaagtgtatataatttaaaattagtgtgagatgctacaggggttggtccccataggtctatatgaacaagatctaagaggccatcaacttttgattgagaattttgaaatggaagggcatgtgaattttccatactaacaagcatcacaaaatttttgtatttcattgataggaaagtttacattttacatgtttaggacttgattcaacacattaacagaaggatgtcctaagcgcctatgccaaatgtcttttagggaacgtaaagaagctaagttgacagaagaagtgttggctacatatgctgagataagtaagtgaggctgagatgtttatgtagtggtatgaagctggtacaaaccattcttaattgtcccttgtagaaccacattcactaacctttgatccttcacacaacaacaatcatagaagaattcaatgaagacattgttatctgctattaactttgaaatactaggaacatgaagcatgttatgtagtaataatgggttgtatgaattggattggatgataccagtaccaatgtgtgagataggcagctgagagccatctccaatagtaattctttccttacccccatattcagtttaggtttgcatcttgtttggattagagtttaagtgattacttactctactatcagcataccagctgtcatcattgagcatcttgttggaatttatttgaccaggatcttagatctactca

SEQ ID NO: 122867 - DNA, 1578 bp, Cannabis sativa
tgtttttgataatatgtttagtaaaattgtactttgtatttttttaaatgaaaattttgatatgtattttttgtaagaatatagtaatacattgagtttgaaattttacattaacaaataccttgaagtggagatgttatgattaagtttacaatatctttttactctttttttgccctagaaattatctataaattgattggttatattaaggaaaaagagtattgttatagtgtatttaatgtgtttagttaatattatctaaacgtgtcgtcttagtaatattttttagattttattatattaagttatatatcatatgtgatgcgatacgaacagtatagtattacttactatttttaaaaaatacactatgagatttattttaataaaacagagaattcgatgaataatttttataaaatgtaagatttaaaataatatttgagattattattattagagggtttttttatttttatatttgaaaataattttttctgtatagtaagtgggataattttgcttattattattattattattattattattattaaataattactgtataattaattaaattaaattaaaagagttggtatttcgtgtagagaaaggtaaatgatgatatgatatgtgtatgcatgaaaatagagatagaagccattatcacctaaaaattaggatcacactatggcattactactaactagcccactctaagtaataaaatcttacatgtagccacgtagtagtagtaaaattaaaattaatatgataattaaaataataaaaacaaaatatagaaactaattaacatcacccacgtgattacatttattatatgatacatttatttacatctaatatatgggaatgtggtttgttatttgcatttagtagtactagtaataatgatcatatttattttatttggcctaaaggaaatcaatcttttttttttttttgaaaggatatagtattaatttgttcattatttttttttttataaataattgaagtatatgtatttttctaaaagaaattttttttattacaagttaatatttgggtttatttatttgtaattattaattactttgataatattattaatattttattacaattttttagttaatttttgtgtataaaaatacatgttggatttttttatgacgctatttattattattacagcataatttttgtaagtttttgaaaaaattataaataatttgcaatgtcaaaaataaatttaatatttattgaatatacgtggtaaattagaatattaataattttttttagtactgtaaactatttaaaaaatttcaaaaatttacaaagataatattgtaactataatgaatatctctattaaaaaaatatttggacatataatttcaaacgtaaaaattaactatagagatcacaattaacactctctttaacgcatatgtaagattcaaaaattagtatgaaaatgttgtaatttcagcaacaataacatcaaggattcaatcataaaacctgcaataaactcacaactttgacagcaataatgaacacaaa

SEQ ID NO: 122868 - DNA, 853 bp, Cannabis sativa
  modified_base (652)..(654): a, c, t, g, unknown or other
ttatgattgagttgtccaagatagcaaataaaatagcgaccattgctaattggttttgagataaaacttcattcacattatcacaaattttaacataaacaatacatatagtaacaaacaaattacttctgagtgattcaaaacaaaaatcaagtaaactttaaaaatgaattaacaattttaatattttaaatttattattgtaattatattagtaaaaaaaaatatgccacattataatttattaataatatatatttaagtatttgacacaagatataatatattaaataaacaatcttatatatcaaatcttattacaacccaataataatacatgaagtataaattttttaaaaataattaaataatgtatgaaattacaaaaataaaaattgtgtatataatagaacctatatttaagaatatacttgggaccaaataaattatattttaattgagagattataactaaatagagttacactaaaaaaaatcttcaatactaaatcataatagaattattttttagtaaatataatatttatacatgtattacaatttggaataaaatgattaattctacatagataaatttataaaatgttaggcttattagaaattttatcccctaaactttgacatgtaccannncatgccccttgaacttttaaggctgttgaaaattccccttgaattattgagattgttggacttaaggacttttgactaattttaataaaaaaactttaacacgaatcaaagttcagagagcatgatttggcacatgtcaaagtttgagggacatgatttggtagatatcaaagtctaagaagcataatttagtacatgg

SEQ ID NO: 122869 - DNA, 2388 bp, Cannabis sativa
aattctatgctaagtttaagaagtttaatgcaaccattaattataaatgaaagatggtaacatttgaactcgagggtgagaacttaagggttcaaggatctcgagttccaataatctcggcactcaaggcctgagatttgttatgggatggatgtattggctatttagccagtgttgtggataccacgagggaagtactaataggacgtgaacacgttccggtggtacgagagtttctagatgtctttctagaggagctacttgggttaccaccaaagtaagagattgactttgagatcgaattgataccagggacagagcctgtatataaggtcctatatcagatggcacttgcagaattaaaagaactaaatgttcagttacaaggtatattgaatttgcagttcactaggccgagtacctcaccttggggtgcactaattttgttcataaataaaagtatggaacactaaggatgtgtattggctattaggagttgaataaattgatagtgaagaataagtatcgtttgccaaggatagacaatctgtttgatcaatttcaagcaaaaaccatcttctctaagatcgatcttcgatctggttatcaccaattaaggattttagaggaggttattcccaagatagattttcgtacctggtatgggcactatgaattcctagtgatcatggacctgatggacctgatgaactgagcgttcaaagactttctagatgattttgtaattgtcttcattaatgatattctgatcttttctgattcaaaagatgcacatgaaaaacatcttcggatggtgttccaacgtctttgggagcatgaattctatgctaagtttaagaagtgtgagttttagctgccccaagtaagcttcttagggaatgttgtgaataaggacaacattctggtggacttggtgaagattctaccaaacttagaagtttcctaggattagcaggatactatagaggattcgtggaggggtttgccaagatttctacacccttaacggaattaacccaaacgaactgtaagtttgtttggactgacaagtgtgaaagtagcttccaggagttgaaacaaagattgattattggaccactactaactttgccaattagtaatgagaaatttgtgatattttgtgatgtctcaaaataagggttaggctgcattttgatgcagtccggtaaggttattgcctatgcatctaagcaactaaaggaatatgagtagcgctatcctacacacgatagtgaattggcagtggtagtttttgctttgaaagtttcgcatcattatctgtatggcaaaaagtgtgaaatttacaaggatcacaaaagcctcaaatatttttcactcaaaaatacttgaatataaggaaacgatgatggttggaattggttaaagactatgctgtgagatcctataccatcttggaaaaggaaatgtgctagtagatgctctaagtcgaaaaggtccggggcaagtttattaactgaagaagtctcaccaaagttggttggggatatgaatagaacaagaatcgagtttatgattaggaaattagccaacattgtgttatagtctgatttgttagagagaatcaagatcgctcaccaaagtgatcagtcttacaagagtataaagagaagtttgaggctggatcagtaaaggagttcttagtttcatcaaatgagttattgcggtataaagataaggtttgtgtttccgcagacgatggtatcaaacaggagattgtggatgagtctcataccatacttattacaatcgggaacagctaaaatgtatcaagatgtgaaagcactatattggtggccaagtgtgaagggtgatatagtggaatgtgtgtgaaaatgtttaacttgtaaacaagttaaggttgagcatgaaggactagcgggattacttcaacctctaaagattattgagtggaatggaggatataaccatggattttgtggttggattacacagaaccaacaggatttatgattctatctgggtaataattgactgatatacaaagtcagcggactttttaccagtatggactaggtgtacagtagatcaatatgctaatttatatgttaaggagacaatttgacttcatggtgctcaaaagtcgatcatctcagatcgagatctaaagtttacatccaagttatgggaaagtttacaatgagcaatgggtaccatattaagatttagtacaacttttcatcctcaaactgacaagcagtttgagagactattcagatacttatggttatgctacaagaatttgtattagacttcgaaggttcctggaacaagtacctgttggattatattttaccaggatctaga

SEQ ID NO: 122870 - DNA, 1701 bp, Cannabis sativa
  modified_base (173)..(174): a, c, t, g, unknown or other
ggagccgtatgagatgaaaatctcatgtacggttctgtagagtggcagtaagggtgacttatctgtcaacttttccactatcacccccaaaaaactaacaaaactgtttcaagcactgacataaccaactagaagcaccccttattttaaagagaggaggacgggttattcanntttcatttgatggtcagaggagaactgaaagctaagcagtggtaattttaaggattccccaggggaaaaatagagatgtctcctacgttacccgtaatatgtggaagtattgacgtaattttatagtcattcagtcttaatgctacatgacgaacataagccatatgaaagaacgaaaatacctaggatgtagaagatcataacatgattgatttggatactataaaacatagtaactaaaaaagtagtaaatataataaatagggatagtgtgttctatcgtttctatggttacttcttaaacggtaaggtcctctttatacactagagcctcttccctaatttaattaatgttattgtcaacttgtacagttcacactctttggctctactgataattatccagtaataggtctttcacaatgagacgcacccatacagtaatgatatttaattatattatgaagattagcttagtagttgaccatgttattccgttcttgttagagtcaatgacatttaggatcttatcaagttgtcaagggttttatacaaaatgaaggcattgattataaagaaactctttctctggtgtcatcaaaagatttttttagaataactacgtcactttagctcatcttgatggatgttaagataatttttctcaatagcaatattgaagaaaccatatatatatatgatgcaactagaaaattttgtgtcaagtcatccaaagtctatggttttaaactcaagatccatctatggtctcaagaaagattcctgtcagtggtatcacaatgtcatcaaatcattatctaatatggatttaaagtcaatattgttgacgattgtgtatatcacaagttcagtgggagtaaattaatctaactcctgttgcaaaaagaaataagtttaggttcaactattgctccaagaataaattttaaagagtaatgatgcaagaagatttcttatgcttaggctattggaagtcttatgtatgctcaagtatgtacgcatctgaaaattttgagatcattaggtattatgactctgatgttgtgggtttccaagaaactaagagatccacttctcgctatgtgtagttgtaacgccctaaataattaggtacgctacccaatatacttgaagaaatcctaatcccctaaacgagattactaacaaaattagcgcaaaaattaaactttattaataaacggaacgaaaataacttgttataatttaaactttataatttaaaagttacaaaagttgggatcccaaaaacatttacaaaatactattacaagtccttttcctttggccgatctaagcggcaaaacagagtctcaaaatgcatcactggtagaccccaacccgcttggtctagtttgccccggacatgtacattctttttccagctcctacactgatggctgatcagaaacaactttaccctttcctgcacagtagagcacccgtgagccaagcccacaagacagtataaaataatgataaacatat

SEQ ID NO: 122871 - DNA, 797 bp, Cannabis sativa
tttttctgtatgccgaaacaagttaagagtacatcagtacatcccttttaagggggtgcattgtagaatcaccttataacttatctattattacaattaaatatttatctataataaaaaattaatcccacaaattactcaaatgttaaccacataaactttcattgtgattttcaacatctggttcttaatttttgggtcgttgacaaaaaatttcattaacacaatttgcatattacaattaaatatatatatatatttttttttagataacaattaaatatatatataaaaaaagttatttatctaaaaaaaaatattaactttaataataataatatttaaatcagacctaactcgctccgactcaaaatgtttaataagttgggtcgggttaaaaagttaagttggccaacccgacccatttatatccctaaattttaaacttgataaacttccaatttttattattattttttttttaaaaaaaaaaagttaacgaatttaatagcttttatagatcccatcccactaaggagatgaatgtcgtttctgaaaacaaatcgtcgttttaatattattgtcgttttcccattatcgattacaccgaaactaataacagaacggctgtagacgaacccaactccttaaaccctttttcacaaaaccaaacatttcttcttcttcttctgcaaaaccctaattctcaaatccatggcaatggcgactctaccactcaagaagagctatcgctgtgtaccatctctacaacagttctacaccggtggacctttagt

SEQ ID NO: 122872 - DNA, 2023 bp, Cannabis sativa
atagtttttttagggtttaaattattggtttagaaatcaaattttttgattttctaagtatagaaaatcaaatttcccatttaatttgtcatgggctcgtatattttgacggccgaccctgcgtcttataattaattagctatttattataatttttattaaattaaaataaataaaatccaacattaaattgtaccaacaataatattatactctataaaaattctagacatcatcagtatgtttagatgggattgggatgagatgcttatgagtacatatgggttttaattgcattatgaattatagaagaaagttagcaatagtattttgaaaaaagtaagcaaattatgagagccatatgggaagtgggaatatatatatcttttggtgtaagagattttagctttttttttctttttttttttaaagaagaggagaagcaaaggataaagaaaaagaaaatataccttccattatgatgaacgtcttttttgtaagttaaaaactaattcactcaaatataatattcttccaaatcaattagttaatagaagagatttataatgtttttgagatgtcactaatacaatcaggaatgaaatcagaaataaaatttagatagagtaattatgtatttttataataaaatactaagggcacttatggtgtcgaccactctagtgtcataaactattaggaaaataatttctctcagatagaatagagatcaagttcaatatgtttagctctagcatagagcattggatttgtcgtgggaagaatcgtgctgagattattacaccagccaattggaggtcgaggcaaatggatgtgtaactcaataaagagataatttaactaagttctgtcacagtttgagcaaggctttgaaactcaacttcagtttagcttctggacactgtatgttgttttttgcattggcaagcaacaaagttagagccaaaaaaatatagcagaaccataagtagaactttcatcaaggtttgttgcccaatcagcatcacaaaatacagtgagctcatagttggatctagtttgtggaggtgaatgccatagtccatggtgccactaagatacccgagaattgttttgacaacttaccaatgagattgtaaggggttccccataaattgactgactttattgacactaaagaatatcttaggtctagtggctccaactatatggaccaatattgttgagggttgtcaacatgagaacttccataggctgaaagttaagaacacaacatggagtgtcaacaaccaactgattccaaacatttatcatttgtgattaatactatagcctatgaaagtacaaggtgagaatctaaattgtagcttgtgctcgttatatggttttatattggaaaagtaagtgtagccaaagattttaaggttggtatataattaggttgtaagtgatcaaacaggacctcaataggtgatttgtcctttgaataagcatattgcaaaacaactggaaggattttttaagagatgccctttaagccaattagctgaagttaatgtggtaattctctaacattgaatccaaacgtatcaggagattgtcctttatatgttaggctctgagagtgcacatactaccaaaaatatatattttttttgtcttatgaccactattctaacattacagtaaggtggcgcacgcacgacacctattgacctcaagtggtcccctactgtacggagcataacaaccccacaggttagatttcagtccgtgggcccaaagttagtgcattctatgtatttatcctattactgcacaaagtttacatgcaaaccctagtgggtcacaagtttatctcgtacccagatcttagcctataaataatgcattataccctcatgcaaatggttaaaaattcatattgtaaatactatagcaaaaaattatgcttattaaacttgtcaagaatattattaatgtaattgaaaaaccgtgtttttgcaaatgtcagttgtatata

SEQ ID NO: 122873 - DNA, 2013 bp, Cannabis sativa
tgccgctaaaaataaacattggatttatgccgcctacaaacttaaaactttgggtacttataccgctatttaccctaaatattaatcatttattgatttaaaaaaatattaatcatttatatttttaagtactaaccacatcactttaaattctttagttacatttagctataattattcatcagtaaaataaaaaaagtaaaattttggtgaatatcactactataaaaatggattttctcgatatttttaaacagttatttaaagtattcccgtcagtttctataaccgtcgtttatacgaccgtcgcaaaacggatagaataggggacgattcaaaatcgtcgctaatgtggatttcctgacggtttaaaactgtcgcctataactaggtataggcgatggtttattataactgtgccctatactatcgtcgcctatagtatagggcacagttttaaactgtcacctatacccaattataggtgacggttttaaaccgtgccttataggctagttacgttttttaattttttttagtgacgatttttttttcagtcgttacattagaaaaataggggaaaaaaacaaattttgtataatttttttgtccattaatttttgaattttttacaaatctgtatagtcacaataattaaactaaagctattatcgtctaaatatattaaaattatgtatagtcacaataattaaactaacgctaatatcatctaaatatattttaaaatttataattaagttaacgctaattataataatctaaatatatttacaaatctatatagtaacgataaatcgagatatatacacactgattaacatgacaattgttgtcgctctgcttctactttcacgtaatgaatccaccgatcacgcataatatttatctgatcatcattagtgtacggagtggagaacctatcatgtcgggtcaacagttgtattagatcttctacggtcatgaaaatttcaatgaatttcatgacgtagtatccacactgtttgtcgttgagttgttcaggacaaataagagtaatcctcttgataggtcgataggtcatcctatcatttggttatacatggtgaacgatttacacaaaaagtaaagttaatcagcatatataaatttataaataaagaacaggcttacatattgggatgtttgatatagaacttacgtggatatgatgaagttcagatcatccggtatgtcgtcgttgtctgaatccaagtacgccaccgtctgcgtacttggttggatgagtaaaagcatccaatgaaacatgttcctgcatggacaaatatgtataaaattattaatatatacataataataaattttataaggagttataaatattgaaattatttattttattctacatataccgattattatatgggacaataagccatttgtctgaatttgtcatcctagtcattcgagtgactagtgcttgacaacaattactatcagcccctgcatcgatggcaatcgcacccggattcaaaaatttatatactcaattcaacccaccaatgtccaatagtctttctttcatgtacctggtaaaaagtcataactactaactgttgctgtcaaaataacattatcaagtttattattaagagtaagtaatcatacttgcaccaaactcctattggttgggctccaaagtattgcatgatgtataattcctgaatgtcacttttaacaagccaaatagagtcatctgcgaccccaaatagctcattatcaacttggaattggattatggatgacttgggccaccttctaacgaagttccaaaaggtaatgatggaggaagtttggcgtggttggacataatgaccatgaacttttaccttactcgacctctcagggtgttttagcggctgtgttggaggaccaagtaaatcatcagagggttctgtgcttctcttcacggtttgcttctgaattttcttggtgggtggttgtgtctatatatat

SEQ ID NO: 122874 - DNA, 1558 bp, Cannabis sativa
ttattgggggtcatctccgaaatcactattaagtcgaatgagctgggaattaattgtgcttgattctcattttcacatagaaataaaaaaactattatttatttattattttttgttggggtgataaagctttcttttctttcctatctaacttctaatttttcatatttgacctagtaattaaaacgattaatattgaagaagcttaactcaaaaccaattctttctttctttctttcttttattattatatatttcttggttgtcttctttctcaagttgcatatttatggtcacatcaatacctttttagaggggtcacaaatatagcacaaccccatatagagctatcaccaaaagacatggataaagccaacttcaaattcaatacaaattttgggaatattctaaatctaatacccaaatgataacaatcttcatatattattattattaattatatttttattttgtgttcaaaatagaacattttatagtttgtaccaaaaaaaaaattatataacaattattttgtacaataatattcatagcatagggctaagccaacaagaaaatggacatgcataaaattacattcttctttaagaggcatatacttattttatatacacatttatctatatattatttactatatatttttaaaaaaaattccatttgaactctaaaccaaacaaataccaccaattaattttagtacaaattaagcatataccaaatcatcattaatgaatggaaataaatacacttgtttaaaacgcgtatataattaaaaatattaataactaatttctctcttcaacaataacatatatattggaaacttaattaatgtttttattaattaacttttgtacttatatttatttattttgatatataataataacctattggaaacttgggtagccccacaataacacaacctcatccaagaaattgttaagaaaattctttaattctgtgttttcttgatcctatctctaatggaaatccttttgtgggggtcccttttagctatcccatttttttgtgatcgatctaggcattgtacattcatatatttatatatacacattaaatacattaaaaatatatataaatatatatatgtcccattgatgaaaaggacaattaaagagccaatagaaaaacaccaaatatgcaaaccaaacaacaaatagtcatagactcatatccatgtgttgcattctcattaggcatataattctttatatatatatataaatatggggatatgattttgtcccgttattgctgtattttcacggattgtaatctgtgatgtacggcagccgtcagataagggagttatttgatctgacggttaagattgatctaggtgtaattagggttaaaaagtagaaacgtacctgacactcatttaatgtaccctaagacccttctaatgtaccatggaatagaatacattccgtaaaagtatatcacgggacaaaatcatatccctataaatatgtatgtatatattatatatatttatatatatttttaatgt

SEQ ID NO: 122875 - DNA, 697 bp, Cannabis sativa
  modified_base (82)..(111): a, c, t, g, unknown or other
tatcaagtatatgtattaaatatgtattaaaccataaacatgtaacatacatgtaatcatacttcacttctaaattgataannnnnnnnnnnnnnnnnnnnnnnnnnnnnngcataaaacccaacaggtacatctatgagtgaccctgtgttatccctcccatttagttcaacttccataagtctagctttacatgccctttcctcagtcgaattcaatagtgtctctttatggagatcttcaccatttctctttcgaacacccatctcaacttcctccatctctgtattaatgttccttggcatcattgtctcggttgtctcagcacaaggagggttaatagaggtgattagttgggttttagtattgcacaaacttaaatgttcacaattattaactttagaatttacaggaattgtacctgtagatgttctgctttggtgaatggttgtctctctttctttggtattttgttccaatgtgattgctgattggtaattgttgtcctctgtaccttctgaatgggatttttggatgctctcctctctatttttagtttccaatcttcttgttaagtccacctttagccaagaaccgtaagcttgagagagttgcccatcctccttgatcacggtagtccgattcttatcacattgcctcatttcatgtccaattaatccacagttaaaacacatgt

SEQ ID NO: 122876 - DNA, 1072 bp, Cannabis sativa
tctctctctctctctcttatagaaaaccaatctcatttaaacgaactcttaaaatgtaaagttgaatttataaaaaaaaaaatacttaattaacatatatctccctataatccctcctttaaaaaactaacttgttcataaataacataaaatatgaatgaatgaatcgagatttctaattatatacatgaaatgaattgcctatgctttaattatctaaaaatgaaatgaattagtactgtgtatgttggctgagtaagagcaaaatatacagtcgataataatgtaaatgtgaataagggaaacgagagaaaaaaaaaatatgtttgaatgaacctagacagatgaatagattcaatgaacctggtcatatcttaattaaaacactcaaaaacgcctgcgtctagtttccacttcttttctcttctcttcagcttaaaatatatataatagtggcaataccgacaaaactgtgtgtcaaatgattagtactgctaacttatccacgtgtcattgataatgagagcttcatgtatatactatacgtcagattataacgaaaaacccattctccatcgcccatgaagacactttataaatgaaccttaacaaaatcaatattttacatcaatagtaatataacatttacttacaacagtatatttggttcattgttactaggaaaatgatgtttaatatttattgagatttttaaaattaattataaaaataaataaacttaagaagaaaatactcagatttataagtgctttgagtgttaacgaattttaatacacctcaatgtcattaagttagaaaagttccaaaatatttgttacacgtgattataccctatttgattaaataaccttaattcttaactcttctttccaagaaattaattttcttgttttatttatagggaagaaacgagtactatcatatacccggacccgatagaattttagtatgtcaactaataagggtggatggaggaaattccacctcctctgatgactattgtattatgatttcattttaatataatagttttcttatctcaaaaaaaaaa

SEQ ID NO: 122877 - DNA, 1260 bp, Cannabis sativa
aaaaaaaaaaaaaaaaaatagacgtaaagatgtaatcttcttagaaaaagtggtgccctatgtaattatcctataatttttttccaaaaaagccatattttgtaaattttgctaaaaaaaatataataatgaaaattctccatattaattttcaagatgaacactggtcatccgtgaaaaatgtttattatattatattatgatattatgttttggcaacgtgaaaataatgatgtttaagaatctgtttcttatatcagataacagtatcaataagaaacaaccaattataccggcacgtggagagtccgggctggcgagttggttgggaatggaaaggtgatgaggtaatatggaacatgtggggagctgaagcaagagaacaagggaattgtgcaaagttgagaggtgaagaacagcttcctcattgttgtgagaaaaagccagaaattgtggatctcatgcccggaacaccttacaatctccaagtttccaactgttgtagaggaggatttttgggttcactcattcaagatcccacaaaccatttatctacttttagaatgattgttggagatactagtactaataataatggcacaataaatatgccccaaaacttcactcttggtctccctggctacacttgtggaaatccttttcaagtctctccaactaggttttcccaagatggtggtcgacgatatacacaagctcttggtacgttacctacctatatttatatgtaatatctctattgcatagtattataataactagtgatgtacatacatatatatacattttattttatttaccaagatgttaattttaatatcaaaaagttattttacatacaattcttataattcttataatttatatactgcctgtgacttttgtaatattacttttgaaagtaacttcctttctgttttttttttctttggaaggaaaaaaagtaactttctttcaaaaaatatataatatatcactgtaataaaaaataataatatacatatatagaaatttaagtgactatttcacaaatacacaaaaattacaaaaatacggttgtacgaaatttaaatattttttacaatttttatgattttatttacaaaaaatacaattttttaatgtatttttatgttatactttcgttaatttgttgttttattttttattgttatttttctgttacttttatatgatttttttttgttgttttcatattatttttaggataaatactatttt

SEQ ID NO: 122878 - DNA, 722 bp, Cannabis sativa
  modified_base (26)..(58): a, c, t, g, unknown or other
  modified_base (662)..(681): a, c, t, g, unknown or other
tctattaaaaattaaatattattaannnnnnnnnnnnnnnnnnnnnnnnnnnnnnnnnaaataatattttattttaatttttaggatttgaaatttggaaaattcagaaaaaatggaaaaatcccacaaaaatcagatttcgtggggtgctgcccaggaaagctgcacgtgcagcccatgaaggttgttagcagccattacgcgtgcgcaaggggccatcagacagctgatccgcgcacggaagaccttgcttgcagggtgatttgcgcgcatcaacgtgtctgaattggggatcatgcggcttcaaacaacacccgaatttcaaatattcccctcctcacgcgcgtacatcagtgccttgtctgaagcctagtgcgtgagattgagcatctccacacccgaatttcaaatattcataactttttcaattttttttggaattgagttccgtgaaaaccaaaattgcttaattttttacaaggaatccaaataaattattttcatggaaaaatttagtaaatcacatacattcatcaaataacacataaactaacatgaacacatccaaattaacacaaaaataatattcattgttttaaatccatatttcatgaaagtaaatcattaccaggactccaaggccagttgttgggaatattttnnnnnnnnnnnnnnnnnnnnacaagtatgttgattaacatcttaaatatgaattctctaaa

SEQ ID NO: 122879 - DNA, 1085 bp, Cannabis sativa
  modified_base (58)..(58): a, c, t, g, unknown or other
gtttgagttattagtttttattcatataaccagttatatttttagttatatatgaaanatttactttggtgacttttccagtaactttcccagcgacgttaactttttctttgacttttttgacaatgttgacttttctgttgactttctgacgactttttcgccgaccgtgatttttccgatgacttttctggtgccgatgacttttccggtatcggtgacttttccgacaaaacttattgttgttttacaaatatgagatttctactttttttttagaaaaatatgacataaaaaagctgtataaatgtaaaaaaattaaaaaaaacccataaccacttagctttatttatttatgccataaaaaagtaaactcttaaaattttctcatattttgggtaatttttacttttattaaatcaagaaagagcttataaaagactcatgtgccaataactacgcagaaagtttttaaagaaatgtgaccatcttttatggaaaaatcaacaattcttcataagtcttccttttaagtttaatgaagatataaatcttacaagggctagtcattcaggcatgaatccagagcattagaaaatggcattcactgaatgcaaagagttacaacaatagtgtttcatagactcaacttcttctctatgggcatgtcatgccttttatgtcaataatcgatcagagtaagctcgaggatagcaaaagttggtcatcaattacaagcccctaaacaagttcttagcaaatgataaattttcattaccaaataataatttattgtttgctagtttatccaaagttcacatttttttcaaaattcgatctaaaagcgggattttagcaattaggcattaaaccagattgtaataccttaaggtttaataatcggattaacaatcctaactaggttaattatgtatttatgagaaattatattattatatttattatgtgaaacagttatgaattattgcattttaagactagggatggcaattataccagcgggttcgggtacccgtaggtacccgcccttaatggggcgggtacaggggttgactttcgggggc

SEQ ID NO: 122880 - DNA, 1230 bp, Cannabis sativa
aacatacttatgccactaaaaaaaatttttattgtcgcttacaaactcaaaattttagatacttatactgctatttatcctaaataaataaaaaatagctagttataaaaggtttgggaccctataatatatgatacaaattaattcaatttttaagacctatgcgttatagttataagagacaagtggctgggaaaaaaggaaaattaactcaaattgaaaattacatttttgaaaattaaaactatttttttcagggtagagcttattttgccatatcaatataaatatatgaatgatataaattcacagttaacactgcatttgcatcatgttatatagtatacagaataattaataatatcaatgaaagagtgttgattttctaaatgatatataaaaaacatggatgatattctttaagtactatttgacactaagtcctctctctataatggtatcttttataagcttgagagagtcttcaatgtcattacatagctggtgaggatccggtattctctcttcgtccactgttaaaacaatggtgatcttcttcatgtaactttgaaagttaaccatcaactcctgtcaagttatatataatgtattaatacatatacatataaggtatatatatatctatctatctatctataataccaaatttgtgtaaatgaaaaagattattaaagagtaattaatgatatacatgtggttggccataagaagttgcggcaaggaaagctaagttgtgaccgtaaaggccaatttcctgagttggacccactatattcgagaacgccattgttgcccccgacacaattttgtgaaagaaaatagccattctctgtattacaatcatatataagtatttataagaaataattgcatattaacacgttcatttaaaattatttaagaatttcttgtcagtttttttattgatgttaatactggaataggcataccgagactattgtttttgtgttttctttctctctctttctcatttcatgcactacacatcaacatgttcttttttgtctttttctccattcacacgcactcatatcaccattttttttttctttttcaacttgttttttattttttcttctaaggattttcaattttacaacatttattacattatattgttagatattaaaaaaataatttctcttccttttgtttatatattaaataaaggaataattacataagaca

SEQ ID NO: 122881 - DNA, 713 bp, Cannabis sativa
attattattattatttaataatttattttattggggtccagttcacagctttgttgaaaatacacaaggctaataagcacttgatagtcaagatggatttatttatttttggttgaggtatatgaagtgcattattagatagatgaattattatatcttcttttcttggacaattcaacttttatttatgatacattaataattaattaattggttcttagcataacagactaaactaagagacaaatacaatacatgacaatttgtattggagcatccaatttccctaatgatggaggaaatttcatcaaccacactcttatgtatatctatatatagcactatgtatctatatcactaagtggaaaatatttttgattaatatactttttaaagaaatattgttgatttttgatacatctctttctccattgttaagaatgtgaaagttggtggataaatatagaaataggtgaagtgtatagtgaacttaatgatgttttatcttaaaattaattcacaataaaaaaagtttcatgtattgtatatgtaatactttaaataagtgcgttataatatagtagctccttttttttgctcatcaagtgtaacaccctaactagcttaggtgtattacgtgatttttaaacatactgtgcagctaattgctaatcaacgaggtttatggaaatggtgattaattaaaatttttg

SEQ ID NO: 122882 - DNA, 821 bp, Cannabis sativa
aacctggtcatatcctcgcctattttgaaattttccaaacacacactgcaaatatttgaggtcttctcctccacagccttactcgtcaggttgtccacgttcgattcgaatgagggtttcctctctaatttctctatgaatgaatttaattttcttacaacaggagcaaagattcgaccttgatcagcaggaataatgtctttctcaggtccaatagttgcagaataaagtgtgaatgcatagacaaatgcatagcgctggagatacgataggagaaactcgaaggggttgttacgtatttcttgtctttgtgtggaccagaaatggcggaatgaagcatagaagatcccacggctaaacgggtcaattattgctgtaggagcagtacaagaagatgatgatggttcttgatgatgagtagttgttgactgtggaggttcttgagattcttgatcatagaactcatcattgtggtgatcgagaccaaacatcggaataatgttgtggccggagttggagctagagttgttgatcatgtcgccggcgccggtcgagagattcaaggttggagacattaatttattaggttttgggagaaatgtgagagtgaaaagattgaatggggaagagagactatgtacgaatatatatatatatagataaatatatactccttaatcttatgagagatcacctcaactcttcactcctcttattaaataacgtttaatgactttaccagctcaaattcatcagaaccaaaataatacggatttttttttacactgataaatatttatactatttaatatttacaaaaa

SEQ ID NO: 122883 - DNA, 989 bp, Cannabis sativa
tggcagtggtcagccaccacatagtatggggagtttctttggccaaagtatatttccaacattcatatatcaaatacaattgagaaaagtagtgcaaggatccataaacctcttacgcgaccactgccacctttttgacaaaaattgtggcagtgctcttttgaccaattgctcaagaaccaatgtgactaaagtagttttctagcatccatatgactgaaataagcaaaaaataccatccgaggcttcccataagccatggccatccactgctaccttttggccctgattggtggtaatggtctcccgttagggtttcagacgtcgaaatgagattttgggatcataggacctccaaaatgtgacacaccataaaaaaaagtcaaaatacacttcgaggggttcgagaacatgcacgaccaagaggtgccatttagtcgtgtcagtgctcccatttggagctgaacaacacaaacttcctttcagcaaaacgagactaactctctcaatgtttatctaaattatatggttcaacttgcattggaaatatcttttcaaggaggatctaagtgtgtctcactgtggtagctcaattttgaagctataaatttcaaaattggctcacaaggaaggcttatacactttactcaagaattgagtagtgtaattaagtgtggaatattggaaaattatgcccaaaccatatggcatcatatgtgaggagtggcatcctaaaacacccgtttccaacacttctcaccaatttcatagattccaaaccgagaggtgacatccctcgtcactccacttcaatttggtggatctctagctgagaataactattttcccaatttttaggaaattttggcctataattaagtaaatttttgtagatatttatttatttgtaattttatattcattattgagaggaagatactgttaggctatttttagcctacgttttgggtcactttttatagttgttt

SEQ ID NO: 122884 - DNA, 821 bp, Cannabis sativa
tatgtgtttattttcatcgttttataaattcatatttaggttgttaaaaatatacttgttagtaaatttagatcctggtaaacatattccaacactgagggccagtattctccctagggagcctgcctttctgcggaccttttccctttgggaaatcaaagcagactttttgcgaatcctaagccttcttgtttttttgagggaaagacgtgggattcttctttggagagccttctgagggataccgaatagggcttggctctcgacttttatgtcttcgagcatttggtgaagacttttctcttatattgtctggtccaagaggcatagcctttggatgcacgtgaatgcctgctgtttccatagtcttttgcatgacagctattatttcttgtatctttctattttgttccttttgccagctcggctttgtgatcagcaactctttgcctcaaggacattagttcagtgtatcttccatcatcataggcgtcatactattcttggttttctttatactctacatcatttgttttgtcttgttcttctacttctgcgtctattcgcgaagctacctcttcatcccgtagtcctctgggaccttaggatggacaaggttgacgtgtatggtttctagtatccatcatcgtagtctgaatcttcttatattgttattttatacgtaaagccttctacagctctcaatgaaaataccgaaatattgaccgagatttttggcaactaattaattaaaactgcaaaaataattaaaagagagttaatgcaaatatttttacgtagttggggcattaatgagcctt

SEQ ID NO: 122885 - DNA, 1452 bp, Cannabis sativa
tatataatatgagaaattagacaatatagttgctgttcgcgactaatttctaatttaattttttttaagagttataataaaaaagatatttattaatttaatatacttaaaaattattctaatatataataatactaaaattgtattttcatctattacatattattaataataattttatttatcaaaaaaataaaactccacaaatattcacaataatattgattattattatttaatttatttaatattataaagtttaaatttatactattaatatatatatattacacataaaatttaaaattctttttttttaaaaaaaaaaaaatattattataaaaataagcaaatagggtagtttaggaaaaaattaagtgtttcccataaatataatgcaatttttatatctgatcattcaacatcgtatatcacctgttgtaatcactgtattagagtgttcaacaccatatctcacatgttgtctctcatcgtatctcacgtatcattgtatctcgctcattgttatcactatatatatcattaaatattgtatcttacccattgtcattgccatattactctaatcagtctcttacaagtttttaataatcgtctcgttgatgaatgtgttttctttaaaagttgtcttcttaatattataacttccgcacttttagaggtggaaagtttttggataaatgagtaatttaatccctttgttatggtcaattatctagttaattagattctttatttttaaaaattaactttggaatccttttttttattgaaatgttaaaactgaattataaaaattgtaaattatatgtaaataaatttatgttttgttcaagaatttacacaatattgaacatgtattttaattattctattttgactcattatttttaaaagttaaaattttgaatctgtattttattcaaaaaaatttaataataggactatggtcctgtgttttcttttttcattatgataaatattttttaattaatatttttttctcttaataattaactaaaaattagaaaaatgaaatttagaaaaaaaaaatatttgtttttttaaaaaaatgagacataaatatttgtattaaataaaaaaatatataaattacatgtttagcaaaaaaaaaattatttgagtaactttttaatataataatattatatttttaatttaataaaacaactatcattataatatctaataatcttaataattaaatcatgtatcatttaaataaaatcataatttaaattaatttttattttaaaatttacaaatttaatataaattatattaaaatgtacaataaaacataacaaattaaatatctaataaaatttgaatttaaacattaattcaaatggtacataatttacataattattataatatgttgacttcgcttttagccaacgacaatga

SEQ ID NO: 122886 - DNA, 2805 bp, Cannabis sativa
tcaagattgtcaaattctgttatcctctttacacaatgttaatctcttttttattagacgatcagcaaatcgagttgttcatgttgttgcaaggcactctcgattttttcctggccgtagcatttttgagcataatatttgagctgatttaaaacccctcttgtactttgaatgctaatatttcaatgaaattgctatttcatcttcaaaaaaaaattatatatttaaaattaaaattatataattttttattatatatttaaaatgaataaaattatatatgttaatattaaaattatatatttaaaatgaataaaatatatttattatcccgaatcttattcaggtgatgtaggacccgtttggggtggcttttagaaaagttaaaagtactttttgggaaagctattctttaaaaagtgtttggcaaaataaaaaaaaaaatagctttttctaaaatttaagctaaaattatagctttttgttaaagttggcccacacccacttttagattttagcttttaccggaaactaaaatttgggtttaatgaatttttttagttgaccgaatcaccctcattcaaattaaaaaaattatcattttagtgaggggtttttttttttttcattcgtaaaatcaacccatcgactgcagctcttcaccttcaatcgcaagagtcttctctgtccccgatcacccacgctgccgttcgccaactctgtcatcaacagctcctgcacaaccaaggtttatctcttaactcttcctttgaatgccaagaaaatattttttgattctctttttttctccctgtcgaatcaatttttttcttttaaattccctagtctgcgtgtgtactgggttatgattaatgagtctcacctatatatgtttccttgaatcaattcctcaaaataatttgcaactgtgggaaactgtgggtaatgaaattgaaaagaaaattagtaaaacaaaaattgaatttttcccctcctcttttagagtaataatttgcttatataaaatctttgcctagtgattttgcttatacactacaacctctctctctctgtctcccttaagacccaaaaaaccataaactttttgggattaagtgttcataaattaaatacctattgtgggaattgttgtaacaacatctctcagtttagcttgtagagaatgcttgtttttccaaaagcatcaagacccaccataactatccttatttaattttttggaaaaaacttcttcgtagagaaattcctccacccatatcacaaacaagaagaataaaaaaatcaaatcataaagggtatagttgcagagaagaacaaatgcccttttttgttaaaaagaccaaagacaatatagaaaaaggagatctctttggtttcaagctaacaccagctggaatattggtgtgaggatgaggcatacaagagaatagactcaattctatacataaagaaatggggtaagttcattgttctctttgaacttcaaaacaggaatttcttctttctagttcaataaaaactttcacataacatcatcagctgagtctagtcgaatctctgttggtttcttgacagtgaaataaatgtaactgaatcttggaaattgtttccacttttgtctttacctgaatgaattgcaaacttaaagattctcctaatctagagccattataggatattatatgcttctagattaatgatcattaaatattatattgtgtgaatactaatatctagtgacacctggtggatgcactgctgttatttgggttgtttttattatgtcaactatgatgtatgtgggtattctagtggtgcatgaatgctcttataactgttgcagtctaatggtgctcttgattgttggcataaaactgtacttttattaaagtagcctaaaacgagttgatgagaatctagctttaaaaaaaaataccagtataccatatcattggttaagcaagagtcacaaaaaaatttaagtgaaaagcaatctaaaaaggtaaatgaattaaagatttgatcaccaatgtgctttcacaataaaaaaaccaatgaactactattttcctagctgtcgttaatgattcatctgagtttaaatcactgtaacagaaaatggatttgttcttctttagttatcaaagaagaaagttcatcactttcccaaaatattaattattttctagcgaaactaaaaggaaaaattattgctttttcttagattcattatagtgttactcatatctatataataactagttaattatagtattgttactatgtttttatagtactaacaaaaaagttatgtaagaacatatatatgtatatatattatatatataaatatcaaaaaattctatcaagtgtttacattactttggtctctctttgaaatttttaggtacccaagtagaataggatgatggtgttgctttcatcatagttattatgtgttttttggtgttggattagtctttagctttatgactcattattttactttttacttcttaataaaatttattattttaatttaattagatggagaaagaaaaaaatatttgtactaaaagtgatgtagcagtaccacgaggtaaagcaatatagaattctgagagtgtgaattttttcttggaattctgtatcaaagaggttgaagatggtcatcgtcctactacttatttagataaaattagatatctaaacttgattacaaatatgaaaaaagcaactgaaagagattacactagagcccagctgaaaaataagtgggatgga

SEQ ID NO: 122887 - DNA, 630 bp, Cannabis sativa
atatagttaagagttggatattggatatgtggtcctctcttatatataataagttagatatatattactttctcttgtaaaacactataaagttgttcctccttgcatgtcgggaccgggcatttacacacataaccatgacaaagatatagtcttgatgtgtcgtattgtatcgagggaggtaaaaaatgacttaacatgtaggtgtagctaagatagatcaggtcctttcgttttctatatatttatttaatttttcatataagtgtgtgtattgttggacttgagttatattaattaatttttatagctatataattatttgctatagtacttttattaacggtattatttctagagtctacagggatggatgtgaagaattgggcattggctaacacactagaaaattgagattgcatttccatgctaaatttcatatataattttatttatgtatgtataatataatgttatattattttataatataataagtatagattaaaatacgataaatatattattttgtgaataatatatattaaatgtatggtaaataaatgtgtaatatatgattttataacttatattttcataatctaacttggagaggagttacaatttgtt

SEQ ID NO: 122888 - DNA, 1425 bp, Cannabis sativa
taaaaaatggtatttaccctaaatatttctgtcgcattattaggtgtgttcatgtttttttatttttacactttaaagtaatttttttattttatttttataaaagttcacatattcttaaatcgtaatccaaattcgcatagtaactcacatagaaactaatagagtaactcaaaccgtaaaaataaaaaataaaaaataaaaaaataatatataagataatttccatttaatctaatcagcattatttattttaaattttggattcaatgtaattcgtttagattggtttattttttaataatgaatttattttatattgttgttttatgtcttcaacaacaaattaaaataaatataacaaaattaataaattgaaagaaagaaaaaataagtgtatgtatataaagaaataattaattttattttagattatatttttcttataaataaaaatagaataaatatttaaattttaaaaatatatttatatcaaatttattgtatttttaaattattattttttatattaaaatattaatgtatatataaattttttttaaaatatatatatatatatgaatatctgcggatgggatgttgattgaaaaatttaaaatctgtacttgtgcaaattgaatattgattaatatgtaaaagtaaccgatctaattcaatcgcactttgcggctagaattagattgtgccgattgaattgtattgggtattttatgaacacccttactcaaaatgatatcccttgaaacttttaggttgtgaaaaaaaaaaaaattcttattgatattgttggatttgagagttttttttttccaattatgttcaattttactagtgtgggggtgattgtctaagtattaagttgtgtcctcaaatgttgatatttactaaattgtgtcacctgaactttcatctatgttaaactttagttagtaaaattagacaaaagtcatttattctaactatctcaatagttctgagacaattttcttctttttttttttttacaaaagttctgagataaatttttaataacttaaaaactttaaagtgcataatttggtacggataaaaatttctatcaccttaggtttaatttgtattgtattaattttctcctcttacggaattggagtattgataattatgtattgaattgtaatagtctccctaagtattttttgagttgtaattttatttttattcttagtttttgcaataatgcagttcagctaagtgaatttatgctcaaaatttaactggtatagtagatgtgttaattattccatatattattatttgtaattaggggtgggcatccgatccaatccaacctttttttcctcatctgatccaatccaattagtaattagatttggaaaatcatcatccgatccaatccaatta

SEQ ID NO: 122889 - DNA, 2829 bp, Cannabis sativa
  modified_base (1410)..(1410): a, c, t, g, unknown or other
gaactcttatcacctttcatatattaaataaataaattatctgaataaaggcaaatctttttttgctttgtttcaactttaattagttgctttgtgggggtgttactttattgaacaatagtttattgaagaaagaggaaaaaatatctatgatatcagatgcatacatttcatctttgtgtaggtaccaatattgacccttgagacttgagtgttcttatcccactatactatgaaaatttggtgttaatttatcctttaaattaatatcttaaaaaagaaaaagaagtctcacttgacatgttgattgaaaattgctcatctaaacttctttttggaattgggagttgtattacattatcatatatcaaaagtctatttgatttcctttttccaatgtttttcgtctcaaaacattgtgactagcttttaaaatttgtaaaggggaattgaattgatggatggatgattttttttatgatagggtgaaaaaggagggtagggttaagttgtgagttcataggtttacatggtgtgttattttcttgggaaagctagctaagtaactttacaccacaaagattcaaatcgttatcatctttggctttatgctgaattattgtcctttgacatcaccatcataaataataataattataagaaaaaaaaaagactttctttttaactttttccttgacctaccaatcattctaattttagagggttatgatgtaaaataatcttaaatttagaaattaagtaaatgttctttttttataaaaattaaaaaaaaaagactaaatataatatattacttaataaaaattaaaaaatatatttattatatattattttttaaaaatatatataataattgaattaaattatattattatattataataaaaataaaaaaaaaatcattaaatatatacaacatcatttaatatattccatcactaaaaattaatatattgtaataaaaaattatataccacaaaaaaattataacaatactaaattaatacttgaaaaatatatattttagctaacaaaattatatataccacttttgaaatatgtatacatatcaaaaaaaattatatataataaagtaaaaactaaatattatcttaaataaattatatactataggcaaaataatcataaaccatacaaaaaaaacatacatacctaaacaaaaataaaataaaataatataatattatttataaaaattatatatatcattaataaaattatatatcttctttatatataataaaataaaaactaaacatgcaagatctaaaatataatgatataatatacattgtatacaacaaaacttatataccacataacaaaaaatatataccttacaataaaaatatatataataacaacaantaaaaataaaaatatataggatgttaataaaattatatatcatgtcaacaatagtacaatagaaaatagaacttaaatattattttaaaaacataatataccgtataacaaaaaatacatataccatctaccaatatatatactaacaataataataataaaaatatatatgtataatatactaaccaaattatatttcacaattaaaatatatatactatgacaaaaaaaaattatgtaccatcattgtatataataaataaaaactaattagatattatttaaaataaataatatataatacaattaaaatatataaaaataataattaaatatatgtatcatgccaataaaattaaatacatgtattaaaatatttgtattatgttaacaaaattatatatcactattatacatagaaaaataaaaaataaatatcatctaataagaataataatataccatacaacaaaataataatgtattgtacaacaaaatctatataccaacccacaacaactcacaaaaaattaaaaaagtcgacataactttcaaataaaaaaaaaattaacaaaactaatatagatatatcataatctttgagtaatttgcttataatttttttttttgtgtgtgtggtaaaagacaatataaataagaaatagtctaaaatagacatttctttataaaatttgaaatgagaatttttactaacatagttctataattttgggttatttgctataatatttctaaatcaatatcaatattctacttaaagtttttctaaatgtcaatatttcatgtaaaaaatatatattaagtatatgtaaaaaaattatacggatttatctgatttgaactgctaccgataattctaaaattatgaccaaattaaaaaattgtaaacagtctggcttgaccaatccattcacaccgagttcatttggcccgatctcaaatagtttggtccggattagttgggatctagaaccatccctcgtcacgagtactattcctcatcaataattctaaaaggcatcactagtgcctacttcagtgtcataacactattgatgtaactaagtatcgagtctcatataacttaagaaaataacttttagggaatatcactaactaatcataaggcatcctataaaaggtgttaggcatcattggtgctcaatagcaatggtcttatataaatgggaaatttgcggtaaaaatcctcaaaaagttcaagttgatcaaattagtcccaacctccaaaaataacatcaataatccttaaggtcgcgttttttttgtaaatttgctagtcctaaatttaactaatctgtttattttttcaaaattaccacgtgttgaaatattattggtctaaataataattttaattaaaatattttaaattaaaaa

SEQ ID NO: 122890 - DNA, 911 bp, Cannabis sativa
tgttagttagggtgttacacttaagtaatatactaatagtgaaattagggagaaaactatattgtatactcactttctttcacttattttaatttttacttttatgtttatattcattaagatatacccacttttataaataatgtctctattatatctcttacgttaatataaattacatgctagagttaagtggaaggtgatagtatattaagtaactcactcatagaagtaagtatattttaatgaaatataatgtaagagtattttttattaataaataaaaaaaaattcaacttatcctaaaattaaatatcctatataaatcaattaaataacttttaaataatattattcttcaattacaagtatcacctctaattagtgtgctaggtattaccatactcaataacaattcatgtacaaataagatgctaagttgggaggtgagctcttctaacgtcatactcaactttttataacaaaaaaaaaaaataataataataaaatctttatagctaccaattatcagtttgcagtatttaattcactacaattctttttttttttcttttcagaaatatatctcaaacaccaaacagtacacaaagatcagcaacaaatattttaaaacggtagaggcgataatttatttaaaaataacattcactatcaacttatcttctatacaaatagtgttcagttttatgtcctaaataaaactatacatttcaatgtaatttttatcttttaaatatcaataaagaaacagaagtattttcatcactttgtgtgtcatttggttcatgttatcatgtatatgtttatttgatttatagttaattcatctaaatccttatcacatttatgttcttatttactatgtcgtcagcatagtggaaagtaatcaa

SEQ ID NO: 122891 - DNA, 1157 bp, Cannabis sativa
  modified_base (1130)..(1131): a, c, t, g, unknown or other
taaaaaattgtaagcacttgcaatcttctatgctaactttatacatatatatatataggtaaagatcttaacatgaaaacacgtaacataatggaatattgaatgacttaattaaaattttgtatgacttttaatttctctagaatacaaagagttataaattgattaattattattaaattattacacgttgaaatttgtttttaaatgctatacatatattaattaagtgatttaaataataaaataataacaaaaattgatataattgtgaaaaaaaataataaaacagagaaaatagaagaaagctcttagatcatgccacttcactctcttttaaacttgcctttatatatatattgattgatattgattgattagagagagtaaataggaaactaattaaattagagtgactgactaaatattaatcacgtccagcttgttacaatttacaaagatagttaacccgcactccattcaaagtctttataaaaatatttcctaattactctcgagtcttcacatattctgtggagattaggctttattaaatatttttacaaacaaaatagacaatcaatctaaatgtgtttagttcgcttgtggaatacaagatttgagacactatgaagagcaacttgattatcacactataatttttgctggaactgaaattttaaacccaaattcaatcaaaaacttataaatccatattgtctcacatacagattgtaccatagcccgatatttctggacacaacattttgcttcttactcttccaagagaccaaattaccttcgacaatgacacaataacctgaagtggatcttctatccacattggaagaagcccaatctgcaactgataaatactcaatctgggtgtgtccatgatccttgtaaacaatacctcgttcgggtgcttttttcaagtaacacaaaattttttctaaggctgcctaatgatgaattgttagagatgacataaattgactgacaacactaactgagaaagtaatatttggatgaatcataataagattatttagttttccaactaatctacgatacttcttagggtcttcaaatagttctccatcactcattatgtaaagcccgcttagttnntttggaaattagcagttatttatgtt

SEQ ID NO: 122892 - DNA, 3955 bp, Cannabis sativa
  modified_base (34)..(66): a, c, t, g, unknown or other
aacataaaatgcaatttctgatctttattaattnnnnnnnnnnnnnnnnnnnnnnnnnnnnnnnnntagggcacaaaacccaatagagagaactttgggttactaggattcctaaaaatttcctatattctctctatgaaatccttcatggggtacttaagatgatctaagttcaaaatgtaactatgtaatcccccctggtccatccaagacatgcgatggagggtgggggtacagaatacacaaaagggcctattacctcttctgaaagtgtcggctcccggggcaccctcatctgggtatgctacaacatatctctcaaaaatctcctcctctgtcaagggattggggtggcagagtgcccagttagctttcaggattttatcttccttgacagcctctgtgatgattttggcttagtcaaggctattacctccatagcctcttttgaagtatgactttggccatctccactcatgttgttgatgctctagaaactggtgaacaacctgtgttcatagagaaactttatgatgaccatgctttcaactttcaactgtgcttcagtgaaatacttgtaatgggctgcctttcttgtcatttcctaagttttaaagctccaaggcacatgctttgccaaaaatgaaaagtgaaaaggcccaattagcagtgagactagaaaaatttcgaaagaaggaaaaatagaaatcaagatgtttacctgggatttgtaagattagttggaaggtagcaccctcttcactgggaaaccaatggagaaaaacaagtactctcggagatcatgggagcgtaatgtgtagctgatggggcaatgatcatctgaatacctctctaacttgtaaaagctaacctttttatagttggtgcacatgggatgaggtttcacaccaaaaaagtaagggatttcctccgaggtaggcacatctaactttttgtgcttgcgaaacaagtaacatccggctaggatcttataacttggaggtatcaactggaagggtgctatcccaattcgcataatgaattccacaaaataggttctcaatggaaggtgtgtgccactcgaatgggcccgattgcatctgtgctcatggaagccgatttctctgcgatggatagcttgtgccacattagccctagattgttgcatgattcaacttcggtggtgtacatctccgacatatcgtgagaatggaaattattgattttttgacccatctcccaaatggaggcatttaatacaagtgctggaggtgggattttagctttaccctttcttttggatatcacaactaccctggataaagcaacctctaggatagtctccagggtagtatcttgttgaagttcctaggcaggagtccttaccagaacttcttcagtagccacctcctctgtagcagcagtagttggattttccttaatacccactacctcaagatagaattctttgttcgaatccatctctgggaaaagaagaagaaaagaaaaaataagaaaattgacacctaatatccaaatgacaaaatgggtatcggggaaggccttccctaaaattgcttggagaggtccccgctggacccattactcttagaagtctatcctcgataggcgactcgaagtgacagattaggaacccagaggaataattactagaacagagcctaaacaaattccaaaaatcaagtccattcggagtcctaacaactccaaataggcgtatagaggatggacatcctaaaatttcatcttgcctggttcaaaccctaatttcaaaaccatacgtacgtggaaagttcataaagtttagatggacataccgtaactatttagacaataatagcactcccatgcaagaaattttttgacataatctagtccttgacatgtaaattctaaggacactgttttaccattcccatatattagatatttgagaccttgcttaaactaagcatttctatcctagatacaaaatagaaagattcaacagagcatcgagataattacttggtatgtgagtgtaaaagaaaaggttattgtgaaaattttcctagagctgtgtaccaagtcgatcacgcgattgaaattggcctgagcagcaaagtcctcatcaaacaaggggtggagtagttcaaggtttatcaacattatatctagaaattaagctgagcgaaggttcacgaaatattggattaaataatcaaagacttcttacattcacctctggaaactgtcaccagatctagggttctttctcaaataagggatccggtttgaagtttgaaggaaaatggttcgaaaattccacaacagtgaaaaaaaagaaaaaatgagtctatttatatttcagccaaattcttgcaatttgaaatgaacggtccatatcctctccaaaaagcataattcaatccaatggatgggaagttgaaaagatggcatttaaaacttgctcagggcattcatttttcatcattgcccgtcttgagtaccgtacgcattaaagagggctatttgagttgacctgccattattaaaacttcttccaagagacatggcccctgcacgcatgtgttatcaacagacgcattaaaggcattgcgtgaatgccagaccaatggtacctttagattttggtcctttaattaatgatagattaaaaagtacatttgtgatccctgtagtcaccacgtgtcgaaattctatctctaagagctagaataagactataacctctcgcacctcaaagagtcacagaagcttggggtaaatgttatctgtgtttctaaatcggtgacacgtggcattagaagggagagaaagtcttagaatctcactaattaaactccaccactaaaagccagtagtggagaagccttgttgatccgagaacattttaagactaagagataagcaaaagtctacctcgccttatcttggcttccaaaacaaagaagacatattaccactccaggatttggagtagtccaaactcaaagcctacccaaatgataactggatgtttactcaaagggcctatgacagacactgatcacccaagagtattggggacgtctaccttagatgtaacctggatcgcccaatgacagttattctttttctgatacataattagatcttgtcccttcttgcagaacatggtagtgcacgcacctcacacaccttttttctagacggttattctaggcatctacttttaaagattaaaccttttggcagcacatgttcatggcatattgtggcccctattgtccacctgctttaatgcatgagcataatttcctcgtagggacccaacagttagctcttttttgcatgtattttaccccattagtgggtttttacgcaaaaaccctaggcgggtcatgggcaagtccatagccgcccttagcttataaatatgattccattcccaaacgaagggggatcacaacctaagagctgaaatgctgctcctattattctaagcttttcttttcttcaagagaaactaagaagatagagttatggtttcttgctgaaatactgtaaaaatatcaaatacaccctttgaggctaatagaatgactcatggactaaggttaattaacacctaaactacgtaaaaaatctccatcttatttatttttggattttacaatttctttagctcctaaatatttagttttttggaaatctcaataaacagaaaggaatatacatttgatctcctatattttgaaatatattttatatcatacgtataatctattaaattattaattgtatatataattgttaacacagattttcgttaaccaaatttgagcctaaccatgacaatcttgcacagaaaaataaaggctataaaatagaaagtatgaacacacaagattttttacatgattttgtagttaaaattatgcatagtccacga

SEQ ID NO: 122893 - DNA, 2647 bp, Cannabis sativa
attgaatgtccatggcgttccctccaaaactctgccaatatccacctcgtggaagaactgaaacaagaatcgattagtctccaactccttgacatacatccctttccctggtctccataaagacgccattacatttcttagagagtcaaaatcggccggcctatcagatagcaatttcccgactaaacaccacctcccatcaaattcatcaaccaacacatcctcctgatcaaataagagccccacttcattttcatcctccacttgtagatcagcccactgatgtcccaaatcttccatagttctgctactagacgccataagatcataaacaaccgtaaccgaacgcacaaaagacaattactaactcataaacatgtcacaagacaagacccaaatccaaggacatttgtgaaagagttatgagaatctcagaaaggtgctctctttagttttactgttttaatgtttgttttttaatttctattgcattaatatttctttttaaagttaatgtaatcagacagttttattgttttaatgtttgtttttttttttaaaaaaaaattatggcttaattatgacttcacaatccaagtgataacacacatgacaacactaattatggggaattatgccacgattaactctaataataattgagggaaatttagcaagaaacaaaagaaaaatttaaaaaattaataataataataaaaaaaacacacactgatagaaaaataaccatattgtcacgtgcatataaaagtaggaataacagaaaaaggggttattcagaattacaatgatattctcatcattacttctaagacaacattgattccacctgatttcatttttttttattcgattgatttcttcttttttttcttttgattcgactgatttcatttcggacactaacaactaattaaaaaaaaaaagcttgtctttcaagaatgaaaaaaacgtgtgtaacaacaaatattatttttttttgaaagatgtttattatcaaacaaaagaattacacaagtttcggcaagtccgccattaaaccggcagacgcacaaaggggataatctcccaaccacaacttattacaatttgaaaacatggcctctttggccagcaagtgagcagccatgttattcttcctctttatgtgcttcactgcaacacaatagccaaaagcaggggagtctcgaatgtcatcaagcagcgtgctccagtccgttttggcttgataatcaccattcaaatagctcactgcccgaagacagtcagtttggataatgaacgggtaggccttcaccttggaagcaagatgaatgcccattcttatagccaaaacctccgccaattccaccgtggaagagcccctgttctgcttaatttcagcagccaccacttcacccgtatggttcctgataacagtccccaagccgagtttcgcttctttacaaggaacactagcatgactgttaatgcaatatgtcccggggtgaggaggatcccacccatcatctgatgtgggagtcggcttcagctggttgtcccttatagaattgttatgaagcagaaaatccatttccaattgagcccaccctacaccataacttgttaggaagaagatgaaagttgagtctttttttgttcctccctattccaaatgagccaagagagaatgatgaaaattaaaaaatctgcttcgtttgtttgttgctttatgttcataagcatgtccttagtttcacctcgccactttttgattactttccacatcagaaaatgttgccatatatcagtaactgacgggcagaaccagagcccatgttcgattgtttctacctttgccccacaccagcaacacaacgactctatcttcatgccccgagacctaagaaccatgttaacctgcagccagccattacagatacgccacacaaaatttcaaactttaggagggatctccaacttccaaatctcgttccaccatttcctagtgatctcatccgaggacggacctgcttttatctcactgaatgtagccactttataaccactactcaccgtgtatataccgtttggggtgtagtgccaaactaaatcatcattagcattattaaagcaaggggccatacctagaataagggggacatcatccgggtggaaggtttgatctattatatcttgtctccaataaccttctgtatcgttcatttgatccaaagtggccccatgattaacttttgctggagtgcgaagcgaaagtggatggacggagcagccatttgtcttcattaatgcgcacccctctacccgatggaaccctccaacgaacacccttttcaattattttccgaccccataagatgcttcgccacataaaggaactaaatcctccaagtttagcttataagaatgtagagttggtgtagtaacatgctttgagaacacgggccaacaatgaattgggatggtttataatcttccacccttgcttcgctaataaggattggttgaatttcttcaagtttttgaaccccattcctcctttatcctttggtttgcaaactttgtcccaattcccccaatgtattttattcttagtctctgaagaaccccaccaaaatcttgccatcat

SEQ ID NO: 122894 - DNA, 1255 bp, Cannabis sativa
tctccaaaacatatacactcttcaggagtcactattatgtttatcaaactttatatttcttcaggaatcactatcatcaattcaatgatgtgtataatttaacagggggaggaatacatcatctgcatttgtattgttactggtattgtattatgtaatattttaaaaggtttgtgaaatatgaaaattttctattttacgggtgtgataatgcttgatttggaataattttaatgagttattagatttaaatacgaaaatatgttatttttattaatttcaatttatattatttttaatgaaaattaatatttttatattcatttaatatgtaaaattaaaatatatatatacaaaaaaaagtaattaatgttcagtattgcttgacttgaggtataataatattaaattattatgcttcacgtctagcaatgttggacatcataaaatttcaaatgtgtggccactttcacgtccaacattgttggacatgaacaatatatcatgtccagcgtagctcaacatgaaaaatatattttaattttcatgtccatggatatcatgtccagtaccaaaaataacatgaaagagttttcatgtcaaactttaatggccatagaagagattttttgtagtagtctaagttgcattcaatgatttgagaaagggatttcacatacacacacttagagtaatcaaaattggagggagacatgctcttgaatttattgcaatctttggacaatttatgtattttacattaagctatgttcacccatcaatctttgaagaatatttataaatcaccaactttagtgtcatattctctcttgtctcatattgatttgatttattttgtttttgtttgaggaaaaagagaggatatgacactaaagttgataaacaacacgttgataaaagatgttagttcatatcaatccaatcattcataatcaaattatatatagtacctttacaaaatgtctattcatatgtgatccgaatcaaaatcacacgcactagagtatagtgcttagtaaattgtactttgtaatttcatattaaagattccatactttagtacactactgacttaattctcttgtcctaccttacaagatcatttctactctatattaatatggaatttcatacatttattaattatatttctataattaatatatttatttatcttatacttacatttcatatattctctaatattattcattaaatacttacttataaggca

SEQ ID NO: 122895 - DNA, 941 bp, Cannabis sativa
attaacttttgcaaaacacgaggtctaaactagtatttgccctatattaatttagctcaaatatacctatctatatttataatttctcaactcgacacaactcataagaatactctcagaacaaagttgaagtattgaatctctgtacgataagagaggatgaaaataacattatcaccatcactagagactattcgagaaaagttaaaaggttctagtggtgcctaacaccctattcgatgtcatatcattataagtgtaattaagtataaagtctcatataacttaagatagcaatttttaagaaatattgctaattaatcgtaagttattaactctaaatgatattaggtactactggtgcttaacacctccttacgtgttaatatcgttattagtgtaattaagtatcaaattctatataatttaatttaataacttttaaagagtattactaatcaattgtaagacgacatatctaaaaagtactaaacactactagtacctagtaagaatgcttacaatttttgcatatgtgtaaatatttacaaatatacaaattatggctaataaatgtcgaaccctaactttatgagcattattacgaaacactataatacctaatacctttataaagtatcatcctaaaaatagttaataattttttttctataaatattattaaaataaaaataaatagatcctaatattaaattacaccattaatataattacatctcaaaaggatgtttaccaattctctaactatatttataaagataagactcaatctatcttatcacaagaagatttacatttacatgtcacctctaagaaaatagtaacaaattcacaaagtgataataataacaaaattttgcaacaacttgctctagtggagtacataatttttgttttacttatttatttattttttattt

SEQ ID NO: 122896 - DNA, 854 bp, Cannabis sativa
  modified_base (816)..(821): a, c, t, g, unknown or other
tcatataaaatcacatatattaaattatataataatataatttcctcaattatacataattatctagttagggttttgctaatccatttcataattccgggtattacagaaggcatctgccatgatagatccatatgcccaaaggtctccagtgcctctgggggagaaatgcctagccctcttatcttcccttatgggttgggggtcggtactggatagttttaatgcttctcctgcctttaaaaatgccaagccttccctaaaaccctcaacgtccgagggaagcatgggtttcctctactgggtcacaacattaatcgaaatgggcaattaagttgttccactgcttccacctccaatgtctagatgtgtctttgaggtgttcgtaattatgagttgaacaactgaagggtcaactttagggttgtcctcttgagtgccaaaagttttagaggcaccagaagtattggccttcttggcgctagccttcttctgcctctttttaccatcgaccacagcatcgaccttatgaatggcactcatcaagtcggtcaacatcttggactcgagtgtttttgaaagatcaaaacacacaaacaacctaataataaaaaaaaaatagaaaatagtagcccaacaagtattaaataacacagactaaaataacagtgatgcaatgtgaatgcaatcatggaatgagtaactatatggttcccctcttgcaaacaaggttacgtgaccaatgaagttatcgtgtttcctgaagcttgcgaagagcattgtaagaaggggatcctgtaacaccctaactaacannnnnntattacgtgatttttaaacatattgtgcagctc

SEQ ID NO: 122897 - DNA, 1743 bp, Cannabis sativa
  modified_base (1228)..(1238): a, c, t, g, unknown or other
aataaactaaaaaaaaacacacacacaattttaaacataaatttacacaaaaaataacctaaaaatactatataaacccaaatgaaaactaaaataaataaatactaaaataattaaaatagagattaccttcaccgggaatatgcagaaagggcagcggcggcggcgggtggccagaggtgagtggggttggtgaaaattttagagggggaaaatgtttagaataaaaatgagaaaaaaatgaaaaaaaaaacaacaaacaaatgaaaactatgggtggtgcttggttcaaataccacaaaatggtgatatttgagaggaaataggggcggccgacggtgagtgttcggagaagatgcagagagaatggagaaggaggaaagagaagaaaagagaaaaaatgggagaaaggggtgcgtcccaacctttattcagcctagacttttgccggcgcacggcgcaatttggtgcgccggcaaaagtctaagttgagtgaaaaattaaatgaaacgctacgtttcatttaagtttgtacttttgccggcgcaatcgggtgcgccggcaaaagtttcccacgttttcacttgggcaggaagttgaccgccaatttttttggcgcttttgccgacgcgtttatgcaccgataaaagtgaaaaactgatgcaacgtgtcgcacaacttttgctggcggaattaatgtcgccggcaaaagtcccacctacttttgcgcgcacgttttttcactgcgagggaaaatggaccgcctttttttcctcgacttttaccagcgcagtttggcaccgacaaaagtaaatattaattaaataataaatgaatagttttgccggcgcgttgtcatgcgccggtaaaaggttgccaacaattctcaccttttggcggtttggtgccaacctttgccggcgcaattagtgcacttcgccggcataattgactattgccggcgagattaagcgccgggaaagagtggaggtggaaaaaaaagttgaccatctttgccgacgcatatgttgacttgcgtcggcatcgcataacttttaccggcgtaattacttaatagcgccggcaaaagtcgacattcttgtagtgatttattaacttgttaatacttggactaattttacaatatttgtgcaatatataattgtaatttattaattacttctatgaaatgaaattagctaggtatattggctaatcataaaattannnnnnnnnnnatttaatttaccttttaaaaaaataaatatttaatgtaaatttaatttaaataatataatatataaattcataaatacataatttaaataaattaaattaaattaattgaaaaaaataattattatagatttgcgtcagtttttagggtatatagcgtcggttatatgggtatatggcgtcgattaatagtatataaccaacgccatatgtatcctatggcgtcggttactttaaaagaactgacgacatagggtacgatttagcgacggttgtaatttagactctacaacgttatttggatcagggtgggtagcgaatttcaccaaaattgaagctgaaaggcctttaaaaccacctctaaagcccaaatttgtagtagtatgaagaaagctctctttcttgtagtgtaagggctagcgagtcttatattgtttttaatataataatatgtagattaaaatatggtaatatatattattgttatgtgaataatatatattaagt

SEQ ID NO: 122898 - DNA, 723 bp, Cannabis sativa
gagagagagagagagagacccttgcttcacagaatctgcaattggcactgggaaaagaggctcaacatcccagttacgcgtgtaaagtgtaccatcagccctggcattggtgatcatctagaaaatgggtgaataacattaattaatagtagcacattcatatgcttgtctactgacaaggatactataaacatatagtgcaagtatgaactatttgtgcttgtacatatgcctgtctgaattagacatatttatacagaccaagacatagatcaatgggattcatttctgcaattattataaatttataagcttacctctttcatgaccgcctcacaagctgtcatttgtttatcatctttacatcgagccaaagccctctcaacataaccacgtagggacttgggaaacatattaggctacaaagcaagtaactaaaaacgttaactgctgcaactaaccattaaatcgctaaccatattattttggaatcacttcgacatgatattatgacatcaaagttggcatcagtctagcagtacaaacaatccatatgtagcacaaggttagcaagaacttaacagaataattagtgtcacaagccacagaaaattaacaggatcatggtgacctaattcaagcaactaacttttacggatttagttacggatttagttcattaaaaaaaaaaaaaaaaaagattccactgtccttatttgagta

SEQ ID NO: 122899 - DNA, 930 bp, Cannabis sativa
ttttaataactatgcatttataaattagcatggaatttcaaatttccctatgaaatttaagttaatattttagtaacttattaatgctttggaggcttcaaagtaacatattacaacatctctaacttagtacgcaacatctatagttgttaacagtataatattatttgaaaaggtaatttacggttaaactctctgaactttgaaatcgggcacgatatcaacccttagattggaaaaattagggctcaacttctcaatcttcacaatcgttttgtttaatactcctgatatggtgtatagaaattacacgtgacatgattttattggtccacttaatattaataattaaaaaataaattaaaatttaaaaaaaaaataattacaaatatttttttcttttttctttaattgaaaatcctaaaaccaaactcatctttttctctctctttctctcctgataatctctctctttctatctgcttgtgcggcatcaacgatgaatggactaggagtaccgtgctctggtcctcctttcatcctttttcccaaaatccaaaaccccaaaaaccctgacactctatggacttaaatgccttaacccctaaatgccatcgatcccctgcaaaccaaaatgttgtcgaccccctgcgaacccaaacaggtcgacccttggaacccaaacgttgtcgatctcttgcaaacccgaactcgtcgtgcccctgtcaaataaaagacactaaagaattctttgtaatgggttttggatttcaaattttggttatttgttctctgggtggtggtctcgtcaggatcaaaagagagatgatagagagaaggaaaagagagatgtggtctggccaagattgggtttggctggggtggtgttgggtttcgagattggggttgtgttgggaatattttactagg

SEQ ID NO: 122900 - DNA, 1389 bp, Cannabis sativa
  modified_base (933)..(933): a, c, t, g, unknown or other
cagtgatgaataaccttgtaatacacaatcagcaatgcattgcctcataatacatacttagcgatgcatctactcatattaaatagcagtgatgaatcatcttgtaataaacaatgatgcattgtctcgtattacacaacaacaatgcatcgccttgtaatacagtcagtgattaataaactcgtattacacagcagtgatgaatcacctcgtattacacagcagtgatgaatcacctcatattacacatcagtgatgaatcaccttgtaatacacaatcaacaatgcattgcctcgtaatacatactcagcgatgcatctcctcgtattacacaacagtgatgaattaccttataatacacaattaacaatgcattgcctcgtaatacatactcggtgatgcatctcctcgtattacacaacagtgatgaattacctcgtaataaacagtcagtgatgcattgtctcgtatcacacagtagcaatgcatcttctcgtaatacacagtcagcaatatgctgccttgtattaaataacagtaatgcatcatctcgtacacacaacaatacatctgctgataaataacatggtctaaccaagtcaaagatcacttgaaagactacttctttgtatattaaatatacacaattatttatacttttctaatgttcagttatatgtgaaacatgagcattaaacaccatcaattgtaacttttcactaagataaggttgagtaactaccatcctattcctataaataagggttgacttgaaggaaaaaattaagagaaattctgagttacagaaactttgccaaattataaacacaaccaaaattcataaataatattgaatcgtagagtatgtaaatttaactacaaaactacgtaaaaatatagcgttcgtttattatttttgtctcttcttttcntgattttattcttgaattaataatctgcttagattaagttgatgaaaaattgtgtcaacagtttagtactttcattgagagaatgaagtttcaagagactcaaaaggaagagattcaaattcattatcttcacaatctcaactataaaatttgttaaaattgtgagtctagtaagatcatctctaactaatcatcgttaaagtatgcatgaaaattttaaaatttctaactagtttacataacattataaatatatatgtgaagtttatataagtcttgagccaccaaaaggacatacataaaatatatacacatattcatatatatatatatgagagagaaatattgtatatattcatatatttatatacctatgtgttggaaattattttattagaatttagatttactaacatgtatgccgattacaatctataaactaacaccctaaatatg

SEQ ID NO: 122901 - DNA, 1536 bp, Cannabis sativa
  modified_base (52)..(58): a, c, t, g, unknown or other
  modified_base (450)..(457): a, c, t, g, unknown or other
tcagatcaaatacctccctcatctgacggctgccgtacatcacggattacannnnnnnaaagtacaataacaggacaaaatcatatccctatatttatatgagtacaatcttaacggatattatccatgaatagatagatttaaatatttaagcttaatttttttttttatctaattagtttaatctctcatttttacattatataagttagggttgttccatcaactcgaaaaaatattaagaaaaaaagttttttagcaaaaaaaaaaaagattaaaaaaaattgagtttgacttaaatattttgtatctaaatatatttttgatacagtgtaaaaaaagatatttttgatattattttaattaagtagctaaactaagcataagtattaaagtttctgttttattatttgttattggatcaaaatctaataatttaatatttttaannnnnnnntttatagttaaatttatttagtaagcataaatgagtaatacccattaagaagtgttccatatatatataacacttctcaattagatagtgattaaataaatttaattataaatattgattttaaaatattaaactaaattttgatccaataacaaataatataaaaaaaatttgaatttttatacttaatttagctacttaattataaaaatatataaatatataaatatatctttttttacactatataatatgtttacatataaaatatttaagtcaaactcaatttttttgattttttttgtcaattttttttcttaacttttttttcaaccgatagaacaagccaatcttatataatgtaaaaatgagatttttttttctaattaaataaaacaattatataaaaatttaattttttctaatattatccattcaagggtaatactcattaaaattgctctcatatatttatatatttattgatatataatgcttaacaattacccaccaacgatttatttatttatgaataaattgaaattttttctcacaactaagactcctgtaaatctttttacttcaatttttttatttatttttttttttttaaaaaaattacaattgcactataaaaatctttgcaaatgtcccatttttgttacgtttggttcattcttaaaactatttgctaacatttttcgactttgacactcctgctaccgttattctgtttttctccctattaccttgaaagtagctgttttaacttcagccacttgaattttcaatatttcttttttatttctcatcaaatgaaggatatattcttctaaaaattctaacaattcttaacatgatattagaaaatagcattgctattactcaaacaaacatacatgtatgcttatgtatgggttcataaattagatatgtaattaaaagaataattcttagagacttaaatgatggatatataaacatgataatttatatgttgttattaataattatgtggatgtccaaatcttttatttattaccatgaattgtaatcaacattcctcttttccttagttt

SEQ ID NO: 122902 - DNA, 999 bp, Cannabis sativa
aaactttcactgaattcgtataatagttagtcaaaaatagtattctttctgctatactataagagcacaaattttgatgttagagcattgacccacgtcttattataccgaaaaattaaattggaatgagtttatcgattgataattctagctgagtcgtggaatatgtcaccctcgttaagacgttttgtggctatgctcaaagtgtgcacgacagtcaatcaaccacaacgtcctcatgacaaaatagtcaccatttacgaatcgttcttccccgaacaatatcactctattataccccaaacccaagatgttagaaaaatcatgattttaaggagattttttttctatatataaaagatatattttgttatgcaacttaaatagaaattaagttccatataaaatatatagaagttaagtcgatcaaaaaagaacgatcaaaagaacgttaatacaatctgagaggattgtgggttaccgcagtttaaacagatcacatttaatgttttggtagaaaaaatgtgttaaataattaattaataactatataatatttatttttatcaataattttccagtaaaaaattaaagtgataccacactaattgctcgctcaacacagctcgagtcgatcaaatggtggaggtggcaccgcgtgggtgtggtgcttcagtgtgtgaattctctcacccatgcacacaaaactggatgatctttagggtcgaacctagatctcatatttgcatcttatacacacttttgaataagtatttctatcctatatgaaattctttgtaatatcacatacttcaatttttttatttttgtaaaattgaacaaaagttctaagagggtcaaatatgtgtagtgtccgatcaaggctacgtcttacagtgataattttgatttatgaacctaattataaacataggtggcgtttgggaacacttttttaatcagttttctgtttttaaaagtgaaaaagtgaaaatattt

SEQ ID NO: 122903 - DNA, 1217 bp, Cannabis sativa
gtatttattatctttattttctgttaggggagatagtattatagcccgaccccaggctttttactatttatattttagacaacttatactgtaagtttatatctattttacttttcttatgtctggcctgtctgcacgtattttatgccttagtaccccctaagtgacataaaaaggaacttggtcacttagcttaaatttatgtaggataatacatatactttatccgccatatgttaacttacagagtaaagatgaattaaaatactgatctcctaactattggtagtatttttggaggtggtcagcactccaagctctaggtactatggatccatccattctccttaacttataagtcccagagtctatttcatcttcaattttatatgggtcttcccaatttggtccaagtaccccactcctggctcttgggaagccgggaaaccccttcttaggactaggtcacccacgaaaaacatcctgcttttgactttggaattaaaatattttgccactttcttttggtatgctgccatgcgtatttgagattcctctcggagctcatctagtaagtccagcacttcttgcagcaaagcctgattcgttattggatcgtaagtggttctcctgtgggagggaattatggcttctactgggaccatggctttgcactcgtactcccttgagaatggggagtggtcggttgtggttcttgtagtggttcggtaggcccataatacatgcagtagttcttcaggtcaactatttttttcaagccaagagttttttcttaagggtgaccttgagtatcttattgacagcttctgcctgtccatttgtttgtggcctcgcgactgcggagaaagttttgataactccatgttggtcgcaaaaatttgtgaactcatcacagtcaaattgctttctattgtttgagactattttgagaggcagtacgatgttctttatgataaagtccatggctttcttggcagttatggtcttcataggttcagtctctgtccactttgtgtaatagtccactgctaccatggtatatttcaccccaccatttcccatgggtagggacccaatgggatctatttcccacaccgcaaatggccatgggctagtcattaaagtaatttcattggttggggctcttgggatatttgcaaacctctggcagtgatcacacctaaggacgtagtcta

SEQ ID NO: 122904 - DNA, 1051 bp, Cannabis sativa
tgatagcaatgctcattattataccttcttgttcttctactttttctaattgttcacagtgataggttaataggagtatctaatctattttattctatatttctagctagaaacacacaaaaaattattctagccaagagaagttaaatggtaaggaacactttcttaatgtccatagcaacttctcctttacgagtttcatgagttaacttagttataagtttacagcataagttgtgcaccattataaatgttgtatatacatacattctgtttatagcagcaataaggatatcttacattatgtgattgtgaaaatctaatgcagaagtgtttttgaattttccattaacagaactaaattttctttcctaatttataaagtctataacgaaaataaatgtggttgattttctttctattctataatatcatggtctcttctctattcaagggaagtccaaaaattgtgtattaggtttaatctagctagaggagtaccgtcgtcgcatgaaaaggaacaatgctgttgaagcagccaccgcatatgggaatacagtccaaattccctatttgattacaaaacacaagtcagatatctccacataattgaaacttttatggacatggttttagctttttattagataagttatattttcataccacaaccgttgcaacagtagcaagcgcaaacaaaggccgctctctcatcaagaatcctatccccagctgtgctcgaaagagaagaaatggttgttagttctcaattcatgacaaagagtaaatgcacaatgacagaacataagagtaaaaaactgtctgcaattgaatttcaatgatccttctcggttttgaactctaatgatgtattattcttttgtgacagtcagtagttccgtgatccgtaaaaaaaatattgggtaacttgtgcaatcctacatggcaagtgtgcttgacctagggtaatttaaggatgggtgacctcctgagaaattttctcaggaagtatgcgagtgaggacaaagcacgctggaatttgtgttggttt

SEQ ID NO: 122905 - DNA, 594 bp, Cannabis sativa
atatatatatatattatattgtataacttagtattcgatagatctcaggactctcgagacaccctctccctcatattctatgctcacttaagctagccttaagtggtttaacaccttttattatagctattaatataaaaaagtatagggtgtcatataatgtcccgtataatttaatatattaacttttagaatatcgctaaccaatttcaagtgccaccactataaggtggctccctataattggttaacagctttctataacttttattaaaataaaataagtagaatctgatattaaattgtactaatatcaatattatacgtgctaagtttcataggtgcccttttaacatttctaaaaaacatacttatttaatataccaaaaaaaaaaagattccaacaagtaactgatttgtatagagttgtgtactaatttaaaaaattagagttcttcgttcctaattttatatctacaggaggtttccttattcttcggtcatcaggcccgtcgggattgtgttttgctattgtgattcaatttttgctactatgattagtcttgtgtttgtgacatgtttttgattgtttta

SEQ ID NO: 122906 - DNA, 1288 bp, Cannabis sativa
ttttttttttttttttctgaaacacaatatttttataattttgaaactttaaatataatatttttataattttttttttttgagtaaatatttttataaaattagtacaatgaaaatataaaagactctgtatcacagtatttttataaactttatgttattttatagtatttttataaatttcccaaatatgtgattgatactatagggacgtcgcttacaaggaaatgataataaaatgatttatactttattttgttgttggtgaccacatgaggtggtccatgcaaatgtttggccaatttttattaaatttttgcatgtgattattggtcttatattaattatctcatgactcttgtggttatatattcttaaaaaaaaagctgcacaatatttaaaagttgtttttactagactttaattgaggccagcacataataataacaaaaaaccatttctctgtaaagtggaaacgtggctccattgatttctggataaaaattgctaaagggtaatggtacctaatatttttttctagtgttatttctttattggtataattaagtatcagattttatataatttaaaaaataatttttttttaatggatagctcttgcaaaaatgtcatgttagataaaaaaaacccctcatttcaatgataataatttttttaaaaaggactccctcactattaaatttgattacgcacacgtaataataataataataataataataataataaaagtaatttatagtataaatatttaaatataacttttagtaataaataaatatttaagtttaattttttacgataataatagttaagttatatttttgaaactctgtaagtagctaacagttaaatgttaagtcattatatccacatgttattttcttattgctatatttaaactaattttttttttaaaaaataataaaaattaaatgacgtggatcaatcaggatttgttacgtgacaatttacttaacattttaacaattaggtacctgcagaagttacagaattataatttatgtattattactgtcaaaaattaaatttaattatttacttacaatcaataattaaatttaaatatttgtaccacaaattactttaataataattagagcacattgataactaatccacgtcgatagagattcccatcccttgtgtaattttattaagagcattgttattaagcaccagtagtgcttagcactttctcgacatcccttgtgtaattttattaagagcattgttattaggcacc

SEQ ID NO: 122907 - DNA, 1389 bp, Cannabis sativa
tttcatatcatacctttttttggattcgagggggagctccagatctgtttaatacagatttacattgcttgaatttggattttctaggctggattgagtaattttgaacgattaaaagcgaaatcaaatgtttaatttcagtttcttcacggtttttctggtttttttttcgtaattttctatttagatcattggagttcttcttttccaatcaaattttgccagaatttatggttgttctacccttgttctggtttcattctggttgcgttgcagattggatcgatggaggtttcttcatcgtctctgttcgtgacgtgcggcttaaggtatagactatgtggtatttttgtaattttttcaatgtgggctgtataaatgttgattgggctggcccatagtaatattgtaatattttaccctttttggaatttttctttttttttccccaaaaatataaggattatattaaaaaactaacgtcatgctcatcatattacatcgtattgtaacactaaagaattaattcatactttgcgcgatattagacaatatttattattcattcaaatttctaattttttatactgattaatcagtgatataatataaaatatattattgtattgtgaagattattataatttgtatgtctacatatttggttgggtgtgcaactaaaatctcacattagctagatatgggaaaaattgtagatatataaagatagacactatctgtattggtatgagacattttggaaagatgcccaagaacaaaactatgagggtttaggtctaaagcggacaatatcatgccaagagtggagatggatggtgtatggtgttcaataaatagaattagagtcgggtcacaatgttagccatttaatgaatccaatcctcagaatgtcaaacaaagataatgagcctcgatgtactctttgggaaaggtttaggcccaaagcggataatatcatacaagagtggagatggatggtgtccaacctccaacatatatttaaatgtgcataattttagcaataaattcaacaattttaatagtattttctattctttctaaaatgaaagatttgtcaatatggttacaagttctttcatccggaaaggaagctatgaatcagaaaagtacatacgggaagcttggtgtggatccgaaaaagtcttgggagaagactttgtagaatccagaaggtgttttcatgtaagcttgtactgcatatgattgtcactccagatagcttattatttgtccagagattaggggtgtgcataaattgatccaatccaatgagaactgaccgatcgaattacaaccgaccgccaaacattggatatccaattatgatcggatcagattggatgttat

SEQ ID NO: 122908 - DNA, 733 bp, Cannabis sativa
  modified_base (45)..(67): a, c, t, g, unknown or other
aaatattatcgaaaattgagctcagggtcctatttgtacaatttnnnnnnnnnnnnnnnnnnnnnnntcatttaacaaaactgagagtccaattagtatcttttacaaaacacagggtccaaaatggtatttaccctttgttgggtgaaattatttttaattgtattaatgtgtggttttaatagtttggctgctgaggtatttttttttttttatatatataagaaaatcattttattaaacctcaaactcagttaccaaaatagataacaaatgagtaaggacattccccaaattgaacttacaatcaagaaaaaaaaaaggaggctctagcaagcttatgagccaccaaattagcttatcatttaataaacaaaatagacacattttgtaactccaccattaatttttgacaattttcaatgccatgccaaataaagaacaccatctgacattactacggattgcttgaattactactagacaatccgattccaagaagacctgctgccaccctttggatttaatccaacttaaagcttcttgtatccttcaaccaaaagactcctcgcatctcgagctacaatcccatatccaaaacaattatccttaacaaataatgttgcatcaacatttaccttaggctaattagaatttttaccccctaaactttaacatgtaccaaatcatgccccctgaatttctaaggttgttaaaaatgacccctgaacta

SEQ ID NO: 122909 - DNA, 659 bp, Cannabis sativa
taacactaaatttgaatttccttaattaaccatataaagaaagaaataaaatataaaatacaaaaccctaaacttgatcattgagatatgtgcctatatttgttgtgttgaattagaaaaaagcatgattaataagcttaaaaaaaagaaagacaatttagtggaacaaaataagggttttgtttgtgggttaacgagaatatgccctactgaagagactgacaagcaaagagagaaaagtagtctttattatgcctcgtaactccctacttcctctcttttccatattatattgaaacttttgaggtcccatccttaaatatatttttatgtatatacaacaaaaccaaaccaaacccaacccaacccttctttcattgtttcattttattttaacaccccaaaacatctatgtctagggatgtaaacggggcggggcgggtgcggggattgctcctccactcctatacccgcttcttaaattcaccccatacccgttccaatacccatttaaattaaaacggggtgggacgggtattacccgacgagagaaaggatctttattgagtacccattacatatatatttttgaaaaaaaaaaaatgatgtcttaaagagaattaaaaaaaataatcaaaaaaacttagtaaaacaataaa

SEQ ID NO: 122910 - DNA, 1253 bp, Cannabis sativa
atttataaggtaagaatccgaatatgaatgcacaacaatcttaccataaaaggaaaaattattttatcaactaacttgccaaaaactgactttacagaatgaaatttagatttgcttaaatgttcattttactcatactgatgtcgaatggatacttacaatacaataccactgcatttcttcccatcacaagatcgattgatttggcacaatactattgctggtatttatactgccaactaaagtcttcacttagttgttgatttagatgaagctaataactaccctccctctacaaattatagagattggtaaaaatccttctagaataaaaattttcgacaaaagatagagatttttgtatggagggttatccaaagtgcattacctgtggctgctgctctccatcgtaagaagataattaattcagctgtgtgcatggaaattaattgggcatgccttatttagttgtagatatgcaatgtttgtttggaaacaatcaaaattcactgttgacttcaacagagctcaaaatatgtgtataatggtgattatttgattaatttgtcatctctacattctaaatctgatatggagttgattatttgcctcatgtgcaatttcgaacggaatgaaatcaagttttttatggaggcacaaggcaagatagtgcttatgtggttaatttttctatcacttatatggatccttttctaactactcaagcaagtaaaataaaccaattgagattatccaaaatccaccccatcattatggacccctagaggggatcccacgagaccatctgactcacaaggtctaaaagtgaacgtggatgctccaataaatcatgaaacaaaagtttttttttttatgttggcacaataattagaaattgttataccgaaattaaaaacaatgaaactggaaggaattaccgatagaaaattttggctgagtcgcaaacaatgtctctttcttctagacatttcgtgcctctgcccgaagtgtgcacaatagtctagcaaccacggcgaccccaggataaaaaagcctctgtatacgtacgatatgttctggaccgaactatatcgctatattacaccctaaattttgctttgagaaaaatcataaggaagacagaaatttttttttgatgttgaaaaagattctattattctgatacgacttatatagggaagtcgatctaagaacaaatcgtaatattatcgtggaggaggagttggatcatg

SEQ ID NO: 122911 - DNA, 1415 bp, Cannabis sativa
actctatacataaggaacttcttattatcattagtaaaatttctccttatgttcatccattaggaattttatcaatggcaaatgctggaccagacagtaatggatcccaattcttcattaccactgtgaagaccaactggtaagtggtgattatatgttgataattttgtttgaacatcttcattttcatgacatagcttagaagtttgtagcttcttgtttgttgcagtagtgtaggaaaagttcgttcttctctgaacaaaatagtggtattttcggcagtagcaccaaatatttgttaatagttgcatttaaatgccaattcaatttttctgacgacaataatatcaaatatttgcaaaatattaacactttaagtaccgattcataagagaaaattcaagttcctgtcccccccccccaaatataaaaagaaggctaatttgctccctaaattttttttttgctaaagaaaaagacttcattaaacaggaaccaagagtttagtgagcacatggggactcacttcctaaaaattaagcaaaccattacaactttttaggccattaagaatttctcccgaactacttagattgttagattcaatgtttaaaattgcggatttaagcctcgtggcgtttttttttctgtgaggcgaggcgtaaacctcaaggcgcattgaggcgtaagcctcaattaatgaattaaaataatattttgagtaactaaaaataagaagaaaagcagcagcaatttcttttttctttctttgactgtgcaattgagaagatgaaggagggagtgtctcagggctactaagcctaagaaatatagttgtgttttagtttttagttgggctttttttagttatttgtttgagttttattgggtttttttttttttttttttgtgttttaatgagcccttttcttaagttaaatgttattgggctttcttccaagttgttgattgaaaatgggctaaaaaaaccctaaaatcttgttttttctgaggtgtgcgcctcaccgttttttatgcctcagaccatttttcaccgcctcacacatctgaggcgtacgcctctcgtctcttccaaataatgagacacatgcaatagtgcgtttttttttttcacttcaaaatgaggcgcgcaatagaaacacaattttaaacattggttaaatttaaggacttctgtctaatttcatccaatttgactatcacacgtttgacgtggatgaaagtttatgagacacaatttgttatattttaaagttcgggggctttggatacatatcaaagttcggggagcttgatttgatacatggacaatctgtacattaataaaattgaatgtaattgaacagaagtccttgaattcaataatctcaaatctcaatagttcgggaaaaatt

SEQ ID NO: 122912 - DNA, 2500 bp, Cannabis sativa
gagttatgctggtttgaagaggttgcagcaccgattgttgaagtcttctcgggaatgtcctaatgtgattctgatcacgtttttaaaaataaaaaataaataaattttaatagatatagaaaaattatataaatatttggtatttatggcatggcaatgtgaacaaaatgtgtgcaatatttctcttttcttatattgagttacgctaggttagttgatggtcactttactaatttacacaattttaatttttggttctctatgtggagagtgactctggtcttaagtcttcctaaatttgtaggcgaagtaagctggtgtgcttagtgttgtgttcttgtcgagtgctgatcttgtgagtttgctttctttgtaagcatgatcaaagaaatagaaaagattatttcgttaacaggtggtctaaatgtagaagtggaagatgagtgggaatctaatgaacaggtgaccttgaaattcaaggagggatctctagtgggcagagttttagcaaggagacattgcactactaacttcttcacgtctatcttcgctaggatttgggagaaggaggttggatgggtagtggatatattagctaaagagaaaggatgtacgatggttgggctatgataaaatacttactgaaaaggtgtacaagaaatctacttggattgttcatggtggcatattgataacagagaaatggccttccaatggcaactaaaaagatgccaacttaaatacggttgagtgctggatcaagatgaagggtttcccccctaatgctttgactctcaataacgttaaaagattgagtaatatggcatgggaaattacggagattcaatggtaaatactaacgtgttgttaatgagggacacggtgagagtgaaaattaagttcccaactaataggaaacttttgttggaagatatatccctaataatggtagctaggtttggattcaattcaagtttgaaatcctccccttgttatgttttaaatgtggtcactttggccatgaacaaatggattgtaagatggagttggtaaaaacaaagcatagctcaggagtgatggtgccatactatggaagctggttaaaggatgagagtagaatcaccaattgctttgagaccttgctagtcccaagtctcagtcgtcaccgatgggaggaggaagtcaacaaaggtgttcaaatgcttccgaccaagtgtaatagtgtcgatcaccttattatcccgtaggtattggatggagggaaagagagtcagatttctgggggaggtacaaagatgaaaacagctagagaagagaaaggtggtgggtctcaagatagctacgaaggcaagatatctttgggagaaaacatatccaaagtgaagtcaaccttaaacactttgaaagtttcagaggagaatggagacaaaaggaatactggtgatgtggatcctagtttaaataagggtggacacgtggacaatgtgaatttgagccacttaaatataggtgaggtggatggcttggaacgacttgtcgttgagatgagagaagtgggtattacaacattagatttgggtcttcaatctaattttgaatccaaattgaatgtatctaataatattacactacatcagatctctccctcctctagaaaaataaaggggatgggggctaagagaggggaaaggtgcaaagctagttgatagtattcatagtgctagaagagattagaaatctaccaaggacctatccaagaaggggtagacagaagaaagaaatgcaacaagcaatgtggagattgatgttgaactagagggaaagagggccaatcgtgagattgaaatcgcgaacgccattatggttcaggagtttcgaattccaaaagttggggaaggctttgcagagggttggaacaaagaaaagaaacggacagggaatggtgcaaaaggtcgaaagatcaaatttgtaaaagaattggctagagatagagctcaacaattgggtactaatttgggcgaagcttatcaagtttgtactaaagatggagttttggggatggctgagacggatatttcagggagtgaggatttatctgccttgagtgtagaagatggagcggcggaccttgaggctcaaggtcgtcgatcaaaatgataattatatggtggaatgtctagggtctcggcaactttgagacattaaatgcacttcatttgagaattttggagtgcaagacaaatttggtctttatttcaaaatctaagctaatgaactcttaagcggagatggtgacgcaaaggttgggttttgacaatttttgtctagtggagcaggttggtcttagtggtggtttaatgttgttgtgggaagctgattttaaggtaacaattctttctcattctagattccatattcatactgtggtcagtgacttgaatttaatgattttcaactttactagggtgtatgtgttggaaattattttaccagaatctta

SEQ ID NO: 122913 - DNA, 5644 bp, Cannabis sativa
  modified_base (40)..(65): a, c, t, g, unknown or other
  modified_base (4698)..(4702): a, c, t, g, unknown or other
agagacaactttttagtacatgtgactccaaggtgacgannnnnnnnnnnnnnnnnnnnnnnnnnttttggtgtgcctgaccaataagcgacattatctcgaatcttatcaatgctataagcgataacagacaaaccacctctaacaattaaattcaaaatatgtgcacaaaaatccatgtgaagcagctctccattcaaaataaagcaactaggaggaggtacatgacttgttctgtccacctagattgtcccttgggtcgctatgacgccaatggtaagccactgaacaggctcggtgacccttcaaagcttggactggatcatgccctagagaagtcttctaagctagagatactagaggcgagatcacagggagacagttgggtctctcctacttctactcttttcgatgaggcctttagcgagattcttgctagcagcttagaaggggatgtcgaccgtgagaatccccgtaggaatatcgggtggacaggctccctctgggttggttggcatgatctaaaggccacattgagcatggggcagtgttaatgcttcatcaatattttctagacatcacggcttactttgagatgtgtccgacacagctcacgtcaaaaagtaacaagtatcttttggtgatgttcttctttttagcacggtagaggctggtcagccatgaggcttgttgcatgtggttggccagccttggatgttattttttggggctgcccggccatagcagtcccaaggggggacttgtcggccagtgttgtggttttgacactgatgttatttagttttgttttcaggctttgatgacgctaagatcagtccgcgatggctcttggggaaccttgagtactctttaggagtgggtgaaaaccttggaggcctccattttggtgaaggataatgccatatctgagctggaggctctctgagcggagagacaaagaatggtttctcgcttggagactatgcttggcgccagaagcacagagaacacggcacaagatgccttcatcttcagactgcagtctgaccttgatgactacaagaagaagttgcaggaggctcttgatggccagtagaccattagggaggagtatgccaacctgtcttccgaactcacttatgagttcaatttgtgcaacccccgagcaagtctctcgtacatggaccgtgaggcttttatggagagaatgttggctcgtgtaaaggcacttttcaaaagcttgatagaggtagaccaagtcgctacctatcaagaggggtcatcatcagggactcatgacgaggggctggccgacccacctttggaggaggtggcgggccaggaccgtgaccgccaggagaactattgtttggccctattgcttttttatcatggattgtgtgaccgaccaggaaaaccttaatcttggctatcttcttatggccttgacaagtaagggtccggatttacttttccaagttgaagtatgcctgcacgacttaaaggcaagtttagattcttatactaagcattaaaatttcgctgcataagttctttgtgctagtttaatgccttgtacagtatgggtgccccccaagtgaccatgcagacaagtctcttggtcacttgctattaaccgaaattcacagacttttcctgggttgttacttctgagggtacacagtatgcatgtggaactaaaagagtaactttaacaagttagtctatgagcaagtagtttagacactataaacagaatataaacattgttttctattcattaattggtatttgttgctgtgcaacttaagtaaattgaatctacaagcttacattacaaatttatcttctagatgtcaagtggctacccctacttgcctactaaagcagaggccaccgtagaagaatggtgggagaccatgccaaaaaggctgtgggtgctagagctttttgtactctaatgttgagtaggtagaactgctactttggagtagagttctataagctaattactggtagcctttgcattccagtatcttagtaggagaacgagctccatgttctcgttgtaccttcccaccttataggctctcttaccagttatctttgtaacttgttaatggccttcctggttaagtccaatcactcatgctactgagtctttagtgtttaggaacactctttgaagcatcaagtctcctacgaagaatttcctactcttgacttgtttgtttaagtgccttgctacctttttttggtaggcttgcaactttaggttggcttgttctcttctttcttctacttcatcgagggactctaccagcagggtgttgtttatttgttagtcataggttgttctcctgtaagatggtggcattagctccacaggcaacatcgcctcgtagacataagctagagcgaatggagttcgccctgtggtcatcttttcggtagtcctatgagaccataggacctccgggagaaattaaggtcaatttcctttcgcttcctcaaggcatgttttttaaagtgtccttaagggttttgttgacagcttccacctgcacaagtgcttgaggatgggccagggcggagaagctcttgatgatgccttatctgttgtagaaatcagtgaacatgtcactgtcaaactacttgccgttgtctgacacaatcttttggggaaggctgaatcggcatatgatgttcttgacaacaaagtcaaggaccttcttggaggtgattgttgccagtgactcaacttttatccatttggtgaagtagtctactgcgacgacagtaaactgtacccctccttttccctttgggagttgactaattaggtctatcccccacactgcaaagggccaaggagactacattattgtgagctcaatgggtggagctctttggatttttgaaaatctctggtacttataacattttctaacatagtccatcgagtcttcgatcattgttggccaaaagtaccccacttggagtatcttcttggacaggctttgcctcctggcatggttgccgtagaagccgtcatgcacttctatcattagtcgtttagcttcggctttggtgacacacctcaagaggcacatggagaagcttcgtctgtacattatcccatctaggattaggtacctagcaacttttcttctctgttttcttgcttcatttttgtattctggcaaggctccagtttggaggtaagctgcaataggtgtcatccatgttagagtgtcatccaaaattttgacttcttttgggataacgatgttggattcatttaggaactgtatggacgccaagttctctttgtcaacaattgtgctacttgccagataggcaagtgcattctgctccctggggatctccttaattctgtagcctttgagttgacttaacaagtccttgattttgctcaagtaggccaaaaaaatttcacctcaaactgtgtattcaccaaggagttgattcacaacctattgggaatcgttgaatatgtccaggtggttagctcgtacttcatgtgctagcttgaggccaactattaaggtttcgtatctggcctcattgttcgaggctttgaagcttaatttgattgcaccgtgcagctgttgtcctcaggtgttgtaagggtaatacctgaaccagacaattagtcagtcaagtttttgtaaacatggagtttccatgttagttcttcgggattttgctgctactcttgcttttggttctggctcttacttttatcctgagtcttgaggggtctcaagagttgagttggtgcactctgttgtgaagtctgctagggcttcaccctttatagatgttcttggttggtatgtgatcttgaactggccaagctcaatggcccagatgagtagtcggcctgatgcttcaggtttctgcaaaacctgcaacagcgattgatcggtggacccctttatggagtgtgcctagaagcagggccttagctttctataagcaaagagcaagttgtaggtcaacttcttcatgagtgggtattgaatttcggcgtcgattagccttttgcggatgtagtatggagggtgttgtacactgtcttcttctcttgtgaggacaacactcacagtatgttctatgactgctaggtacacgcctagctcctcattttctatgagtttagacaacacaggtagttgggccaattatttcatcagctccttgaatgcgtttttgcattcctctgtcaaatcaaattttttgttgcctttgagaatgttgaagaagggtacgcattcgtctgtagacttggacacaaatttacttaatgcagcaatgcgtcctgttaggatttatacttccttgacagttgtgggtgacttcatgtccaaaagagcttggatcttgtttgggtttgcttttattcccttggcgttgactatgaaaccatggaattttcccgagcttaccccaaaagagtatttgagggggttgaacttcatgttgtatctacgaaggattttgaagcactcgcataggtcatgttgaattaacattctacatatgaatatctctaatatgatgaaattatacacataagagtttagaaaaatccaaatcaggcagatctttacttagagtagagaataacctaaaagaattcaaacattgattgcagtagaataatatgactcnnnnngttcagatctctagtccttgattcatttttgtcgtagagcattatcaagatctgaacctggatctctttctctctttcaggtttggttaccaccgtcttacccactatgattgagtacttgacttgttatgtgtgggcatggcactctatgactataggctgactgtgaagaacaatgaaggagactcaaaaattgtatagaaggtgtctctcatctactagttgtcagagaatgaaaactagatttggtagattaaagagtcaagtggatgagatgagagcatcatgttccttttatattttttcaactagggcttaggattgaattatatggattaaaaaagaataaaatatttggcaaaaattcacactaaggtcggccatataatgaaataatctctagttacaatttttccactttatatcaaccacttactcttctttcaataatatcatattttccaattcaatcctataaatgccaaaactattttaacaataatatttaattatcaaataaaattgtcatttatattatttattaattagaccatacaaaaattacccccaaaacctctttccttcacaattaagctcttgcttagtaaaaattcataaataagacatagtctaatcttagaattataattgattaattaaatcaattaactgagtctgcaagtagtatcatcttaactagtgagggggccatgggcctatataaccgatcttccaataagtagatctagaatttagcaagtaaattccctaaattattatctgccttgtgccactataaatttagaattgaattgcactctaaattatatagaacgctttaacgttatgattatctattattacaatcctaatagtcaaagatcatctatagatgatttacactgaaaagggacaaatttaccattctacccttcaatttat

SEQ ID NO: 122914 - DNA, 1064 bp, Cannabis sativa
tttactatcgcgaccgtagtgtaactaattgggcgacatcagtcctccacctggccccagcctttttggactatacaagcatgtcatccacatacacctcaatgtttcatctaatgagatctgtgaacataatgttcaccagtcttttgtaagtggcccccctgtgttcttcagcacaaagggcatgactttgtagtagtacacgcctaggtccatcatgaagctggtgtgcacttgataactcttgataaggtggataaatctttatctgattgtaacatgaatatacatccataaaactcaggacttcatggccagttgtggcgtccaccagctgatcaattttggatagcgagaagtagtcctttggacatgctttgttcaagttggtgcaatcgatgcagactgtccacttcttgttgggcttaggaaccaatacttgattggaaaaccaatgagggtagaatgcctctattatgaagccattggccctcaaccgttcgacttcatctttgagcgtcagggcatgctccttgaatagcaaccgcctcttttgttgaaatggctagatgttgggatctatgttgagtgcatgggttatcacggaggggtcgattcagaccatgtccccgtgttaccatgtgaataggtcaaagtttgcccttaaaaatcctatcaatattgacttaatttctagaggcaaacctttagcgatctttattcttcttcttggatgagtgggatatacctccacttcttccaactcttctacaagaccgaagcttcctataggatccccaaagcaaggatctaagtctgtatcctggccttgggctagacttcatttccctttatagggatcatcttttgacttttggcaggcatcttctcatttttggccttggataaggccaggttataatagtgatgggtagactgttggtctcccctcagacacgccacactattccttgttgggaatttgaggcagaagtggtaaatagacgtcacgcacttgaagtcgttgagggtcggtcggtcaatcatggcattgaaagctgagg

SEQ ID NO: 122915 - DNA, 982 bp, Cannabis sativa
  modified_base (332)..(336): a, c, t, g, unknown or other
taaaaaatttgagagaaaaagggtttgaggctctatttagggttaaagtatctgaatggggagtcaaaatttcggtagtgggttttttatagcgaaaaaatcaatttgaaaaagactaaaacagccttggaatcgtgcccagcgaggaaactgatttaccaggtatgcacaaccggtttgtgtaggagaagattccccgaaacggctctaacacttgttttgtccaatcgtttggacccaaattttttcagcacctcaaatatgataaaacgaaatttctcaaacaagaaacactaaaaaatgatgaaaaatgacgatttacggtaagcttnnnnnaaaattgccaagaaaactagaaccttactgaaaatgagtttcatgtaacgaaattgaaaaattctttttccagtagtttgatgaagtaaaatttgaggtgtacaaacttacagaataaaaaaatgttaaaaaatgagaaagtttcgcgaaaaacactatttcagtcaagacaaacctataggcacactaaatacatttaatttcacatgttcaaacatatagacacacaagataatgaaatatgcaaaaattcacatgttcacttgttcaaaatcaagtccaaagttcaccaagaattcacataatgacctataatttggagttttcaacaagtatagtttataaaggtcaagtgtcaagaatttttctcatttatgcatatagatcacataaatatcatgtttgaaatgaaatgcaaatataagtaactagatatgaaattttcattgcaagcaaaccttatatttcatttacgttggtcatgccagctatcttctaatgaaactaaatctctcaacactaagaggcttggtgaatatattcgctaattggaactcggtgctctcacagtctagcataatatcacctctttggatatggtctctaaggaaggagtgtcttatgtcaatatgcttggctctagaat

SEQ ID NO: 122916 - DNA, 1205 bp, Cannabis sativa
  modified_base (841)..(846): a, c, t, g, unknown or other
tgtggaggtagtggttggccagattattgagcccatggtcggccagcctgctcaggccatggtccgccagccttttggagaccaggtctatggtgtagtccaagacagttcgatcccacctacactcagttggctttgcccccgacatgattgtcgtagagccttcatgcactcttgtcaatagctgttcaacttctttcttggtaacacattttagaggtggtattgggataccacgtctgtgcattaccccttctagattggacacatattagctttccccatcatccttactttttggcaaggttttgtttggaggtatgctgctataagtgtcatccatgttggagtgtcatccaacatgtctatttcttccaaaatagagatgcttagttcttttaagaactaaatgggtaccaagtttgctttgtctgtcaaggcactgctggctagtcgaacgagtgcatcggctatggcatcttttttgggaacttgcctcttagtatagcctttgggctgacttaatgtaatatcccggaaaataaaatgatatttaaatagacatatttttttaaatatgtaattattttggtaacgaagtaagattatgatcttacttagggtaactactaaaattaattgaatgatatgtatagcgtaatttattaattacggaggttatattgagatatgtgggtatcgaggatactatttttgaaataaaaatattttatcgggcctgacgactgtgaaaatttaacattgtggttagaaatgtcacgaaattaatggatggattattttgagagtattccagactaggttagaatttttagaatgnnnnnnttaatggattagtgaaattaccaaaatgtcccgagactatttttaaaatttaagtttctttgggggtaatttagtcattctttagaatagttattttttttatactttaattatttatgggctgacttttaaaagaaaaaaaaagaaataaaacaataataaaaataagaaaaagaaaaccctatttaaaggattagcttacaaggcaagaaaccaaggacttcattcttcttctccctttcgtgcaagccaaccaaccagtaagagaggctctcctcaccattttcttttgcctttggagcatattattcaacctaagctcaacctagaagtggttgaggtaagtttacaccttatag

SEQ ID NO: 122917 - DNA, 796 bp, Cannabis sativa
ttagtaaatctggaatagggcacaaagcccaacagtaataatgttggcaataatcttagaatcacttcatgtaatgaccatatcatctacataagccagtatcagtgtagtagatgaggatgtgtgaagaataaatagtgacctgtcaaacttggaggaagtgaatccgagttcaataagactattgtgcaatttatcaaacagtaataaattatatatacataaatatatctaagttttctaatggaacctaaatttgatattttttttataattccagcttcaataataacaaaacgggttaaagtgggtcaacacgattttttacgagtcggtttacggttgagaaaattaaacaggagtcagaaaacaggttggtacgcctgactcgaaatatagaaatgggtcacataaaatatgacacaaacacgatacgataacacgttttgccacccctaatttttaacatatttacagatattttattcataattttttttttgttattttttagaaaaatataattataaaaatgtaaaatatatataatttaaatactttgtgtgaattttctatttaacttttttctctttttttttctttctcttttgaactatactatttagagtttttttttttttttttttttcttgtgttgtaatactagaggaaatacaaatttatgagttttatattttttttgtacaaaaatatgatttttttttttttcaaaaatgttattttatgggaaaattgaaaagaaaaaaaaaaagttgaaaactataggaaaatcaag

SEQ ID NO: 122918 - DNA, 852 bp, Cannabis sativa
aagacctagagttatattaacagagctttagctatttttgatttgcccccttcatatgagaagtgaaggatatttataagctaagtgacaagtatggacagacccatgacccgcctaaggtatctgcttacatcctattattagggtaaattacatgcaaaataagatttgactgttgaatccttggaccaaatcacgctcgtgcgccttacagcaaggtaatttgggataatgcgtacgacatggacacttgtccttcaaaactttaacctttaaaagtgatggtccgtagtacctgcctggtaaaaaggtattggaggtgcgcaccatactatgctaggatataggagacatgatctgatcttgtaaaaaaaaagtataaccgtcactttagcgacctgtcgtatgtaaaaggtcgacatccgcgacacttcatgatggtcgacatccgcaacacttcattcgaatacttgttcaaatataaaataagtgagcttccttgttagaccctttcagattcgggagaggtattctgccttccacatttaagaagtcgaggcaagtatgaatttgcttccgtgtatccttccttcctaggtactcttcagttccaggaagccttcccatgacaaaacggttccaaaggactctcaattaaaggaataaattatccatcatcattaaatgccacgtgttatgtttcacagaaatgcaaataacaataattatattaatattttttatttttattttttaagtattcttttatatatataagggttatttgcggcaaaaccccctaaagtagggagatttttgcaactaactcccaattctaaattttttgcggta

SEQ ID NO: 122919 - DNA, 1077 bp, Cannabis sativa
atgccatttaattttatggctttgaattttagtgcactatttaatttttttttaggtaaaattaccctttttgagattttttgtgagattaatgagctctttcaaattttgtgaggtgaatgacctctttaatattccaagattaattttgatgagctcatttagaattttataccattttttatgactttaaaattttaccactttttgtgataaaatttgggccttaaaatttctttattatcattttaaaaaataaagaaattatttaacagatatttaaattaattatttttaaaaatctgaaaacaattaatagatttttattatcagttgaattatcatttttttttataatttaaatttaaatctaaattataaaccgaattgtgcacgattttgacaaataagatattactatcttataattcaaatttcaatcatcttaggatattatctctttgaatttatgtactttaaatcaaaagaaatataaattgacattcctcaacaaaagtcttaggcttggtaaattcaattgattttcttttgttctttacaatatatataatacgaatacatgactatatttctcttttgactcagcatacaagctttctttttccaattcatcgggggaattctcttaaggcttttggaatctgattcaaaattttacatgcacttgaatatatgtaagttacttgctcttttattatttatagagaaaagaaaactgccaaaatttatagagaaatatctcaacaaatttctgtcgagagttagcgattgaacataaatcacttataaaattttgacagtgtaataattctctttgattatgctaattctaattcttaatgagaattttgacagcatcactttttcattatttaagatttttaacttcttctttgattatgtatcccatatttacttattttttgaagtataaatctatgaagaattgggcagcataacggcatggagacattaaactctcttatttttcctttgtctatatctcacttttgaagatcttttatggcttagagagcctagatcaaagtggaccaa

SEQ ID NO: 122920 - DNA, 863 bp, Cannabis sativa
cacttatgggattgagcttgatgaaccagaccatatagctcctcaactattaatccgtaatgggtcttcgatattgtatcgcgaagggccatggaggggagtaagtttcagtggaacttcaaattatgtatcagttttttgggaaaactctgattatgaatttgtgcacaacaaggatgaaatttacttcacttacaatactcaaaataagtcattgatcgtagcaatttccctacgccaaacaattgattacattagatgggtagaagaagaacgagaatggaaatattattacagaattccaggagataagtgtgacatttatggcacttgtggagctaactctcaatgtatcatgatggatggtgaaccagtctgccaatgtttacaaggttttgaaccaaagaatcaaaataatttgtcacaaggatgtatgaggaacagttctgtgaggtgtaatgataaagagaaagatgtgttcaatttaataactgagttgaaagtgcctgaaactaagtatacttgggcaagtaaaagcatgaaactcgaggaatgcgaagctaaatgcttaagcaactgttcttgtactgcatatggttataattccaatttagatggaagtacttctgttttagctattggcactgagtgtgtactgtggttcggagatttgtttgatattcgaaggagcagatatggccgaagacaaaatgtttatcttcgaatacccttttcaccctcaacaacaggtacatacatactaaactatagatttttaaaagagtaaccgtattaggtcgtattgtattttattgtattatattgaattgtattttatgcaatatttttatgtaaaactatat

SEQ ID NO: 122921 - DNA, 1858 bp, Cannabis sativa
  modified_base (1747)..(1754): a, c, t, g, unknown or other
gtattttgaaaatatattttattatatatataatagtcaaagaatgtaatcaacgagctaggtgatacaatttagagtattcttattacgtttcagtggtacttaatatttttagatatgatattttgtgattagttagtaatattttttaaaaattattacattaaattatataagatcggatacttagttgaccaataacaatattaatacataaaaaagtactagacactactaatatcttttagtatttctctaaaatttagttaagaaaatttattgagcgtgtaatacacatgtttactaataagtgatgagaatcaatggaaatagaattattttttatatttgtttatttaatttattaaatttagaagaaaaaaaaaagaaattaattaaataagggagaaaagaaaaaggagaacttctcccactaattttttaaggaatgccattatccattaagggtaatgaattttatttctttttattttatcttttaatattaaatttataatgacaattttatcctttaaagcatgtcttatataataactaccatatactatagtttaactcaaaaggataatttaatcaatttaagcattccgattatgtttcttgataaaataaataagataaatcactaccattctatttttaatcacttttagtaaacaacatattacaaatatttattttgattatttttcatttattccgttacattttttcattattttattctgattctgaatactatatagtaaacgtgccaactaatcaaattatattttaattgagagattctactttaatagagttacaataaaaaaaataccaaaattactgacaataaatcatccttaatactatatcaaaataaaattattttgatcaaatataataattatatatgtactttatcaatgtataataattcttatgtaaatgtatattttttataacttattataatttaaatattatttttatttatacttgatttaaattaggacttgattttttttataataaattaaaatttaattttaaatagagtattcttagataaatattctattgtactatatagagagatagatatgatgtagtactcaatatttatataggagtcttaatctaattcaatctgtactattttatttataatgcatctaatttacattatgtgcagattaatttatattttgaattcaattcaatctgtatgatattcaaatctaatctaatccaaatcgcaaaattacaaattggatcgattattttgaatttattacttgaatatttgttaaaagatattttttttcacataacgaacaaaaatataaagcaagttattgttgttttatttttttcaacaacaaattaaaataaataacaataacaatcacaaattttaaaaaagaaattatatgtataaaaaatatatttttcttataattaagaatagaatatacacatttgatttactaatttttgaaatatatttgtatcatatgtattaaatttttaaattactatattttttacattaaaatactaatcgtgtataatttatttttaaatatatataattatgtgtgaattagatctcgattggatcaattacttttacatgtcaatttatatgaattttagattttccaatttaatctattttgtaaaagtacatatatctacattttgtgaattagattgggtattttaatatatatatatatannnnnnnngcaagactatggtaggacttagcataagttccctaccggtagggaagcttttttggccattgattttagatcatgtggtcattatgatataaagtgtatactct

SEQ ID NO: 122922 - DNA, 627 bp, Cannabis sativa
agagaagaagaggatatgtatgagaaaaacaaaaaagtttatatggagaaagaaagaaaggaaaaccagtacccactttttgaatatgtatgtgatatggtcttataaaaagctagctggaagaacacttagctttagagaagagatgggatatggggtggttccatgtgttggccaactatgacagacagagagagagagagagactagtctctacagccacatacaatttattcaattaatttaattctgagagtgttaattaataattacaaagagtataatggtaggtattactatgaagttgccacttataattagtcagtaattttttataatttttattaaaataaaataaatgggacttaatattaaattttatattaagtatcaaaaatttcttatgacttcttgattaattttcacactcgaaattacatgttggaatattttttcatagcgctcggtattaattataattataatattattcctataaatttttaaaaaattctaaataatttacagtactaaaaatagaaatcttaatattctaatttacaacgtgtatttgaaaattttcaaatttatttttcgacactgtaaggctgtttggctttacagttt

SEQ ID NO: 122923 - DNA, 748 bp, Cannabis sativa
tttttttttatatatataatagttatccaaacggtaaaaataagtcaagatttatacttatcttatacttttagctaagtaaaaatagaagcttaaccaaacaaggcctttaaatgtaatttcctctattaattatgtcaaattgggcacctaatatattttgtattaaatttttaaaatatatttagcacaaacattggaacacctttgtagattttttttaagaaaaaacaattaaaaatataggaaattcattaaaaaaaggaaaaatatattgtagacgcttttagaagactgataatttaattgtttaagctaatcaaaattatatacacaaattatagaaggaaaacaagaagaaaggaaggacgaacacaaaataataatttatatgtacttttaattaaacgcttaaacccaggacaaatttggtgattattatgttattgttaagtaagaaattatctccaacggtccttgtgaacacaagaaaaaaaaattaattccttccctggcatgaaatatttgagttataaattaataacaacttaatcttataaagtacattactaaaacggttggtaacgaagttcaatgacgtgtgtgacagtgttagaaattaaaatgaagaattattttctgtgagggagggtaggtacgtaaaaacgaaataattattaaaaaaaatacaaaggtatggatagagatgagtagggtgggcatccgattcaatccaactttttttttc

SEQ ID NO: 122924 - DNA, 777 bp, Cannabis sativa
ttccacttcacaaggtgatgaaaaatatggatttgttctgtctagaaaatgactgtttagtatcaagcataataatttcaagtaaaaatatgcttacctatgtaataaatatataaatatatatttttttaatcaaactactaactgcaagttgtataattgcatactagcagtgagtcttctaaaagtttgacttaaattaaaatgttgtttgccccagttataagttctcagttggtatggcagttgcatctgtcatttattatgttgagaaatgaaattgctctctaatgattgaatattaattcaggtaattgtcaaagtacattttgtggcttgttgctttgtaacaattggaaactatatgatcttagggtcagcctcaattgagttgacttttttcatttcactgctttcaacatttcattgctctctaaattcaaatttattagatttatttttatttatttgttttttacagcaacatgtaattagttagctgattgattatgtattacacgcccaatgaagtctttcatggttggaagaagtttcatatttctttccactttgcttttagctttatactttacaaaaattcaaataatccgcgtcaccaaatctaaataagcttaattcaaaatattcacctacaattaactaaaaagcatccaaaaacaatgaggaattttcttattgctgcctgcataataaaattgccactataggccacagtttaaaaccgtgcctataccactataggtgacggtttaaaac

SEQ ID NO: 122925 - DNA, 557 bp, Cannabis sativa
atataactcaattttttttaatctaaatattatattatataaaataatataacattaaatataacaaagttgcaaagttatttaattctgtgtctttacattcactttcaaggcaccaacagaaacatatatatctattagttgtgtccatgatcaaaacttattaataatcatcttctcatctacatctttgattattaagattcaaacttatagtttcaatattattcttccaacatcaagatttgcattcattccatgagaatagatatgaattgaatatattcttgggtttaaaaattgatgaaatctatgatcatgtttattaatgagagtaagcctaaattctcaaacaatatatcaagcggtttatcaataatcattgagaaaaataataacaaaaggatcgagaaaaaaaccatattcaacagagataacaatcagaacaattaaaatccaaaaaagtagggagaatttacaattttatagacattataatatttaaattacattatatgtgcaaaaaaaaaaaattacaatttatcatacattttatt

SEQ ID NO: 122926 - DNA, 1775 bp, Cannabis sativa
gtttgattttcaatatatttgctttggggggggggaacggaaccgaggcgtctaaggcatttgaaatgattaccttttttcgttcttctgcctaaaaataggactgagtattgttcacaaattcacttattccaacttctctacttagtaagctcaaagtaaaaaaaaaaagaagttttcgctttaattttgccgtgaaatttccacaagaatcatccgagcagcctcgtttggaccaaactcagaagtcgatcagcaagtaagttttccattccttcttttactttgtacatttaatttctgaatgcgatcttaaccttgctgtagaagatagttagaaaaccctaggttctgaaactttgcaatatttctttacaatgatctgtgcaacttcatgattcatgacgcttgccttttgatcgtacattgtctgtctttcaccttgcttattcaaagctttgtgaaattttgccctaaaccccaataaattttaaacttctgggttttaacttgctactgaatatttccattctttaatctgttgagtactcttggtcggcatgttttcctgttttttgttcaatatcccgaccaaacactcatctcgcgtgttgtcttttatagatgaactctagtgagttttgggaagcgaacaccgaattgactaggacttgcttcaacttctgtacgaggataaccctcgtctctgctctagtctgccctcttcaagtgacggacttttcaactcaatctttccatccagccataggatgacggctcgaattaagcaaacaatgcgtagggttgacgcgtctgatccccacgcggcccaggtcaccactttacccagttctgaacaagattcacccgtccaggaggagggggatcatgatggggatgccgaagtccaggagattgaagaacaaggcgatgttcgtccgggcagcccttccgaggcggaggaagaggaggaggctgcacctctaaattttgggggacacaatgaggctggggagctggtagatgcggacggcgatgtcttggttgaaggagtagactgcgtcaccgaggagcttactgctgcagttcctcacaggaggcaaggtgccttaggtgctaggtgggtgagccctccatccaaggtcactacgacacgcctaagtgctttagaccgacttggctatctgggtaaactggactgttatgtccctgcctcaaaccaccgagccacaaacccgaaggaggggatgtgtgcttggtcgggtgctcattccaaacaaggggcaatgctgcctttgcacttgtattttaggaaggtggcaaacttcttccgtctttgtattttaggaaggtggtaaacttcttccgtctttgcccgacccagtttactcctaagggcatcaagtatctatccgccctatttgtcctctttgcctcccagaaatgggatatgccttctccgcacgaggttacctggttttttgatttgaggtctacccccagcaaggcagatacttctatttttctcagccagattttgagtggttgactggcaccggggacagggctgtgagcaaaattaggaatattgttgatgagtattacatggtgaagggcatgggcaccacctatactcggttccagcagatccctatataataccgtcctccctttacgctggctcttagggatagagctcatgttgggtttttatgccctaaataaaatccattacaatctaatctgattaattatcaataatagaattagaagtg

SEQ ID NO: 122927 - DNA, 1210 bp, Cannabis sativa
  modified_base (1133)..(1133): a, c, t, g, unknown or other
  modified_base (1162)..(1173): a, c, t, g, unknown or other
tatattttaagggccaaaatcaatattgtcgaaagttcagggggaaaaattgctaattattcttaaaatattaaataaccattcttcaaaattaaaaaaaaatatattctaatatattataaattcttaattttaactttaatatctaaatataattaaaattatcaaccataaagttggaatttcaaatttaacatgttgacagtgaaaactccctggaagttctaatctaatatagctaagtaattgatctaaaatgcttaatactatgaattgagacataaaactaaattaatgaacataagatttacaagctttctatgtattggaatcgcattccaaccgagtagtgcttgggtccccaagaaccgggtaaagtaacatccactataaaataaaatgaattacaaacaccagttctaatttaacaaaccaaactatgtaatctaaaataacttttacatgatgttacctaacacttgaacaaactcaagataagagatctaaacacatttagatccaagaacacaaggtcgtcttccatccaaccagctgaagaaccttcagcaacttactctgaactctcctcagacaatgaagatttgaactccttcttcaacctcttgaagattcattgaacttccatttgcatataaacaagaaaaacacaaaagcaatatttttccctagtagagaaagaatcaagagagcaattctatcaaaaaatgagagttagttagaaaaagaaacaaccgaatatatatatatatcctgttgagagagtatcaactcggctaactaacaacccaactaaattcaactggctcaggctaaaacaagaaaaacaaaacaataaaaagctgacatggcatgctataaaagataccgacataacagatgaaaataatgacaatatagatgactaatgaaatatatcaaggcagtaaaatgaacactagtaaaatgttagggattattttaccaggatctagatttactaccatgtatgttttttaacatcctaaaaatgaatttctaaaacaatggaatttaaacacatgtaaagtttaagaaaccttacattggttgtaacagaattaaatgacgacttctactcagatctctaacccttntatcctttctgttgcagagtatcaccaannnnnnnnnnnnattctccttcagttgattggattcttcacagtcttac

SEQ ID NO: 122928 - DNA, 1132 bp, Cannabis sativa
cacaaataaatcttatcatttgagtattatctacacaattaatttttgtttagattctcgaattatagtaaattagtcctatattacttttacaccaacaaattatttacaaaaaaaaataaaatgcaaacgaaaattcaaatttacaattattggcatagatggagaaaataatttctacaaaataaataaataagtcaaaggacagaataattggtagcaacgcgtaaaacaccacttcaatgatggtgatactaatagctagtagcattgtcttttactcatatttgacttgagacttgagttaatgttgactctttaatgttgattaacattttttcctcattggaattttctctttgctcgttatacaagttgggatcttttaatttgaccattgttaaggttgtagtattttgaggtggtgtcgtataattgattagcgattcattacaatttttattaaaataaaaaaaatattaaaaaatattagtaatgcttaatattttcatactgttattggtgtaattaagtatatcggtctcatataatttaagacaataacttttaaaaaataccgctaacaattcggagggtgccacctattgagggtgctagacattactagtgctagcaatataacacatcacaaaaatattagacaccatgtgtatccttaagcatttttcttataattttcatcccttcatatcagagattaaagaaagttaatgctaattttttaagatattagaaatgaaacattttatatcttcttgattcaaatttaagcatatcccttatcactattcacactataacattccatattcaaacccaattcaaaatattgaactatgaattaaaactaaagaaaaaatactgatgtagttaaaacccagaaatgagagagccaccaacgtaaaaggggggaaaattggggtttggagaagcttttcgtatggatgaagcagttgcttggcaatatttgaaaatggaagttttggttctggatgggagaagttgatctcagaggaagaagaccaaagaaaaagaaaacaagaaaaaatatgtttatttttttttaatcttaattagtttttttttattattttaaattaaaaccgaaaat

SEQ ID NO: 122929 - DNA, 927 bp, Cannabis sativa
cgattcagatacatcctacaatgtattgttagggcgactgtggcttcatgaatgtggggtcattccttcaagacttcaccaatgctttaagttttgcaaggaaagaaaagtcaaaagtgtcaatgtagacccaaatcccttttacatgacaagtgaactatgctgatgcaaaattttacaagctagctaatgtcactattctaaaagagaaacttaaggagggtgaatgtcatgaaagctcaacctcacaaaactctatgcaaattaagcaactatcccctgtaaaatctcctcagccaaaagaggagaacttgaacttatctaacaaaaagtgaatcttcaagtacatccctaaaagttgacgaggagtagggcaaaaagctttgacaccgatcgaaaattcaataacagccctgatgacaaactttactttaccgctaaggaaaatcgatcagtcactacctaagggtaaaatgcaaatttcaatttcctttggtaaagataacaagaaaaataaaaggtttgttactctcaataaaaaaatcctccacttctgtaactccaaaaaccttcaaaacggagaagaaaaagtttcattccaagaagcaaaaaggagtcacaatgaatcaaaatagtgattgtttaaaagcttcttttgaaccaaacgagtcaatagaagaggaataaaaaatgtttcacagtggcaatgtacctacaccttccctacatgtgccggtatttaataaacttgaagcaagcacatcaaccccacgagtgtcagcattcgtagagcttgttttcccaagtgctccacaaccaaggggaactaaaaaaaaatagtgggtgccaaaacagaagaaacctttgagaattactattcaggggcatgaaacacaagaagatgaagaaaattttgctcaagtcaat

SEQ ID NO: 122930 - DNA, 791 bp, Cannabis sativa
catgtgtaagatgcatatatattaacagttaattaatttaaagtaatattatccgtaaacaacatatatatatatataggtgggtatttttatatatataaaattttaattattattttgtttgttttgcatacagtctaatctaatgtctgtttcttcatatggaatttcaaaataatacttttagacaaattaattagtagatcttcttaaagtttcatgaccatgagatttcatacatatctgaatatcagaatatgcatcctagtcccccataaaacgggtcactttatttgggaccaaaaattatttatagttaattatccaaacatttgttttaaacaagttgtaagaatataaagagattggtgatttgaaactgttggctaacacgctatattaaaaaaccatatgtttagttataaatttaaatgcaagggtaaaattctctcttttgtttctctatttcagtgtagctatgaccatggtagggagggggcggccaacgaagaaaaagaaggtggtaggcaagaatcgaagcccgatattcgggggggaaggttaaaatgatatggatgaaagtttaattgtggagacaataaatttttcggatgaagaagaaccaccgattgagagcctatactatgcagatatggaatcgaagatgctttcaaatgaagagagcgaaacacagctaattcttcgagagaaaattcaaaaagagatttccatgttgctttctcgtcgggatacaccaacaggagttcaaacacctcaagttgtgcgaaagg

SEQ ID NO: 122931 - DNA, 2555 bp, Cannabis sativa
ctttcgcaacaaggcgagcttttagcctttctacagacccatctttgttttctttaactctgagcacccatttgcacccaattggctctcggtttggaggtaaattgacaagagaataggtgtgatttttcttgagagcagtgtgttcttctgacattgcagcaaacctttggcatctttgagagcactttttagagaggcaggagtaagagatgccatcaacacctttggttttcgaatacccgatttccctcttgttttcatgggatgctgattaattacaggaggtgctggattggatgcttcaacattggataacagaggagaagcagttgaatggagctgttcagtgacaccaccagcaggtatagacacagtagggacagctgggagagctatttgagaagcacttgaagtagattcatcctgaaaattattagtacctgtatgctcagcagcgaaatgatcaacagaaacaatgggattagtagcacctgtaggcatagtatgagaagtaggaacagtatgtgtaacatcaggtgctgaaacaggaggcatgggtgttgttggaccggtagcagtgttaggaaatgtgggtaagggagagaacccagggggaggaaatggaagtgggtatctctgaggtgctatagcagtaggcatggctgcagtattggaagttgacagagaagaagatgactgcacagcctcattggcatatggaaaaaccagttcatcaaaaagaacatctcgagagatgtagacacgaccttccttggataggcatttatagcctttgtgtgaaaggctgtatccaatgaaagtacagggttgagatctatactgcattttgactctgttatatggtctcaaattaggatagcacaagcatccaaacacttttagggagctatagtcaggtttaacattgaagagaatttcaataggagataaatgatgtagagtaggtgagggcattctgtttataagaaaaacagcagatctgtaggcttcgtcccaaaattttaaaggcatgctagcttgtgctaatagagtcaatccactctcaactatgtgcctatgtttgcgttcaactaccccgttttgttcatgtgtgtgaggacatgaaactttgtgtataatacccgactgttgaaggtagtttgtgaacgcttggtactcacccccccaatcagattgtatttgctttatgggcaacccaagttgaagctcaacttgagttttgaatgtaatgaaagtgttgagagcttcatctttagttctcaacatatagatccaagtatgcctagagaaggcatccacaaagctaatatagtacctataaccagacacagagttgattggggcaggaccccataagtcagagtgtaagagttgtaggggtgcagtatagacagtagtggagtgaggaaaaggcaatttatgtgtttttccaagacaacaggctttgcacagatgagaaagttcagtgtttttattgctcactttgatgttacaagtattgagtacatgttgaacaattctagtatgaggatggccaagtcttttgtgccataaagaaaaggaattgtttacatcactaatgctacttgaatgacactgtgcaggatcaggtgctacaaatcaccttacaccgaatgagcaaaatctcaacaccagcagcagctatctaggtgaacaacaagtgcacatgggcaatggaacaggtttgattggaattgaatccaaaatttggattggttgggtaagaaaaagtgccacggccagtttgtgacttagtgtgggcaagattagcttcagttttggcaacatcaaggtctttagcggctttgtcgagttgaacttcttgagccattagtaaagcttctatctcagctacactgtatgcttcagttctggtgttcacggaggtgatgaacacattgtactccgacggaaggccattgaagatagcttcaatgtgatcctgaacagaggtggagtgacctatcgatgccaacgtatccgtgatgttcttgattttgaggagatagtcatttagtgatgactgcattttggtgttgcgaagtaaggtcttgtattgcccgatcttggctcgattgtgagctgtgtagtgttcccgtaggttgatccagatctgagcagccgtgtccgatccaaccattcttgtgagcactttttcagacatggatgagaggagccaagaaacaagaatgttatcttgctgttcccaatcttcgaattcgggattgactttgttcgtggctcgatcttcagctgtgagaaattgcagtggtgcttgatttggttcaagatacttctgtaatcgacttcctttaatggcagcgaggacttggtgcttccatggaagatagttaaactcatccaatcgaacagagagagagtgagaaaaggaaacaatattagttttaggcagagtgatttgttgagacgaacctgatggtatagacgatccaccattgtttattgcagaagaattctccatgaaagattacagctctgataccatgtga

SEQ ID NO: 122932 - DNA, 984 bp, Cannabis sativa
ttaattaattaagttcatgaatatgatctaccccaatatcaattggatagtcaaccaaattactttcttaattttatttatcaacaattagctaaagcaatacatataagctagctttccatttatgatatatattttgttatgttgcaagtagtagtatatactagtagaagtagattgtaagaaaacaaaagaaattaattaataatacaagtatattattatgatttaatatatatttatatgttaattatggcaaagaagtcaaagtcaacacatataaattgtggaattagacctactactccatctcttcagccagcaaacactcttgccacctattccttgcccccactactatagtactattactattaccttttttatattatatgaaattaataataattaattaactataaaaataaataaatagcttctagaagagaagaagagcaaaccccaagaccaacttactcccactcacacacacactactaaattatgccagtactcttgtcaattcattaggagggcaaaagaggacactatcactacacatttttacaccaaaattacattacacacatggccaaaaaatttagtttagtaaatcctatcttaaaatcaatatgtgattgattattttctttttttatgattatgtagtgtgatattgtagtgggtgaaatctacaattatagaactcggacatcagtttcctgtcaaaagtaattaaagagatagataaaagtacggtggtgaggcttaagagaaaagtttagaaagacgactatctacttgagcaagtgagtagtgtgagtatcgaatgttcaatcccctgcctctgtcgtatggtttctataatggtgttccttcagtatcgttgccctccatccacgtcacccattagactcgttcaagttggttgcttccctcattttacgggaatggtaaccatctttctgactggttcaatatcta

SEQ ID NO: 122933 - DNA, 756 bp, Cannabis sativa
  modified_base (49)..(62): a, c, t, g, unknown or other
atttaaatatctataaataatttaccataattaaacatgattaactgcnnnnnnnnnnnnnnaactaagcggtctttacattactattctatgaaaataagagactcaaaacactcttcactttcgagtgagtttcccatggtggaaatgagaaatgtggagttttgaatttgacttctctgtgaagtgagttgttttgaagacaatttatattattggtagtatcatcgtaaatgcacatgtctccagtaccttggtaccgacactggattcaagttgtagtcatagcatgttgttgacccagagtttcgttaacaataaaggaaaccttgtaaataaagaattgatacttatacttaataaatatatatagaacatagactttttttataaatggttttgtagttaaatctacatactctatgagtccatattatttcttgatattttttgagaaaatcctttgaatacaaaggaataaatatgaatatttgcttgatcccacgaggtctctccttccaaaatgatcgatctttttttcgtaggttctatccctatttataggggttctgagaatagaaattattcttctttgatcttctctaagtatccgttcatgaaacatagaaaatcttcacgtttcatatttacaacatgtggataaaatcaaataattgctggtaacagtctttttgtcttatctggaagcatttagcctttacctagttaattgacatattcctagatatggctccc

SEQ ID NO: 122934 - DNA, 2266 bp, Cannabis sativa
  modified_base (2210)..(2237): a, c, t, g, unknown or other
tgggtactcgaagggcctatcacagacgatgaccacccaagagtatcgcgaacatctacctttgatgcaacccagagcgtccagcgatggttatgctttttctaacatagaaagagatcttgtcccctgtgtccaaacatggtgtgcgcaccttatatacatttttgcgagacaattattccatgcctctactttcaaaggttgaaccttttggcgacacatgtcaactacgtacaatggtcccaattgtcgagctgttgcaatgcacgagcactattctttttaaggggcccattagtcagctctctttttgcatgtattttaccccaatagtgggctttttgcagaaaacctaagcgggtaatggcatgtccatactctcccccttagcctataaatacccttctatttccatacaaaggggggattagaaactaaatagtctaagctctgctaatattattctagcctttcctcttccttaagagaaactacgaatatagagttagagttttcttcaaaatattataaacacattaaatacgcctttagaggctaatagaacaaatcgtggactaaataacacctgaaccacgtaaaaatctccatctcatttatttctgcattttattatttctttagttctcaaatatttagtgttgacctcaaaaagtgatcaactgacagtgcggtcgtatagatctaatgattgtcatttgttacacaaaccgaatgaaaaagtatagaacacacatatttgtcataagggtttgcccccattgtgatagcgggtaatgacctactccccttttggttgtattgatacttagagataatactattcagatcgttataggtgggatctaatattaggtccacagtatcatcacattatcattccctaatcaaacaatcaataatttcagaatctgtcatgccatgtggtacattatatttttcttacctcaaatttcagttcaagtatgttggctgacctgcttggagaatgatcgatgatcccgggccctatatcataataatgataaactaataagtatttatcccaaaatactacttaatagttgtaaaggataacttagggtttcccaccaaatctcgtaatacaaataaactaaaagaaaacttatattttggctctaaaacatacatcatattatagagcttgttgcaagcttcgaaatggtatatagaacgtccaaagcaaacactcgagtgaaaagttacggcaaaaatacgattcccgaattctcaagtgcccatgaatggtaaaccggttgagaaccgatcaagcgctctcacaagaatcggttgaccaattcacaaccagttgaccggtttgggcagggggaaaaaacttcaattctcaattttacgcactcattgaaacgcgaccgaaatttgtccaaatcactgcaaacttcatagggcacataattacaatacatactaccatacttatgtaatagaaactaaaatcgagcccttaattggaaaacatgactaatgttcggacttaagctataaaaagttccaaactcaatttctaacccaaaatcacctcaatttcagcaagaaaacatcggagctagtcccatgactaccccgagaacaatcctataaggtcagaacctccataactattctaattcatagttaccctatacaaaaccaattttttctaacttaaaataaaattaaaccttcccttaagctttcttgctctgagaatgtgctatcccgctactaccggagcatacatcggtagattttgggttaaaaattaaaggaaatggatatagggagagagagtttcgtcaaagggggagaacgagaattttgtctatttagtttactaattaaaacttataatatatattatacttatctatcgatacttataagtttttatatataaaaaaataatattataataataataattataacttttatattaataatataataataatattaataaaaaatttattatgaatagttatcttattattttttagtcactgagaaatttttacttctaaggcgctaagttaaatttcacatactcctaattaccctaatacctacctatcaacttatcacaatattcccatcaattctatcaactaaacccgttatgacctcgatcgagtctccaaggtcatcaaacctgaaaatatttttattcnnnnnnnnnnnnnnnnnnnnnnnnnnnntgctatataaatctccgtaattaataaat

SEQ ID NO: 122935 - DNA, 866 bp, Cannabis sativa
  modified_base (799)..(822): a, c, t, g, unknown or other
atatgtaccttcccatattaattttataattacatatgttggaaatttcaataaaatttcgaaagttgtaacaaatatatatatatatataattataaaacttccataattaataataaacaatacatttaaatatgcatggttgtacatgttgtgtgtgcgcatgaccaattgaccaaacagactatatatatacatcaacacgattgtttttctttgtttacataaataaatatatattcaatattaagattgaccaaaatgaaagagaccaccaataataattactcatagttaatagtttattatactcatgaaattctgtatatgaacatggttttttccgtgaattaatatacatgaaaacgacttggactagtgatttcttcgagacccaaaaactaaagaaactcatgtctacaactacttctatatataaattatataataatattcaattataccacgaaaactcacactatatattataattttttagtcttttaagataataatttctttataaaaaatataatatataacttgtgcctcacaaacatctactcgatcatatatatcttcacccatctacaagtttaattaccatattattattctatttgtgggagaataatatgaattccttcccaaagaatttaattagattttatctcaaaacttatctctcaactctttgttattttcataatattattatatggaagaagttttaattgttacatttttattgaaatcacttacaattttttaagtcattactattaaatggttgtgattnnnnnnnnnnnnnnnnnnnnnnnnataataaataacttgtaacctaaaagtaacctaataatttattt

SEQ ID NO: 122936 - DNA, 683 bp, Cannabis sativa
gctaattgccttttctaatccatattactagagcggtcattacatgtatggttgtgttattgtcaaaaaagagagtttcaagatgagatatgtcgattctaagtctttgatgattgtggttagccatgtaatttcacaagtaacaagatttagagcacggtattctacttcagcagaagagtggaaaattgtctattgtttctttgatttccatgaaatggttgagttgccaaggaaaatgcaagattgaccttcgagtgtcaaggtaagaacgccaatcagcctcaaaaaatgcttgaatttcgagtggtgttagagctgctacatagaagaacaagctttgttcaggtgtacttttcagatgttgaagtatctgataggcaacattgaggtgtggttctcgaggtgattggaggtactggctgagcttgtttacattaaaactaatgagctaatgtcaaccttagagatggtgagatatgtgagctttcgaatgagacttctatattgagtaggatcagataataattgtcgtaagtctttgctgagcttgatgtttggttccattggtgttgagacatgtaataaccgcatacttagaatatggattagtagggtaattaacattaattaattatattttatgattataaccaattatatatatattgtgggccctattt

SEQ ID NO: 122937 - DNA, 1430 bp, Cannabis sativa
aataaaactaacactacgtggcttggcacataacaatcacctagtatatatatatgcttttaacttgaacttttagattaaactttattgaaaggtttaaaattagtgtaaaaattaaagtaagaaattgtgttcccatcccacatttaatacatatttatggtacagcaattatcgataataaaatagcatgcaattatcgaaagttaaaaaagataaatagacagtaaagaattgcttatgtattagactttgattatatggtgtgtattgacttagaaatatttgctaattatatagtttgtgtacatacaacaattatgagatttaattgactttttttatttcgaataaccacttcatatcacatggcgactttataactaagtcaaaccctttagatatcctcttcttcggcggtaatgtcatgtgtacgttcacattactatatcaacatatttgtgttcggtttcctaatggctccactatccaaaagacaaaattaatcattatttctcatgtcatctaaagattttttttattactactaattatattcacaagtccatttcggaaaaaaaataaataaataaattatgttggcaatgttgtgtcattcatgagtatatataaagagtaatattgctattaggtactaacagtgtctaacactttcttgacatcgtgttacgattggttagcgatacttcataaaagttattatatcaaattatatgggatccaatacttaattaaacgaataataatattgacacatagtaaagtactaggcaccactagtaccctttaacatttctcatatataaaatgttcatactcatttaaagtacctacctacattttgtctagtcgtcgggagaagctgccctaagtagtaggcagggccagccctaggcatgggcgaagtaggcccgtgcctagggcccataccttttgggggcccgaatataaataaaaaaaattattaagcttttacttaagtaaaattaagtaaattgtaaacaataaatattcatagcttaaatcaaatttgccttagccctgctccccttatgcatcatatagaactaaaacaaataaataaccaattaatttatcaataaattactaatttgaacaaaattacataaaaaaaaaactaaaactattaagaaaattttaaagaacagctgaaaaataatttatattataataaaattttaattacatgttcaataccaaaatgattttcttcgatcttggttatctagatcaccatcttggttgtctagatcaccaactgggaatgaaaaatccttaagagcaaattcaaaattatgataatcattttcttcatatattgctacatcataaataggatcattagaaaaatgatccgagtgataaccgtcactcgtggactcatccac

SEQ ID NO: 122938 - DNA, 2375 bp, Cannabis sativa
  modified_base (1460)..(1460): a, c, t, g, unknown or other
aatctcggtcaacaatatatatttttatattttttttaacatttttttactcacaaaattttattttattatttttttaaaaaaatatatttattatatttattgttctcttttagtatttacactcaaactatttttctttaattaatcacattttatataaaaaaaatcttaattttttttttttttaacttttactaaaatatgattcttatatttttacaattttttttatattttttttaacactctttctctattttaaaaacaaattaagagtactcttatatttttcttttatcttttacatgattaataaaaatatattttttagatgttttgtaatttattcggagttaatttatgaatcatttacatattttacaaggttaatgttttattatttttatattgatttatagttattttttactattttatagttatttttatgttgttggtttactaatgagtgcacattcgtacactcactcattcttagtcaattattagatggtttagtatttatttttatacagagttgatgtgttttcttcaagtgtgtatgtttgtacttaaaacataattttgtgatggattgagatctttgaccacatttttaacaatattttcatcattttctcgaaaagcttatgaaatccaaaatgatagagctcgttctcagcttttcaaaacatattgaatcatctcatttggagtccggacgtgaaagttatgcataatttattgaacaaggtcgaagtagtaaaagagtaaggaaaaatgatctgtagtgctatggccaaaagtgtggcgcttttttatgctaaaatgaagtttcggggagtatagcatggtgctatagcgtcgtgtcttcgacgctatacggcgctatagcgccatacatgtatttttgaatttaaatcctaattataaatggattctttctatcttttttggcttatataaaaaaaaaaaatgatgtaatttgacttttgggacgattggagagatagaaacaagcaattttgaaatttgaaaacacattgaagagcaagagagaagagattcgaagcaatcatcatcaactatcatcattagctttcttttcttcttcttctttattcttttgcttaattgtttaattatgaatagttattatgtttgtaattatgaactaaacactctttctatagtgttaatggaactattttagattatgaattaaagtttttagattattcctatatttgttctagctatttgtttatacaattttgtgttaattatcatctagttaatgtttgatcaccatgaattagtacagagattttaagttttacacttgagagatgttctaaaattggacttagagttgcatgacataggaaaagtgtgagattgagagattccactaattccatgagtttcatttaaagagaatcatattgctttattantgcttaattgattaacattgaatagagatatcttgttagttaattaaagttaaatttaccatcactcgagagaggttaatagattacattaggattcttgaaactacaaattatagaataaattggaataatcgataaactgagattcatagttcaaaatagggaaattaatgttgtaggtctgtacttttcgattgaaatcattgtttttctatttatttttaattcattttattatttcattcttaataattatttgctttaaattcccaaattaaagcctaaaatcaaaaagtataataattaataaaatttaataatcaatccctatgggtttgacaacttttttagaattaaaattttactataacaacactgtacgcttgcagtaaaaattatgtattaagtttttggcgctgttatagggaattaaaaattcttaaattattgataatatttgtttcttattttatttgttgctttgtgattcagtttatgcgaagaaattgaagtgctacaatactcacaccgctgaatcctcagattgaaagaactgtaaagtagttgaaagcaaagaaaaagttaaatttcaccatggcaacctttataataataacaacaatggccttaataataaccaaccagtacctgttgcatttgatgcacaaccatgggatgtttgtgactattgctttgtggtgaatgaaaatttgactggtattactaatctagtcatcactgctaataattttgagttgaagcctactttgatcaatataatgcaacaaaatcaattcggtggattggctattgaagattccaatatccatctagccatatttctggaagtatgtgctactgtgaagatgaatagtgttactggtgacgccataagactacgactctttcctttct

SEQ ID NO: 122939 - DNA, 1074 bp, Cannabis sativa
taaattacagtaaaatatttccaatagcaaaaagaatatataattgtttaaaagaaaatacaaaaacaatgtaaacccataattatgggtatgagcatttcaataaaaaaaccagaaaaaataacttagttgataagttccaatctctatccctaacagtctgcaacaatagaactaactcatcaagccccgccattttcgagcccaaccgatacagatccgagatccaccatcgtttgtagagaaattcaacaagagagaaagagagagaacaccatataccagagatctatacacaaaaataaaaggaaagatgagaagaaaaaaataaaagttgagcaagaatctaaaaagaagatgaaaaagaggaagtgggtacttgaatattttcagggcgaagatctgggattccagctccgttgaagctgtcgatcgctgaagacccagccatagcttgggtagatctcttcgaagcccttgtgttcggtggaggaacccaatcgaacggcctgactgaggcgctaccgtgcgtatgtatcgcgagagagggggaggcgctggtgtgtaggaggagagagggggcggcgctggtgtgggaggagagaggggaaggcgctggtgtgggaggagagtgggggaggcgctggtgtggaaggagatcgtgcgtctggggtgttggacgcagccaacgagagagaggaacgaagagagaggaacggctgatggggttttcttattttgctataggttataatatgtaaccctaataaatatatttatctcaaaaaaaaaaaaacccaaataaatatatctttttattattatttgtattactttttctttttcttccaaaaaaatattattttttttctttaatgcttagctacggtgtctataaaacttaccttttatttttattttttttatttatttattgatgactacagctgtatttgttgtttttttttttttaaaaaaaaagattatgatatagtgacacgcttagcatgtcgggacacgtttacccacacgcgtttggcgtgtcactatagattaatattttttttaaaaaaa

SEQ ID NO: 122940 - DNA, 995 bp, Cannabis sativa
taattaattctaaaaaaagaatgtctacctattagtaacctgctattacatgttaaagaaaaatataaccattgaatagtcacttatatatattaattaatttgtatggagggagagaaagagggagctacaaataaagccataaattgccggttatatttttggctgggaactctctaattaagctagacagatattttttttactcaaaaggagcacgcagttaaacagtttcctgataaagacatgtacataattaactcattttctaaaatttaccactaggagatagttttgaccacaaaatataaagagtacagaagttgtacagcccatattatactgttattaatttggtcccataacaaacaccacttcattgtccattattatttattttcaaatggtaaatacatatattatttttctattttttttttaaaaaaaaaacaagaagaagaagaggacaaagataaggtttgttctgctagctgtcatgtagtataaattaacatgaatttatttggaaagaaatatgatgatataaaaggcagacccccctcccttgggagccttgccctagagaaatctcaatgcaatcaaaatttatgggaaattttttttttaatgaatgcacgcaccctcttaaaataaatatatatattattaatgcacccttatctgttttagtatccgaaataattttttagttaaattttttctcatagttatgtacgttatagttatttaagatatcttgcaaaattttaagaaatttgaaaaagtttaccacgtcgaaaactacattcaaacagtgtattgcacgcgtgactattttattttagaaaaatgtaagtaaatggcccaatttttaactttatagataattaatgtccatttttttaaataataaagcgaatgtccttttttactttttaatacctaaaataccctttattatataaaaggtattatatgttttattcctttaatag

SEQ ID NO: 122941 - DNA, 961 bp, Cannabis sativa
  modified_base (623)..(630): a, c, t, g, unknown or other
catgttcttatatatggctcaattctctaccatttattgggacaatgtccacaataataacatcttataaatttaaaattttaagtatttatattataaatgatacaaatttaataatttttttgacaatataaatatctaaatattactaagattgtaatttttatctaattttaatagtataaactctcttagtgttctaaacaagacaaatccaattataaacagggatagaggtagagatgggattaaggggggccaaaacaaagaaaaaaatttaaaaggggccaaaatataaattttgaaaaaaaaaaacaaagaaaagtacaacaaaaaaaataaataaggttttattaatatttgggggctatgacccccttattacaaagggtggcgctgttgcatgcaaggcctagattctaaataataaaaatgtatattaattattttcgaattttattttaacaaatttaaaaactaagtctagttatacatttaagatcatttacaaaatgtatattgacgtaatagagtgggatttggccggttttgggtgcataagtggagcatactctttgttattatatcgttattggtacaattaaatatcgagtctcatatannnnnnnntaataacttttaaagaatatcactgaccagtcacagagcattatttttagaaagtgctagacactattagtacccaatagtctatgtgcaagtatatcccttataatatagagtattactattagacaccaatagtacctaacactttctaatcgtgccattttataattaattaacgatatatatgctataaaaattatcatcaaaattttttgactaggtgagaccgttggtagccttagggcaaaagtgtgacagtcagtagtcccgtaatccgtaaggggaaataccgggtaagttgtgcaaccccacatcgcctggggaaggtcaa

SEQ ID NO: 122942 - DNA, 792 bp, Cannabis sativa
atttccgccattggagctggtgcggtggtgcctatgcacaattaaaatgaataatgctgagagaaaaaagatgtattagtataaatagtggaagtgtttgatctaattggtcggtaagaaaggcacaattatcatgtgctttcggagtcgcaagtcggacctactggaagtgcgtgtcgatgtcaacgggaccacgtcccagaccagtcaattacagtaaaatcattttttttaatatccatagactcatagccaaaactacaatggcagtttctcagattaaacattgactaaactaaatgcacagtattcagtccaaaaaaggaagttgataaacattctaaaatcaaagagaaaatatcaatggcaggagcgaagatgggtgtataaaatcatatgtaaaatttaaaaatgttaagaaacctgcttgagtgaaggagagtgaatatggtgagaccgagatcccttgcggtgctcttgagagagagagatgggtaataatagtaatgggtaggaatgaatggaccaccaaccatttttgtgttttaataagtgattaagcttataatgaatcagagccataatgttaaggtgattattgtgtgccttttcctattctattctatctattggttataaaaccccagtgatgttttttttttttaattttcattttggaactaaacgaaactatgagaatcaagatacagtacctgttaacgcacaaaaataaaaaaaaataaaaaataaaataaaaaagggcttttttttataaatatggaattttttaaa

SEQ ID NO: 122943 - DNA, 609 bp, Cannabis sativa
  modified_base (183)..(195): a, c, t, g, unknown or other
aaaaaaaaaccagataagttatacaatttattatattttggaatcaaaagaaacctaaaaaagttcatatctaaatcccatcaacagcaagccgagaccccaaacaccaagtttcctcccagccgaatacaagcccattgaatgtcattcacctacacataaaacaaagagagagagagagannnnnnnnnnnnnagagagagagagagagatgaaaagagagcccatatctcaaacctaggattttgattggggatcttggacctgcgacgccggaggttatgctaccctatgcgaggcagagagaagataacacgaagtgaagaccgagcggagagaaatcgagtcaggcattaaggtttgggagagcttgaccttaacggggcattttattcgcccttaaccggagtaacattgggcagtagatttcatcaaaaaaaaaatattgggtaaccatggttgtagatgcaagagaaatgggaagaagaagagggaggcgatagatcacttatggcacgtttactatacagtaatcagaatcggaataaattaatggagaaatgtaacggaataaatgaaaaataatcggaatcaatatttgtaatatgt

SEQ ID NO: 122944 - DNA, 992 bp, Cannabis sativa
  modified_base (46)..(50): a, c, t, g, unknown or other
gaccttccccaggcgatgtggaattgcacagcttacccggtatttnnnnntacggatcacgggactactgactgccacatcaagtcagcctcccattgatgtgaatgcgaacatggagttgtatagccttatatttttgtagaatttaataccgttttgtctagagttctctcctaagagatatgtgagcaatgggggtgcttctgtcaaaaatggtatctgtacgcgcccttccatacaacaaaatgagaatttaggatttcgagtattttgtaatttttgggttcgttcctcatatgatagaatggcatcacagtatttacatgtgtgtgtaggtggtccgaaattccacgttgttttccaattagctgtttagttagcaaataaaaatttacaaataatgaattgaattttattaaagtgaatattgtaattttataaaattattatactaccgtgattttcttggctttggatattctgaaccacttggttgtcaattccataatttgtgtcatcgtcattatatagaataataactattaagacaatttaaaattattagataacggtgaaataataacttattatcgagtgtctagacatgtagcttcataggaagaattaccttttgggcaatttttatttatatacaattaaatgtataatattacaaaaaatgtggaagaaaatataattacataattctatacaattttatgaatatttacaaataaacatatatgtttacaattttaacttgttgattactttcaattgattttctaaaaaaacgcataaagctaaatatgtaaatataaaagttaatattaatatttgatatataactaaaataacatgtttactaaaagttaatatgaaattaaaaaagaatatacaaacacatttataaattttatttatattttataaacaatgcatatacatgtttattaaatatttgattggtattattaatgtttataatgtta

SEQ ID NO: 122945 - DNA, 1100 bp, Cannabis sativa
atattattagactatatattgaataatctaaaagaaatatgtcgctacgtgtttttgaactgacacttaacggacttattaattgacacttaacaactaaaaaataatacgattacaacaaaattgtaagataaaatacttttgtcgtcactttttttattagaattatatatatgtgttacaactacaaatgttaaaagagttttgccgtaaatattttttttaatgtaacattttgtgtagtagttattaggattcttaaatttaattatattaaaatatatatatatatatattttgaacaaaatcagattcaatagtttaattttagtctaatttatagcgtaaatatttaagtttaattattagttgctgataaatattaaagtttaattttttacagtaataacacctaagttatatatttctaaaagtttggtagatacttagccgttaagtgtcaagtcaatagtcacgtggtaatgtctgattggtttagctcattaaatttttatttttatttaaaaaataaataaatataccaacaagaaaatgacatgtagataattacttgacacttaacgaatagatactaacaaaaatatatagcttaagtattattactgttaaaaactaaacttaattactcataattttattctttttatgaaaaataaaataaattaatttttaaaaataaagcatgtagaagtattaaatatggacatgcatgtgaataaaataataatagtaataataataataaacaaaaaatactatgcactcacatgcctttcaacaattgtttaactatgtctttgttttcagccacaaagatcgaataatatttgacagtgtaggatattatatataataataacaaatgctatccatatataccaaatttttttaatattaatatatatatattatttaaaaaataaaaataaaataaaataaaatggtggctaataagtaggcttttaaacgattggatcggaccttggcgaaaatcaaagaggaaattacactctataccctttttatattgtcattttttatttttaccctcttttttaaagtctatcatttttacctct

SEQ ID NO: 122946 - DNA, 720 bp, Cannabis sativa
ccattcttcaaatgcctgataagaataaagtgaaataaatattaagagatattcaagtatggttaagaagatttgaaaccaaggtcacaatatcaaccctgcactgcactgaaatatctgaacattttgaacattaaagaatgcttgaaatcaaagatgaaagctagatcgtatggagtgaacttaaattattttgcaaatagatttaatttaggtatttcaaaacaaaagtatccagctactttgaaatcatggcatattttatagcaccattaatggccaactcatgacatggtatgccttaaggcatgaaacatacttcatgaaaaaatacaagatggataaaaacctgttctttccgctgctcagcttcatttgcatcagcctccagtggcttctttggcaaataataaattggaggctcagtcttagtcctcaaaaagaaaaaattcaaaacaataaaatatgagccaacaattggaaaaaagaatatatgattttgaatttctacctaaaaccttgctataaagcaaaaaacttcacacatccatcaagttgcttcaatactgctatgcaaatgaacagaaaaacttatcttcggctcaataaaatgtgaatatggacacttttgggccaaaaataaaaataacctgcaggagaagttaaacagttaaaactttaccaaatcagagtcatcaatggtgaaacactgtaaaagaa

SEQ ID NO: 122947 - DNA, 1744 bp, Cannabis sativa
atatatttataagagagcttaagggtatttatgctgcaggtggtttgaattatatgggcttttttttcaaactagttattcagttctgtgtagtttcccaaatcgtaatcataatgtgagattttgaaaccgtaaaaattatactgcaaaataagtttacagtttatactactattattatcaaatattataaaaatttaaaaactaatctaataaaattttaataatattaaaaaacaaaaacaatttaatgattaacctcataaaatatataccaatcatcacgttaaatattgtatttaaaaaattatataatatacatatatatatacatagttgttcatatatatatatatgaaaaaaaaacaaaataaaaacatattgtaaaaattactaactttgtaacagttacagtttgaactataattattaaattttaaaccataaattacaccataccatgcaattggacaaaaaatacgaaacactacaaaaccacaaaaaaatttaaactgtatttttcgtgtagtgtagtgtggtgaaagttttatgccgtctgaacgtgagtaacggtcccaaaatttttattttgtgggacctatttatatatcattaaaaaaatatttatacttatattataattattttttctaaatttatttaattttgtgaaaatttttttactacttaatttataattattgaattgaaaaaattatatttaattttttaaaagataatatttgtattagtgggtactgtattatctcttaagaaaatattttaataaacacccctacagtctccattactctctttcacatttttgttttctaattatatgacatttaaatattatacaaaaattattttatcatcaattattatttctactacgattatatagtagtaagggtaaaaaaacacatttaatatagatttttatgttattcttctatttttggagagattgaaaatggcgtacgtctttcctctgatcctcttcccctaccaaacacagtgttagtattgttgagtaagatcgttgtcgggcgtatatatatacaaatagatatatttgtttaattaaactaattaatggatttcatgatagttcgtatattatttatggatatttataatgggaaaaatataattaatggcagtactgttggaggaggatgctcagcgtgcatctcgcagcacatgaagattgatcaagtggacagcgaagagtgtgctcgaagtcacgaggaaagcctttttgtttagtttataatgttcttccaaatccagtggggctagctgccttcccctgttactgttcatcatcacaaaaaaaaaaaaaaaactttataaaatataaatatattcatttcatgatttcaatattattaaattaataattatcttttaacagttttatttcaatatttttcccttttttattgacactccaagaaagatattttagtgattctctcttatagcatatatatatgcggatctgtaccatttcccatattaatataataataattcttcattttgatatttcctaatcttatatatcaatatctcaacggtacatactcatctcttatacaaaaacaaatataagtcggtgaatagtaggctcttgaccctatatcaaatatatatatatatctttatatattaaaagtgtctactaacggcaattcttggtttaacgattcttttttatttagccttacacgattaa

SEQ ID NO: 122948 - DNA, 855 bp, Cannabis sativa
cctgtgggccaagtggtaggcgggtagactttgtctagaaattcatcaggagaagtcatacctaataattctacccaagttaatggtgctggccagctgattggtcagaccaaccagtcactgagacacccgggtgtttctatatttgatagattgcggatgactcatgatcttagaaatgatttgaacagagggagaggattggacgagcaacatgatgcgccagtcgttcagcccggagctgtgctcaaaatcccgctcaaagagatgttgacgtgactctggtcggccaaaaggttgaacaagttaatccagccgtgcaggcacagtcggatgagctaaaaaataggttccagggcctagctggtcagaagaacaacgacctcgagttagatcgagcatgtggatcccctttctccgcagagattaatgtcctaaagctacctcacaagttcaagatgccaacttggaagatgtatactgggaaggaagatcccttatcccatctcaagtatttagaaatgcaaatggacctgcaaggagcatgaggagatgtatgttaaagagtttttcctgccactctctcagaggccgcccagcaatggtatttcaagttggagcccagaaggttccactcatggaaggctttctcctcgaaattctgtgcacaattttcctcttctcaccaactctcgttgcacttagaagacctggtcaaagtgaagcaaagaccaggagaacctctctgagtgacagaggcaactaaggttgcaagggtgaccgaagacggaaaattgtctgcgatactgggggcattgaagttcttggagaactttggaaggacatcagaaagaa

SEQ ID NO: 122949 - DNA, 722 bp, Cannabis sativa
tttaacaaaatgttaaatataggtacaatatattctattatatataattattggattacataatcatattgaaaaaataatatagtgcatcaatatgtattttgtataattaatgtttaaattgcatgaaattaaaattaataatcttagcagtataattacactatatatagagttcaatatatttgtaaaaaaaaaaatctaagagttgaaatatatatagcacgctgtcataattatattgaacctgatgtaattgaacagggtttatttttggttaattataagatggaatgaattacacgttatattatatttttatatatttatataaatggagaattaagagaggtaacgtacgtaattaatgtataaattagctttataatttattgatattaatggaagcaaattataattaattataagcggctgaacgtttttgtgtaattaacagttcaattttgtctattgaaccatcatccaaaagcctatatctctatataaatatatataatataattaagcacatttataaacgaaaacaccaaattcctgtcttatctaatctaattactattttaagggccaaaactttgaaaataataccaatctacacataaatgtgtttagttatatatatgcaaactatatatattaatatataattcatatatatgtattaataaatactgttaatacgaattatttagccttattat

SEQ ID NO: 122950 - DNA, 1302 bp, Cannabis sativa
aaaataactgatccaatctgcactattgcggattggattggatttaaactgttatgcggatcggattgaattcaaaatatgaaatctgcacttagtgcgaattagatattatttgaccaaaacagtgcggattggatcggattaacacccatgccctttttcagggtctctatttatagagaaattaagacccacatatggtacattggtacaattcgtggctaaataaatggagaaaatgactccaatttctggtaaaagtgggaacatggggacaaatatagcatctggagtgacttgcaggtgagtgcattgttgcttgctacatgtccaattgaggacttccaatccaatacatgcccatcgttattgttaataatcaatttgggctcaattactattagagtaagagatagattggtaatgagctctggacgtgtggcctgggaacactttgatgaggaaaagatatggacacataagcttgggccattcctcttctttttcaccatttaccaacttttgctcaaatctgaaatataacacaaaattaaagtaaagtaaatatttcaattcaaaataaatttaacattaaaacttatcaaatatttaatttatattaattttatgtacataattaaggactgaaaatgtacaaatttgaaccttaatctcaacccccaactagcttattgctagtctctagcaattcaagcgaaagaataataatgtcaaaacataatattttcgggttaaattttttaaaaatgacacaattattcaagcaaaatgttagtaataagccaatatgaactatgcaaagttatcttgaataaatttagagttgtgagtgtgtgcaccaatcttaaacctttttaccgcaaaccatagcacataaaagctttcgaaaaatgaaccaagtaaaagtctaaactctattaggctcacaagtatttgaaaatatttattcatggctacatatttcactcatagagttgaaaattaaaaagtgagcactcatgatggatttgacaatttaggactaacatttgaataaacattgaaacgaagataggctatgaattatttagacaaaccactgtaaagagtactacaaactagctttttggaacttttgaaagaaaatagacaaccttttacatttattctaggagccataacaaatgaaaaattaactaatacaaactttttttttccgttttttttgaacaagaggcaacatgttagacaaatggatagaaatgttgctcttgccatttttttttttttttgactaagagg

SEQ ID NO: 122951 - DNA, 697 bp, Cannabis sativa
  modified_base (666)..(671): a, c, t, g, unknown or other
tatgagctgagtttgcatgttgtttgtgtggatgatgttcacaagagaaagataaggttttctttgtgattttatgccttatagttatgaatctgagtttggaattggatgttgattgtgttcatgtctaggttatgcaacttttggactcgatagtaaatttcaggtaacttgttcttgttgttgtagttttggtagtttattgagtgagcatgagagtatttttatggtgttcttgagtttataaaaatatgattgtgtaattgaattttatttgtttaaagtatttaagcatgtattttgatgtttgtgatgcctagaaacaatttgatttggtgtaaaaattaattgcttaggttgtagcaatcttgggtttaatttgttaatgttcggattaggtaaatctagacttttgggcattttttgggtttcgaacctggtggtcgcgaccaggctcaaaaccagagaggggtagccgttatctaggctctggtcgagacgggctttagtctggtcgcgactagatgatagtgacaattcaattattttttgatatggtccagtgttgtagtcttatatgtggaaatttatgtatgtgatttttgaggaattaaccctagtttgtaaaactcggggattgtaactagtgttgggttttatgccctnnnnnnaactccatttcaatgtaatctatttt

SEQ ID NO: 122952 - DNA, 1470 bp, Cannabis sativa
  modified_base (34)..(42): a, c, t, g, unknown or other
attgttttacaaattcatatttaggatgttaaannnnnnnnntggtagtaaatctaaatcctggtaaaacataatccaacatggccttatgctgtccagaagctagccgtccttgtgctgaccatacggctggccaggggtggctggtccatcattcatcatcctatttgagtgtcgaaactccctattggctgaagggctgagtagatgacctagccttctttttggtgagttgtattgttatgtggcgctaatatcgacctcgtagacatggcacattaggtaggagaaaatcaggataaaaaaattaaataaaaagatttattcaaaagaatgcattttaattttgttttcaagcagtgactaggaatttggagatgtctaaatactcaactctcttgggggtaggatttacaactctgtacccctaaaaatgtggaatgcccttttattattatgttaaattctgttgattatttttattctaaaaattaatggaatgtggaagtagaaatctttggctaaatctttaacatttttagctattttcttgccatattcaaaataaatgtgtataccattacgtctgagatcgggaatagaaaactttacctaaattttttaataatttcatctattttctcaccatactttgaaaaaggtgaattcttcaagcatcatttgctttgttaattaaaaatgtgggaataaaaatctagccttaattttgaaacatattcagtcagtttcttactacttgttaaattaacgaacccttgttcagtcgagaatcaatattaaactagttacagagttccacctgaaactgaagactcctaaagctagaagtaagccactctctcgccgtacctaagattaataactcattaagtcaaggttatctgggaacaaaagtacaaactaaagttcgcaagcgtgtaacctctagaatcgaaaccctagggaatcgggagtaagtatagcgttttttatcacttggaagcagaagcagaaggaggagctagaatccaaaaatcctaagtatcctaagtattaattcttggaattaagtactaagaaacttaagaggaagatttgcttgtcaatatttcctaacacgcgggacacataacctgcaacttaaaacggtcctaattgaagcttaagccttagagttcatgccattagaaccataatgtcaagacatccaaagtctcttgaaagcagttttgcaaataacaagaatttacgagaggcaaagtgatgtaaaaacatgaaagaaaaaggagtgaggaaaaagctaaagttattacaaataacctcatggttaaggcatttaagatgcctctgcaaataccaaaggggtgccatgggccaccaaaaagaaaaaaaaggaaaaaaatagaagggaatgttaaagcctcatggatgagtctggtcctagacttggtctcgagctgaagtttggcc

SEQ ID NO: 122953 - DNA, 743 bp, Cannabis sativa
aaaccagtaagagtattttctcaatgatggtattgaataaatttgactataccatacaccctatgagcatgcaaatcataattcctctcactttcaaactttcgggtggcataaatgttctcatcacgctcattctcacgatagtaaaatctagaattcacagcttgagatggagagatattaccaggagaagaacacttcataggtgctggagcagatttggtcaaaggaggctcgggttcgagtttagtttcctcactgtcagaggaaactccaaagtcttatggagcttctatttcagaatggagagacctagatttggcctcagaatcttcagaggagacctccataggatcttcttcttcagaactcgaagaagccgaagggggattcattttcagcttcttggcagaatgaatgggtctgtcatggcttcgtttagagcaaagttccttcttgagagatgcctactaggcacgagtgcgagtggaaggccctgttggagttgaggcagcaactcccttacttgaagtagcaagaggagacgcagtaggacgaggtggagacccctttgatgaagaagatgatgaagtggaaaatttttggggacgcacatatttcgttgcaacttgcttggggattcatttcggcttgggattcacaggctgagattcacactgaggaagcgatgaatctcctgtgtttgatgcagttgttgcagcagcaggaggagcattcgaggg

SEQ ID NO: 122954 - DNA, 1363 bp, Cannabis sativa
  modified_base (1316)..(1326): a, c, t, g, unknown or other
gactttaatagtcaagtcaggaaacatcttcttcttgaacgacatcttttgtttaaactcgttcaagtcagatgacccttccggacttaaccccgtaattaagacaaactcctccaaaccaaactggaaaactctgtcccggatcataaaccacttctctaaatcctccctctcctgatgaacctccctcactaaaccaaggtgaggcaaggcaatgttccacttaatgttgcgcatcttaagaaattgcaaaaggcgtcgtcaaatataacgtcttttgagaaggagtagggtttccattaagcgccttgataacccacgggttattccaaatctgaagcttacttgcgaaacggtgctccagtttcattttcaagtaaacatcctgtaaaaacaaccagttataaaataagatttagccagtgacaaaaacaacaagaacataataaagaaataactggttccataaacaaaaataaattcacattaaaaaaaaacaaaatatatgtaaaaagaaaaacttaaagtacttaccacattggaaaaacttgtggattttttaacagactcttcaggtatcgaaggactagggcccttcgaagcaacacatttaacgtcagcacgtgttgcatgacgtactgacagtttcggaacatcagaatcagccaccgcaacttgaaaaaataggaaacaaaaaataaaaatatacataagaaaaacaacattcacaaacagtaaaaaaaaaaaaaattataaacatctaaacacctttttcttctggccgcgagtttccctaacagtgggctatatcttttttttttttcaactcgaacattataactggttctaggttcaatgggttcaacaaaatcatcatctaatgcatcgcccttaaccttgaaacacaaaaaagaaaacagttaaaaaaaatacaaaaacaaaactttaaaagatcaaacaaaaattgagaaaccggttataatactaaaacaagcaatgaaacacaaaacatgttaaaaactctaacaaaagaaatcggttaaaaaagagtataaaaattaaattacttaaaataaatatttgaaaacccatttcttaaaaaaaaaaccagttataaataatataaaaactaaattacatacaataaacatttacaaacccatttcttaaataaaaaaaccagttataaataatataaaaataaattacatacaataaacatttaaaaaccagttaaaatacaaaaacaataacataacataggaatgatactcacctttttcttctttgcatgggagtgctgaacataaatatgnnnnnnnnnnnttctactggtgtataaaagtcaagtgatgattccctt

SEQ ID NO: 122955 - DNA, 1727 bp, Cannabis sativa
ttttattaaataaggagtaagacatcataccaaccaagtcttgagagtgttattagttgtatcaatttgatttatgaataaggagtaagacatggattttttagacaaacaatcctagatcaaaaacaaaaacaaaaaaaaattaaaagcttgagattgttattagttgtattgatttgatttatgaataaggattaagacatggattttttagacagagctagaatccttatagtccattcaattgaagaaaaaaatcagaaacattaaatatcatatcgtatggtttcctggtcattactttatttgtctatatatgaaaagctctaaacgtaatctcatacactcatagattcataacttacaagaatcattcaaaagagagaagaagataaaataacaaggcaatctgaaaatggggtcagagtctcagaacaccaaaatttcatcatcaaatctcgatcatcatcatcacgtagttttgttccctttcatggcaaaaggccacactattccactccttcacctagctcgtgtcctcctcaaccgccatgtgacaattaccatcttcaccactcccgccaacagaaccttcatcaccaaatttctcgcaggcacctcagctgccatcgttgagcttcccttcccgaaaaacataccgggagtccctaccggggtagagagtaccgaggctttcccaaccatgtccatgtccatgttccactccttcgcgttgggcacccaacacatgaaacccgacttagatcgagctctggagaatattcaatctccagtgagcttcatggtctctgatgggtttctctggtggacccttgattcggcctccaagctgggattcccacggctcgttttctacggtatgtcacattatgcaatggctgtgttccattctctttttaacactaaaaagtctgagcaagataatgataataacaataagcagacagagacagagacagagacagagacagtggttcctgattttccttggattaaactcgcccgaagcgaatatgacccaagtgttcacatggataaagatgagtctcttgctcatgaattcatgtcaaaagctactgaggccacaaacaatagttttggtatgatttacaacagcttctatgagctggagccagtgttcgccgactactggaaccaaaaggctcggcccaaatcatggcctgttgggcctcttagcttacatgacatgtcatcatcgaactccacgaaaacagagaacagaggccttgttgttcatccatggctcgacaaggaatcgagttcggttctttacgtggcatttgggtctcaagcaactgtttcatcggaacaacttagagaaatcgcaaaagggttggaagattcaaacgtaaatttcttctgggcgctacgaaaatcagagccagaggagaacaagttcttagaagagttcgaaaacagagtgaaaaacagaggaatagtggtgagaggttgggttgaccaaatggagatattgaaccacaaaagcgttaaagggtttttcagtcactgtggttggaactcagtggtggagagtttaagtgctggagtgccaattctaggttttccaatgatggcggagcagcctataaatgcgaaaatggtggcggaagagattaaggttggggtgagagttaagagttgtgatggatcattgaatggggttgtgaagagtgaggaggtgagta

SEQ ID NO: 122956 - DNA, 1114 bp, Cannabis sativa
  modified_base (1009)..(1017): a, c, t, g, unknown or other
gggtagctgcctatttattcagggcgttacactaatgatggctcaaagccttcctattattaaaatgagtaaaagttgaagtcgaagatctgatggtggtctgacggtagcccgacgccacctataaatatagaatatggtctaatggtagtctgataccttcctgactagtttaatcaatgaagcttaaaatttataaatgtagaatatggttcgatggtggcctgatactttttatgtacaaaaacataaaaaatagtagtattagaccactatcgacgtagatgagaatgaagaatatgtatggtaaagttataagaaaaaaaagagtattatggatattaatataaagtgcttatttttttttttattttgataagtttgtatttaaaaaatttaattcacaagactcaaattaatcttgattaattcatttataattttatagataattgataaaaagcattagtaacaatatctacttgttcatttttgtgcaactttaaccaattatattagtaacaatacaatacaatcattaagattttgtttggtatggtgtatagttcaatgtttttttttttttgagaaaagactgttattataaattagaatgagtcatttagaacaacagagaaaatagcagagggaatatcctcatgccagatacaaacattatcctgcactaaagcctgttttgctaatccatgagccgcttgattagcagttcgtctaacatgaagaacacaagctttagggagattggataaatgttgtttaatatctatgactaaatcgctaaaataggacctcgaagatgtttgattattcacagcatttgcatgtaacaaagaatctgtttcgatgaaattcaaacacaaattgagatcttgggccattagcaagccattgaacatcgccttagtgtaatgcattggaattaagaaaatagattagcaaaaatcttaactagttaattgagttttattgtggaattatattattatannnnnnnnnatatgtgaattaatatgagatatgacatgttaagatggttatcggttcaaggacgcaaggtgcccctgttttttcagggtaagaaggggtagagaaa

SEQ ID NO: 122957 - DNA, 811 bp, Cannabis sativa
aggtttaagaagaattgcggttaccctacaaataaaacgtgaaatagaattaagtcagcaagcaggttctgatagtcatctcatgagtcttacattttataaaattaagagaatatattttaatagaaatgaaaatgtaatgaaaaaacatgctggagtattatatggattagagttatactaggatttattaattattattattgtaaatgtattttattttattcatatccacttattttcaataaaaaaaatattttcatctggttcaaaagtttaatgatcattttgtatttttagttaattatgaattatatgaatctatatccaaatcaaaataataatgtaattcttgaattttttttattaattaacaatagagaaattatatttgcacaataataattataaatacaccccattttaaatgaaaaacttaattacattttgatcattgtacaatgttaccaaaatatataatatataattttaaattatgagtttattttaacttttatttaataattataccttataaaattaaaatgaagtatttctttgaagtcctaaaaaatttattattagaggaaaacaattgatcaatagagaatattaatataagcataacaaattatatatttaattatttcaataaattttatattctccaattttttttatattcacttatttatatatagggtaaatattattttagaccttgtgttttgcaaaagttactaattggactctctattttgttaaatgatgaaatggatcctgtattttcaaaaattgttcaaataggacc

SEQ ID NO: 122958 - DNA, 1384 bp, Cannabis sativa
  modified_base (1147)..(1147): a, c, t, g, unknown or other
aaaaacaatttgggaagaaaaatattagaaagcggtgaatgatgaggccccaaagcattagatgagtcaggagtaattagtcatgagttgtctcacaactgcacaaaaggtttcctaggaaatgtagttatgctgcacacctactcggacaattctcaagaccccacgacaacgacaaattagtacctttacaacaattattgaatctttcatcatctcatcaatgtatatctctacatctcttttttacactcttaccacatttttacaattttttatttttattttttatttttttattattccaccgtttggaataaaaaaagtaatgttttaaaatatctaatgtgcaaatttcaaagacagctaaagaccagttggctaattaccaacctagcttttaatttttttctttccttatatttaactttattttaattagattgaatttatattttaattaaagaaaatgcataccaaaatactttttgagtatgtttcaaaaggaaggggagttatatttaaagaaatttacacaatatacttcattttttttttataattttatgaattttttttatatatttttacacacttttcttttttatttattttttttacatattttcatgaacaataacattattctgaaacaataaaaaaataatactctatatatttgtataaacaaactatattgtaaaataatatttatttcttttagaagcattagaaagacaacacttcatatatttgtgaaaaataataaaattgtaaaaatgtaagaaaatcaacaaattcgtaaaaatgtaaaaaaaattgtcacttttatatttttatgaaatcattccttatatttacaccccatataaaattataagcacatcgtaaaatttttaaaatattgacttaaattaattttaaaaaattattcttaatatttttttaatttttttttacataattttgtattaaattcaagagtaatttacggtataaatactcaagtttaacttttgattgtaaataaataataaataccttaatttcttaatttaatttaatttttaaatttttaacagtttaacagtaataatatctaagttataattctagaacttctgtaggtacctgactgttaagtgtnaagtaaattgtcacgtgacaatccatgattggtcgaggtcatgaatttttatttttattgaaaaaagaatttaaatgtaacaataaaaaaataatttgtggataatggcttgacatttaacgttcgggtacctacaaagttccagaaatataatttaggtattattactgccaaaaattaaacttagatatgtatttacaaccaagagttatgcaatattggtagaataggtaactt

SEQ ID NO: 122959 - DNA, 722 bp, Cannabis sativa
catcccacttgaccttccccatgcagtgtgggattgcacagcttacccagtattttcccttacggatcacgggactactgactgtcacattgttggagtcggtagtaacttcctcattgtcgaacgttctctgttccacttagttagtcgcacatccactgtggttggtccgcctacccacatcaaccatcgcacacatccaccatcgcactaaacgtcaattctctctctttctagtttttctcctcaaccaaaaccacatgggtaagcgtgttttaaacaattttagaactatatagtttatttctagtagatctatgtggttgtgatttgtattgtatttctttactaagattttcctaaactgattaaagtaagagtaaagggattagctagattaatagataatagagatggaaatttttatgtggttcaggtgttcatgaaccctagtccatgagtcacttgtatttggctaaatgacctttgttgtatgtatttttaggcataagacacgtggcatgattaaagaacaagatgtattagctgaaaggaataatcgaaataactcataagaactcctggatgggacatcttgacaatcttgcaagtaactgttgggctttgtaccctaaataaaactctattttttcaatgtaatcttttctattcaattatcaataaagaaacatattaattttcattatttatttaatgtgtta

SEQ ID NO: 122960 - DNA, 1682 bp, Cannabis sativa
  modified_base (1655)..(1656): a, c, t, g, unknown or other
acctcaaatttggccaaccgacaatagagtcgtatttatgactaatatcaccacgtgtacacaataagaacaagtaaataaaagggccacaatattttatagaggtttggccctcttagctagcgggtaatgacatacccttttggttgtattgatattagagataataccactcaaattacaagtattgtggattctagagtggctctcttaaggttacaatagcaagaatcaaaaggcgaatctcaagttggtcagatgagggagacttactctcttctacactgctaggggcatgtagaagagagagagagagggagagagggatagagagagaaagagaactacggctttagaacttaagagattagagagattagatttagtttagtgctctttatataggagagcttacaagagattataggttgatatcctttaaaatgtagagatgtcccttatttgttacatattaaaataataagtatataacatgttaattagtccacaagactagataaataattgaactttatctcctatttttgggggttgttgaagtccaattcgtaattggaagtatttttcatgctaaaagctgtagaggcacaaaaagtgcctgctaggagagagattggtaggccttccctttgctggaggctgtccggcctatgctggcaatagggctgggtagggggtccgaccagaccctttagtttggccagttcattgtcttttgtcccgtttaaatatttggactcctcatcaattggtatgttatgcatgctgacctggccttcttcctgacaagttgtactccacgtggcatcaatcttacatatgtggacatgccacgtcatgtgggcaaaaattgggataacatttgccccccaagtccctgtgtagatgcctgtacggataggaactttccaactttagttttgattgttggagtcttaaccgggcaggttttatacaataatttcagttataaaatattttctttaatttggctactcacgtttcccaatagggaactgataatatttagcatggttattttacaggtagcatggttgtttggtgcatgttggattagtggagcacactaaaaactataaaaggttatttggtaaagctccttatttcacactttattttctctctttaaaaaaggaaacgagagaagctcttcacttccccttgagaccgatggacctaagtccctcaaatcctaggattctcactttgtttcgacgatccaagctttcgaccagcttccttgacggttttcactagtgggtaagctttcaaatccctttctctacttgttttcttgaatttgccattgttgtgtttgaccgtttgcatgcttcatacattcttgatttcatgttagattgtagtgtgatttcctgatgaaaaagattgaatttttacatttattgtgattcttgactctttgagtcatgaagaacacgtttgagttgaaaaagtacacattttgatcaaaaacacaccctagccgaccctaggggtcttatttaagacctggccggttctagggttttgtcaagggggaaagccagttctagggtttaacctaggaatctgggtggctcttgcatgggtcatgtgttgggttttatgccctnnataaaactctttacaatctgattagt

SEQ ID NO: 122961 - DNA, 671 bp, Cannabis sativa
taataatcatgctcatctataagatatttacatagcattatataatttatttcttaaaaaagaataaaatgagaaacatttctttataattttaaacttagtaacgggtctctcgagacactaaagaagaaaaaggagacaactttgattgaatataaaagaaaaagacagtttcttttttcaaaatttcaaaactttcttttcttcaacatacatacatatatatacattaaaaatttagtcttgtgatatattgtataaaagggttcatttatatttatacacagaaaaaagttcagtgattatctcaacccaactctgtctttttccttttctttctctctcttctttgtttggctcctagtaatagtattacactcatctttcttcatcaagtcctggattttggtcaggaatctgttacccttttcttatcccaactttcattttgaagggtttcctttgttttctcctgatatgctcaactgaaatgaaagtttcgatttttacttttgtttaatgagtttttagagatatgggttatttgaagtatgagatgatgttcttcttcttcattggtttggtgttgattttcaaggctccattttgtaatggactgactgacccaggagatggtaaaggattgttattgttttttttgtttgtttctt

SEQ ID NO: 122962 - DNA, 1339 bp, Cannabis sativa
  modified_base (1275)..(1312): a, c, t, g, unknown or other
ggaaattagttagcgggaagaagcgtgacatctctagggacagggagttttactcaatggttgatccccaaatcgtctaaaagtcgttaagactaacgggaaggtttgaagtaatagccattggaacaatgtactttaagatgcaaccagcccttcaaaagcctaacaaattagaaataaagctctaaaaggaaatagtaaaaatcctactactattacaaccagtccctgcggatagggcaatgttaattgtctctgcaaataaaaaaaaagtaatgatagggagaaatgtaagaaaaacaataaaaaaacaaacaataaacaataaaaaaaatattaacaaaggaaccctgcgtcatgttctgggggttcagtgatggatgctaccagacgatttggaatattctacactagacattcgctccacagtccccctataaatgtcatggaggaccctcatatcccgtatgaggagagtctattgagcatagttaatttccaacaattggatctccttcttcaagtccttaatttgatgtttggccttagtaagttcagccagaagggtgtccttaacattgcgcaggtcacagttgttcaccctggcttgctccagctccataatcagtataccggcttcaccagcagccctctccgccaacaaagccacctaatgtaataggcagataagaaaaaaggggatgaataccatgatcaaggtcaaaataaaaaaacaagaaagaaaagaaaatcttttagaaccttaccccaaccgcctcttgcttagcaaaatggactaaggcaaaggtgttgacactattacaatatgcccaaatgcccaagggtagtttggaggcatttctggccacctggtccaaaagttcacctgcaaatggtgcaacttcactccctaccttgggggctaaatacttatctaagccctccacttcccctataggcctagctggggttaaagaatgacggccatctgagatttcagctttccttacggccgagagcacagtagttcgtctgcatatcaacactttctccgcttccaaatactcccccaaagccttatcaacttccctctccctctatatggcatggcggttgagaggaatgttctttctgggaaacatgaaccccacgaagggtatctttgggagggtagaaggattatatgggtggggatggcccagccttaactatgggtctgttgggttttatgccctaaataaaactctattcatgtaatccagattattcaatatnnnnnnnnnnnnnnnnnnnnnnnnnnnnnnnnnnnnnntgttttggttcaccttatcaattgttt

SEQ ID NO: 122963 - DNA, 822 bp, Cannabis sativa
taatggtatttctcatgaattttctgctcccaacaaaatggagtggttgaaagaaagaaccgaactctaacaaaaatggctagggtgatgttaaatagcaaaaagcttacaaggtgtcttagggacgaagcaatcaacattgcttcctatactataaacatagtgttgttacatccaggtactcacaagacaccatatgaaatcttgaaaggtaagaaatcaaatgtaagtcattttcataaatttggttgtatttgttatattttgagagactgtgattacactggaaaaattgatgttaaaagtaatgaaggtgtgtttataggatattttattaatcataggacttatcgtgtgtataatatgagaacccaagctgtaataaaatctgctaatgttgttgttgatgatctaaaatatttctctgagtttttaatagaagaacagattgaaaagttattggaaaagccttctgttgtggcaaatgaaattgaaagatccacaaaagttattcctgagactacattgcaagactctgtagctacaaatgttgttcttccagaatcttcaccagcaaaacaatttgagcgtccttcaaatgtgatcacttattcaatccaaagggaaccatcctcaaaggttaaaaagaaccatccttttgatctcatccttgcaaacttggatgaaagcatggtaacaagaagaaaacttactaatataattaaattcttgtgttttgtttcttcttcagaatcgaaaactgtgaaagaagctatgatggatgaagattggttcctagcaatgcaggatgagctacatcag

SEQ ID NO: 122964 - DNA, 672 bp, Cannabis sativa
tacttagctacagtcctcgtgggaacgatctcacttacctaagtattacttgttaaaacgatacatatacttgcgtgttgaatttatcacaacatgattatcgtctaaactactctgatggtcatggcgatgatgaagttgaaagtcaggccaacaaccaaccaaatcctaagctggggtgttatcaagttggaggaccgtatgcctcgtcttatatggacctttagataatgtagagattatttagataactaatattagtaaaaagtaattctaataaaaatttcactttatgctaaaaatgtggaggtgagcaacaaatttaatcaaagtgtgttgagacattattgattaatttatttaattttgaagtcaaattctaaatcaagtttggttatgtgcatatgtgaaaatattgacatatttactgtcaaattttggtgaaaataatttcaagaaggaaattaaatttaagaaaatttttagagacaaagcggtcttctatagtttaaaatcaagatgttatcttgatagtgaaatgtgaaagtgtggggttgatactccaacgtgaaaattttaagacatgtttggtgtcttaaaataaagtgtaatttagacatgtttggtgtctaaattagtgtttagttgtgatatgtttggtatcaaaattat

SEQ ID NO: 122965 - DNA, 2620 bp, Cannabis sativa
ataatattcaaatattgaattgcaaatatgaaaaagaaacaactaaagtatgtttgaactttattttaaacatcgtaaattattcaaatttttttaaaatggatgagatgcctcctacgaaaattatatataagggttaggaactgtaaatatacacttcaagaaagtaggcatcagtgcggacaaattttgtcggtaaagagagtctttttcgttagtgataacaattaattgtgacattttattactaaagagtcgtcactgataactcgtcgttgagggccatcaatgacgacaaagtcgtcactaaatattttctttttctaaaacaaattaataattataatttaaattattttttataaaaattaattttgtacaaatatatatatattttttaattggaatacaaaatcatgttaacttttagaaatttattcggaaatataattatttgattagagaaaagtttatttttaaaagattttttttggtgaaaataatttggaattagaatattaattattttcaaacttgattctagagatataaatgggatattttaaaattaacttaaatttaaaagtaaaatttagggttccaaatgtaaatttacacttttattcgtatcagattttctttattaaaaacaaataaataaattgttatcccaaaatttgcgcaaggtgatgtggcatctatctgagtgactcgtgaggaacattttatgacctggacgggcaatactctccatgatgtactgtccaaaataatttatcatttataaacaactaattggaagaagaatttgaaaatattcgaacaagatacattgcaccatccaaccagcatcaatctcgcaactagctcgcatgtaccgaccagagtaaatgctgctagaatatctccaaagatactttccttaaatgttcaagcgtttaacttcaatcacatccctaaatttgtgggatagatttgcactgacaagaaaaaagaggaaacctacctagttttccttttttatctctgtgttttaggaaaataaattagcttccccatgtatttattaattgttttgggaaactaaataggtgtaatttttgggattttttctacaataaactaaaacgggaagcaatttacatatataacctaaaaagaaaaaacaaacataaatagaaaacaacagtttctatttacaaaaataccgcccaactaaaaaaaaacggaggagagcctccttctttgtgacccagccgaaacaccccaaacaatcaaatctctaccattttctttcaaaaactagagaaatcagctcaaaacaagatgcagatctcaaggaaaaagcaatcaaattctgaaaaatccaaatacaaaaaggggaaaaaaagagtaatcaacctccattgctatacaaaaaacgcaaaaacaacctacaatcaaaaactcaccgcgtacagaggagaggattcgaagagaaggacatcagaacattgaacctcacccatagtcgaatcagagaaataattaaaggaacaacattttcttcatgaacctcttcctaatttttattctacataattgaaaatgtgttataaattgagaaaatcaggaaaaaaatgaaatgataaggaaatttagtaaatctgaacaaaaaatcaaagggattgcatctaaaaaaatagtaatgtatataattagaaactacaggattttaatcaataaactgttatttataagttgttttctagtaatataattgttatttgagtacctgcaaacaagaattgttgaatttattcttattaacgattacatgcttgaaaatagttatttaatagttgatttgacagataaaaatagtcgttgagattgaaatgttatttgcaactattgtcactcaaaagagttgtttattagtttttttgttagattgaaatagttatttgcaacttctgaaactgaaaaaaaaatattaaatgaacattattttaggacatggaacctctacaaattctggtacagagcaatgggcattgagatgacaataaaaactatgttgaatatgaatcaagtggagaattaatttccagcaattgcacttttgatgaactagtgaaaataatgatggaaaaactccaatgcaaccctgaaacaacacaaatacaactgaaataccaattgaaagaaggatgtaaaccattacaaataagggattacaaaagtctgttgttctacatagagctattaagcaaagagactgatttcacacggtacccattgtgatgtgaacaaaatcagcaacacaacaacacctaaccaaataatgatgtgcaacaatatgatgatgatagcatatgaaaacaactcagcacaggcagatgtgcagcaacctggaaacaacccagcaacaacttccaaacaacaactatctacacacacaattggatcagttcaagatgatacattttttttctcgagacagggactgtaacatcagaatcaaccatccaacaaccagaaaacaacagcgaaaaaactccaacattagatgaatatttcgactttaccgactacacaaagcttgtggctgcaaaaatggtacaacagcttgaaaaca

SEQ ID NO: 122966 - DNA, 878 bp, Cannabis sativa
tgttgaaatagtaattttttggtgttgatttaacagcaaatttggatttctccattggagatgccctcaccacaaaaaaataggttgtttgatagcactccatgtcagttgtggtattcaaggaatattttttgctctatattcccaacacgtatatttattttcatgcaagtgaaacacattgacagaagtgttaagtaccttgggtccaatcttctcatttgaacaagcccttttgcccttttgtacaacgtctgaccagtcttccatgagtgactacaaccactcgtacgttatttcctactatcattctctacccaaaagtattgggcttgagctgatttctttaaaggagaatgaaagaaatatgtgaaaacataggagtttaactccaaggaacatgatgctatgtatcaccaaaccaatagtttttaaatcagctgcaaattcacttaagtctctttaaattcatacgtagagaattggatagctcaaaactgaatggttttattacaggaaaactttcatgaattattgactttcgtttgctaatcatgtgtataaagtgcaagtctgtgtagaagagtaagtaaaatttatgtctagataacggggatacaaattcaccacctgaaccgccatccttgtttttatcacatcaataagagtcgttacggccagttaatgctcgtgtaaatgtatacaaattcattatatgagtttgatagtaaaaaaaatttagaaaagaaaaataacaacacatagacacaaaaagaaagataagtaggacaataagagctcgcatgttttattgtattagtattatttaatataatatcatgtttggtattgatttgtattaatagattgtgtaaagt

SEQ ID NO: 122967 - DNA, 521 bp, Cannabis sativa
atttaaattagaattggtctccatgatcttagaagagaaataatttgacctaattgtattcataagtcaagaaaaccattcattaatattggttaaaacaactgtactagaaatagaataatatattatattgtatgcaaatactaatttggtcagtactgatattaatatatgacccacatgatctggtctcacagcaagtatatatctcattccaactactaaaaaccatatatatatatatcacacaaaattatattcaaagtcatcaaatggaagacatggatgatgctgaatatatatgagacaaggtatatgttatattcattctcagctatatacgaataaaaatattttccattattgatatttcatgattaaaatagagatttaataatgaaataacgatattcttatatagcttaaactaggaaacaaaagccgcgcgttgcgcggttttaaaaaaaatcataagctatatatattattgaaaaaagtttattttttaaatgtgatttttt

SEQ ID NO: 122968 - DNA, 574 bp, Cannabis sativa
  modified_base (97)..(101): a, c, t, g, unknown or other
  modified_base (527)..(537): a, c, t, g, unknown or other
ataatatctttaccaagatcaatatcgtcccagtctaacgtatactccatacatccaatactagcatactttgccaatgtcctagaaagaacataannnnnatccaaggtgtaagtaaactttattgcctttgctaccttctgatgaaccagaatccctttcaaactttctctccacaatccaaagccccctattgatcttcttgagttcaaatctagatgagctactcatctttaaatcacgatcaatcttagatgagtctcggtctcttctttcggatcatgaacactaactctgatttgttagaaattctatctcaacaacaacatcaagactcatctaaaacacacacgaattgatcaaaaattcatagaaatcaaacaccaaaatagaattgaaattaatcaatcatgaataaaaaattaaattgaagagggagacaagatttatcttggttctggtcctaaaaatcaaatcgattcctaaccattaggggtgttcacaaagtatccgatccaatccaatcnnnnnnnnnnnatccaatccaatccgcaaaatgtggatatccgcactt

SEQ ID NO: 122969 - DNA, 1271 bp, Cannabis sativa
atcaacaacaaggaagagttgaaaaaaaacataggcatgtaactgaaatgggtttaactttgttagctcaagccaaaatgccattaaatttttggtgggatgcttgtgtttctgcagtatacctaataataggctacctactgttgttaataagtacatttccccttttcaaagtctgtttggccttaaaccagattatagttttttaaagacattcgggtgtgcatgctttcccttccttaggccttacaatcaacataaatttcaatttaagacctctaaatgtgtttttcttgggtatagtccttttcataaaggctataggtgccttcactcttcggaaagaatctatattgctcaaagtgtcaacttcaatgagcaggaatttctctattcagacctgtttaccaacatacaccagtcatcctatcacaaaaatctaatagcccttgccttcataattcctaatgtatctcttacagataactactctcatattcagtttgggtctctcaatcttctttctgaaaattcacataatccacctggtgtctccacttctcatgttgatgaacctgtcgaaaccacttctgcagatgacaatatatctgcttcacctatctcagataatgcctcggttcacactgaggaaactgttctgccaactcctatcatttctcccattcctccaccattaccacatggtcatcccatgcaaaccagatcaaagtctggcatatacaaacccaaaatattccttgttactgcctcacaaaatcatatttatgaactaccaaaaactgtcaagcaggctctaagcttacctcattggaagaaagttatggatcatgaaaacttggctctcaaaaggaagcaaacatacatattagtccccagaactgctgacatgaatgtgctctctaataaatggattttcagggttaaatacaataaggatggatatcttgacaaattcaaagctcgattggtagtaagaggatttcaacaaacacccggtttggattttcacaatacttttagccctgtcataaagacttccactataagaattatattctccctagctgttacctatgattgggacatccaacaaatagatgtcaacaatgcttttctcaatggggagttaaaagaaacagtgtatatgcagcagcgacaagggtatgaggatacaaccaaacctaattatgtttgtcaactcaacaaatccctctatggtctcaaacaagcaccaagggcttggtttgaca

SEQ ID NO: 122970 - DNA, 1340 bp, Cannabis sativa
gttatattttagatttcaaaacgattttcaaatctttgctctatatttttctatagttgtatatgttcactactacaatttgaccttttagtgacactctatagtgacgcgcagaaaattgtgggtcactaaagaattaggaagtgtatttagtgacacacataattagactctaaattttcagcattagtctcatgcaacgtgagtcactaaaaatataaagtgtcactaaagagtaataccaataattttttatttttttatttttactaaaaatacagaccaatagagtcacgccaggagagagtgggaatacttattgcaacatgtctcacgtgtcactatatataattaatcttaatttttttaaaaagaaaaagaaaaaataatggcacacatatcatttaattttttttttcagctgacattaattacacgctgaaaggacatttaaaaaaataataacaaaaaataaaaaattgttagctaaaaaggaatacaattagggtttacatcaaaaaaaaaacaattttagcctcctctctccttctttcttctctctatttttcaccgcgcctcttcccctcttttttcttctgcccagagccgattaaccataactccggtgacctgctgttgaaacgaacaataaaactgaaatccttgcccccaaaacctctagatccgccactcctttttttctttttgtctgatgaatctcatatccacctccatctctctctctctctctttttctgtgttctttgtccctatgtggatctctagaggttcttcgttcgtctctctccgctctctttctctatttcttgaggttgatgaaggtttgtctcgacggagcttctagattcaaggaagtttgtggatgaaggggcttaggagcttcgagtatcaaggctattcgtcgatgtcgaggcttcaaagcttcaaggttcgtggctgttcgaagtcgactgagctgtggggttcatggtggttcattgtcgacaaaggattagggttcagcgctgttcgttgttttcgacggaaaatgattgtgaaaatattttgtttgttctgtaaatttttaggttcatttgttcataatcagttacagtattgtaggattatttttttggtatataatatctatttaactcttattgtaagcttagttttgttgttgtgttttccagctgttgctggtttttttaatgaagttatcctttatcaaaaaactcttcagaaattagtgtgaataatgcacagtataggttataagaaaatataaaaattatgcttctatttattttgattaattattttttttataatatttttat

SEQ ID NO: 122971 - DNA, 734 bp, Cannabis sativa
ttattgcattattgcttgatgtataatgtcatttctaggttctacataagattaaattttttttttttttttttgcaagaacttgtatactcaaatttaatgaactttaatgatatatcatttatcaactttgtgaatcaagggtacaaaatagctaaacaagcatatgggaagtcacattttggggtatatcacctgatgacccgactaaggatacgctgcaaccactctcctacaacctatacccgaggaccaccccacatgtagctggagaccacacgcatgtacccggagaccacccttctacaactggggaccacctgacaccagataagagtatgaagtgtcagactacctccagcacctgcaacatgcaatgcgaaagcgacatcttatccacatgggatcactttgtacaccaggctattagagtctataaataccctcatttcagatgtgaaaagggtcggaaaatcatacttgtaaagccatactaagagtaatagaaatttatccattattctccctatttcaagagagcaatttgagttcatattatatcttcctctttatcttatttctgagcttgaagtataagttagttttcctatcattaattcgttgacaagttctcaccgtcagcaatatatttatggcacgtttactatacagtattcagaatcagaataaattaatggagaaatgtaacggaataaatgaaaaataatcggaat

SEQ ID NO: 122972 - DNA, 844 bp, Cannabis sativa
  modified_base (787)..(791): a, c, t, g, unknown or other
caaatgtatatatctttaaaattatttttttttgcacattttttgtaattaattaaaataatgtatacatttatgtaaaatgccctaaaaaaaacatttatacaatcagacatggaaaataacatgaggcattaagagcatatagttggccatcaaaatagaaaaataacatatataaaattatatgaattttaaggacgcggtgacaattaaaataaaattgacatatagattcatataaaaatataatataaaaggtaagaatcagatcaatatatatcattataaaatcaaaaaaaaaaaaataacagaataatttataaaaagaaactaattatatcgtatcactaattacacatatttatagcataatataaaatgtatcctaaataaaaaataaatacaaaaataaaaagtatataaatgctataaatcaaacataataaaaaatatgacaaataatatatcaaataatcaaacataatatatatagaagttacaaaaaatataatcacatataaaaactttatgtataaatatatatctataacctctataaaagtggcaatatttttgggcttccacattttgaattaccaaaaagtcctcatttctcactcttagttacatgtggtggttgattgttttttttttttttcttttaactaaattatttattatgttgaatgatttggtttgatttaaataatattcaaaaaaaatatatatatacttatacaaaacatgttttgatttttttgtatcatgtatctttatatattaaaannnnntatctaacggcatttcttggtttaacagaatatacttagaatattctgttaaa

SEQ ID NO: 122973 - DNA, 1387 bp, Cannabis sativa
agtaattttgtaataaattgtgtaaaatggatttttcatgtaaaaatttctatattatttaattacaatttaaataaaaattaattagaattttttaaccccttaaattttaacatgtattaaattataaactattaagattattagattaaagacttttgtccaattttattcaattttactaattcagtgattgtcaatatactaaattttgcttatcaaattttgatatttaccaaatcatatttctcgaactttcacatgtgtcaaatcatgtcctctgaactttcatcttagacttttcttattaaaattagataaaaattttaaatctaaccatttcaataattcaaaaaaaaaattattttatgatttcaaagttcaaaaaaaacataatttagtacataatcgggacaaaaacactaattagccttaaataaaatagtataaagtgttagataggtttgttgaaagaatgaaattgaatatcttagggagagatgcattctgattctgtcagattcggagtaacaccccaaactccatacccataacttcaactctctctctattatataaccttttcttcccttctcaatctcatctcattcgatttttatcaaacacattctccgcactccactctaatatggttctcttctcttctgagttttgatcaaatgagcaagcttctgagtttaagttcgtttctgctactaaccgttctagcagcttccatggtcgtattacccttgatcttaccgccgttgcctcctccaccgttgatgctccttttcttccctgtagggatcatggctgcgcttatgatcctcgctttctccccttcccacgacccaaatctcctcattttctccctctgaaactcaatctgatcataactttacccaaaaaaagagaagaaaacgacatttcaacggacgccttctattaatgtcgtttcttcaactttgttgtcgtttaagaccagagacttgaaaatagcacttcacctttatattgtcgtattggtcaaatgttgtcgtttgaagattctttagagtttaaataatattattagtataataaccccaaaatcttgtaatattaaagcttacctcaactgattatcgataagcacaaaagaatatattgttatatttctttattttatttttttttaggttgacctcaaatttttgagctgatgatgtaatattgaatttaattgttatatatttaagtgaatattagaatatatttctaaattgctttaataaaaaaaaaatatatatttctaaattttaatttattttttttttgaatggaaataatttttattaaataaccatctctgctaccaaagtaggtaacaaatcagttggaacag

SEQ ID NO: 122974 - DNA, 1207 bp, Cannabis sativa
  modified_base (1175)..(1182): a, c, t, g, unknown or other
gtaatgggttttatttagggcacaaaacccaacagcagtctgtcaccattagatcatacggttcggttgacaaggatcttcttatgaaaaacatgattttccgattttagtgcaggttgaaaatcaaaggttgatgagaatacgataatattccgagctctcaataaaagtaccaaaatattgacctctcttctagccaacgatactaattctattaaagcgactatataataataaaataataaaataatgattaaagcttataaacgacacacaaaatttatagagatttgaccccttatagcgataatagtctactccccttttgttttattgctttcacaaaagtttatcaagatcacaaggtccaaccaggtgagtttcctaatatctctacaaaaggtcacctatatttcagagtattatctagtgttagtgcgtcaaaagtccccccaaatagtgaattgacctcactatttatatgtcaagattgtctcattttgttatattcaattagattctatataaatagagatattaattgtcctagtattgtggaaacaatttaaagaatgtatctagacatatatatcttcagcgaatgcctctagttggccattctgtatcatattgtccgaccaggttaaactaatctcacgttccgaatagggccaatttccttgccatgtgtcatcttgccgagtgccacatcctccctgtgaaattctggataacaataccgttaaagaagaatgtcgttattagtttagtcttattctaattatgaaactttttcttaaaaattgattttgtaattaaacttaaacagatagtttggatgacttcaattagtgatgtactagttagaaggaaggaatgatgaatgctagatattatttgggtgttttattgacttataattaaatctatctatttggtgactacataactgtgaggatattattgttcattacactgatgagtaatcctgattttgctactaatattttctttataaatataggagttcttccattatttttaaatatgtattttgtaatataaactaaataattatttataagagttatcttcctacaaagatcaaaatataacctttgaccatctaaattatgaatacagtagaacctctatctaagaatactctattcaannnnnnnntctaatttgttataaaaaaatcaag

SEQ ID NO: 122975 - DNA, 537 bp, Cannabis sativa
agcagaagcagagtattcggaatctgtcactaactcatcagccgtaccctagaaatattgtaaacctcgttctagcactgatcggagatcggatattggacgacgggacaggaggagtaactatctgataaacaattacttgactcacaacaggtactgtccttactgatttgagtccgcgaatgagggattacatacagagagaggacgggaaacttttctggttgtttgagttttctcaactgattttctgattttgtacagagttctagattggcattctacagggatatgatttagccattatcccattcttttttgttgtttttttttaatagtaattaggtttgtcatgattagtttaataatctggatggttgcgagatttgctctcaatctttttccatttgaaacataaggaccagggccaaagaaagtttcataattttctgattttggttcaatgagaaatatcccatttctttcaagtgaattaaaaaaaaaaaaaaagtaaccttaaggcattttttttttttt

SEQ ID NO: 122976 - DNA, 751 bp, Cannabis sativa
tttatgtaaaaatgttttcaaatgtatacatttttaaaattaattttttttgcacattttttgtaattaattaaaataatgtatacatttatgtaaaatgccctacatttaatcgggcggctaattctttagtacacaacctaattacttaagtggcttatctttcgagtgtgccaaggcttagaggttgtttagctttataatttaaaaactgttttcaatttttaaaagcagaaaacaatttttaaaaattaatagggaaagtttggccaaaattttaaaaactaagttttaaaaaactaaaaaattgaaaacatcaaaatgttattttaaattttcaaaaacaattctttttgtaacatattatgttttacatttttgctcacatactcggacctagactaacctagacctagaccctggaaccggacccggacccgaacccgaaccctagacccaagactcggacccagatcccagacctcgacctagactcggacccgaatcccgaatcccaacctagaccttagacccagatccagatccacatcctgaatctcgaaccccagaccgcgacctagaccccaaacttggaccccggactctaaccctaaaccccagattcaaaccctagacccagaccccgaccctggactccgaccttaccttggaccccagaccccgagccccgacccaaatcccggacccagacccacacccggacctcgaaccccaaacccagaccaggacc

SEQ ID NO: 122977 - DNA, 868 bp, Cannabis sativa
ggaaaaaaattgaaaaattttacttctcaaatgttgatcattatttatggatatatgaatacaatagttttagttttttccctttaatttttaaaatcatttcttttaatttcaaaattttatagtgtctttagattatcaaaagggatattagcggtaaaactacatacactttatgattagtgacacttaaccacacatatcgattttttggtggtgaaaatctccaaaccttacttttgttaactatttacccatttcgttcaaaaggctttgttaagtgccacagtggacataccacaatgtatacgcaaaaattttttagagggggatattagcggcaaaattacatgaactctatgattagtaacaatcaaccacatagatcgatttttcagtagtaaaaccttctaaacctcacttatgttggctattaccccttcctttcaaaaggttctattaagtggtttacgaatggaaccattagatctccccttcccttgttccttcttcttctgcgacgaacccactagaccatgataaacctaaggacgaacaaggaaacccagtgaacccctccaattgcaggtttatcagtgaagagttgcgggagtgggagaatcagatccggcaaggtcgagatgagaaaaagaaacttcaaaaaagggttggttctcggggcttagaaggaggtttaagggttaagtttgtaaggttaggaagtcagttttggggttcgtttcggttgaaggtgactggaggtgacttggcggagctgtatgagaaggagaatggaagagagagggagtgctgttgtgatattttgcacacgtaagtgtacgtatcgttacaagtagtaaactcacca

SEQ ID NO: 122978 - DNA, 1381 bp, Cannabis sativa
ggttgggcggtttataaaattttatgcacagccctgcttttatgtacccaacaccacactaatataaggctttctaaatggttagcaattttttatgaatatcgagcagtcatgaatgtcgagcatttggatcgtcgagtaaaaataaacagaaagcctcctgtgttgatatcggagtccaatcttcttttgagatcaatgaacataccataccggtgaagaagagaagattggattttgagactttttctctcgaggttaaaccacatctttctattagaagggtgaagagagtgattagagactttttttcgtggagttggcccgacgtgtgtgaacaacgatgacattgttaacaaggtttgtgatgattcttcggaagaactactggatagcgacgaacttgagaaatttgttggtgctaaggcgtctattgtggatttccaacaggtagataaactattttcttcaagatagtcggctagattgacagcatggaaagcaaaggctcgattgatggatttaggtattcccttaaaagaggttgaggatgagggttccactgtgggtttttcggttgttgcttctgtgaaggaggtggttgtccctcctccacaagagccatgagaggtgttggttggaactgtagagggccgacagacctctacagttctagaactgaaagccttgattcaattgtgctctcctgacttcattttcattaccgaattaaaagtgaatgttgttaaattggcacatactcttaaatatctgtacttttatttaaaattattgttcctattatgggttctgcggggggtattattttggcctggaaaactagtttctcttttaaagcatatttaaaaaccagattgttggcattgtgtactctaaccctgagcataatccttagttattatcttgtgtttatgggtttccctaattccatgagaagaagaaatccaggttaagtattatggagttgggtgtcaaatttggcggtccatggttgatcctgggagacgtgaattttattctgagtaactctgagcttgtaaggtctaaggggaaggatcaattcctcccatttaataatgagttaattaataaccatgcgttcattgacttgcccattaaaggtgataacctaacctgggataaccatagagatggcgcgaatcacattaagtcgcccattcataaagctctagtcaatagggattaattacggctttttccgaaagtggtggtccagtcccaccacacttgtaattctggccataggcccttgtgtattagtactgtgggctctgtttctagagctagacgacctttttactttgaggcgtggcggaccagggaccctaggagtactttg

SEQ ID NO: 122979 - DNA, 1136 bp, Cannabis sativa
attatcagggaaaagcaaagcgtttgaaaaacgctcgactcgcagatgtatgcataagtacctcagcggctcctacctttcttcctccacacagttttgaaacaagggatcgcaaaggaaatacacgctgcttcgatcttatagatggggcagtggcggcaaacaatccaacgatgttggccataagccaaatgttgagagaaatgacaaagaaaaagaactcattaggggaattgatgagatgcgaggatgatgatgatcaacaagggcaagcgactactccaccgttgactcctaggttggatgggaaaaatatgctagtactatcgttgggaacaggatcagcaaaggttcaagagaagtacaatgcaagtagggcatcccaatggggtctcttaagttgggtattcgacaatggcaacacacccctcattgatatttttggtgatgctagttctgatattgttgactttcttgtctccactcactttcaatctcgtcgtcatagaaacaattatctacgtattcaggtatacctagctacctaatatttcattatttaattatgataataataatagtaataaataataaatgtacatgttaattttttatatatctaactctatataatatatctttatatatttataatatataggatgatacattggttggggcagagtcatccgtagatgtagccactactgagaatcttcaaagacttgttgagattggaaataaactattagagaagccaatttcaagggttaatttggaaactggaaagtatcaacctattcaaggagagggcaccaacgcacaagctctcactcattttgccaaacttctatcccaagaaaggaaacttagattatcaaataacaaaaaataaataaatcatatatattatgattaatttgttcggtttgatctttttattgctgtaattgaggttaagaaatttatgtatttctaattcattctttaattctttaattcatttttttaatctttaataataatattttaagcggatcatgcaattagctccatatatatctatctattctatatctatattttgtcaatatcattttattggaatgaaacagataataattaagtgtcaccat

SEQ ID NO: 122980 - DNA, 755 bp, Cannabis sativa
aagcacccaaatccttagccacagccaatatagctacttgcttttggttgtaacccattttgctctttatcacaggtgagatgctcccaaacaagtacccagctccgccacaggactgaatccacattgaacaaacgaaaacaagccatctgttgttcagaaaacccttcaatctgtcatgaaaatgaagcatttgagatcaaaactagtggaaaattttaactgtaatgctttgatttttgataaatatattgatttgatttcatataatataataaaattcatatttttgtttgattaattgtccagataagataaacattaatgagagaatgaaatcatgaggggacacataaacatacagaccttggaaatattgtattaaatttaaacatgtttcagtgtttgatagaataaaaataaaagggaaatttgattttatatacttacaaaaattaaaaaaattatgacacttttttcaaaatccctaaaataattctctcataattcaaaccctttctctctccttctctcaaactctctctgcatctatctctctctctctatctcgcatcccacaaccgcccaccaacaaatcgcccacaaccctcactaccaccttcgaccaccggcaccaaatcacccaaacgccgcaccaacaccctcgacccagcccccctctctcggaccacccaaacgccgcaccccctctctcggaccacccaaacgctgcaccaaatcaccgcaccaccacc

SEQ ID NO: 122981 - DNA, 1138 bp, Cannabis sativa
agagagagagagagaggtggtggttttttagtttttttacatttttttttctattttaaaaaagggtaaaatgagaaattcatgtaatcaaaggtcttatttggtaaaaatttgtaaggggattcaaatttgatatgtggtgttttattatgcatcaatagtgaaatgttccattagaaaacaaattgatgtaccacaacaaaaaaattataatatattaaatcaacttatatgggacatgctccatattttgatcacagaaatttgtttcgttgttcataatttcttttgaatgaataaaacatgataatactttatatatagttaagggtattttaggtaacaaaaagtaaaaaaaaaaaaagatatttgctttattattcttaaaaagagacattaactttcactagagagagaaataaaaccatttactagtatttctctaaaaactaatgtatgaaattgtgtccatagaatttagtgatataaacacaagtcgagcattttgacataacacgaaaccagtacgagcatgactaggcacgaaaaaatataaatttcgacacgacacgagacgatcttacaaattggtacaacacgacacgaaaaatgtggacttaaacacgatacgacacgaaatatatagacttaaccatgacataacacgataatcttaaaagacatgacacgtaaacacgaataatctattctaaaagcgtgatatatgaaaaacctgatatttgataataataataataacaataatttgaatatttattagtaaatatttaaattttaatagttctgataatttttttatataattttatgtgaaaaattgctaaaaaattatataaaaataattgagattataaaaaacacataattttagtaattatctcattaattataaaaataaattgtgaaaaaatagagcacgaatttaaacttgtataaaaaaaccggctgacatgagtaaaacacgacactaatatgagcacagcaaaacacaacctatattcttttatggtatgatatcatacgacacaacctatattttttagggatattggcggctaaaccacctgaactttacggtttgtaacacttaacgataaaaatcgaatttttggcggct

SEQ ID NO: 122982 - DNA, 1830 bp, Cannabis sativa
agatcctggtaaaataaaatccaacagttacaacctttccatgcctcaccacattttccgcttcctgattgtcctgtgaaggagaaaggttctgatcatgatgaaattgtatcattctgcatgggttccacagaaaaaggggagggatcaattggtaatcgccgtggtagaaaaccaaaaggaaaggaaaagaaaagatccgtcaggaaattctcaggagttgagactcgcagtgggaggaagaaaacaattgctttggatgaacttgaatatccagttaatctgtcaaacattcttgcaaattgtgttgaaatcccaatcacttatgaacaaaattttggaggaggcgaggaggcagccgcaaccatgcccccaccgtcatcatgaggtatctctcgtggaattgctggagacttcatagaccctcggcggaaaggactctttggggtctgctccatcaatgtaatgcgaatttgattatcttagctgaaacaaaggtggatgggaataggatgactgagattagtaatcgactgagctttgcaaatgtttgttgtatcccatctttggggatcacaagagggttttgtgttgcttagaatttgggtgttcaatgacatgttgttgaaacctttgaagctggattcaaaattgaagttaacttggaaaatccttggagtctcttctgtatttatggcaccccatatcaggcacagaagaacattgcaatggctgacgaagaaggtggcggattgccattctccctgggttgtgatgggagacctaaatgttatcttaaatgactctgagaaggctggtggtaggcgctacagcaggaatgaaggggaattgctcgataactttttgtttgaaacgggaggggtggatctcaggtgtgacggggggagttttacttggcaaaactctcgggtggcttgtaatagagttcgcaagaggctggatcgtgccataacgaatgaaaattggtgcatggatttcttgagggctcgtgtttcaagcttccctatccttggatcggatcacgctcccattgtttagaatgtttggggggatcaagctaaactcaagtatccgtttcgttttttggaggtatggacaacaagaccggattgtggggaagtggtgagtcaggcttggcagagtatactaagcacctctctgcttcagagaaaactcaaaggtaatactaaggatttgaaactatggaaccaaaatgtgtttggtttttgtcatagaaaattaaaagagctgcagaagcaactgggacggattcaaaatgagcctatgaacgataataatatcaagagggaggctgagcttcaattggagatactgagcacggaagaaattatgaatagaatttggaagcaaaagtctcgggaagggtggctccgattcggagatgataatacaaaattctttcacaagtcgactctcattcatagaagacgtaacttcattggctgtgtaaaggacgatgctggggagtgggttcgtgaccgtgttggcattgggaagtatttccatgataagttccaagcccttttcaaaaccacgagtgatctgacgggacatgagcttgattctttgttttttgataaagtgtccgcgctggataatgaggaaattggtcaagttccttcaggcgatgaagttcgagacacggtgttcaagatgcatcctcccaaggccccggggccggatggttatccaggtattttctttcggaaatactggaatattattggggatgattgttgggttttatgccctaaataaaactcggtttcaatgtaatccagattattc

SEQ ID NO: 122983 - DNA, 754 bp, Cannabis sativa
  modified_base (120)..(131): a, c, t, g, unknown or other
tttttagtcacagtacttgttgtgactaaaactaaattagtgacaacttgtgtttaaatgctatgttttaatcacaaataattttttgttgtaactaaaaaatcacatttagtcacaaannnnnnnnnnnntgactaaaaagttgtcactaaaagaaataatttttttgagtgtaatatacatataatcactaccttccattagattattacatacattaatcaatcaagaaatatattttctcaaaattaataataaaaaaaaaaaaactagtgataaaacaatgattgagaattaaatccctttggtgaaataattaataaacttcatccaaatctcaaacaaatacttattgctcataaacatataaataatcaaaataaagtatcacatcataatacattatttaatcaacaaatgatcaagttttgcttcttagaacagcaaataatgaatgaatataaacaaagataaattaaaagttaggggtagcaaaatgtgtcatcgtattgtgttcgtgttatattttatgtgactcgcttctatattttgtgttaggcgtgtcgacccattttttgactttgtatctaatttactcgacctgtaaaaaatcgtgttgtgttcttgttgacctactttgacccatttgctatcattgaagatggagttatagagaaaaatagatttaggttccatgcaaaaacttatgtacatttatttatatatagtttattatagggatattggcggctaa

SEQ ID NO: 122984 - DNA, 580 bp, Cannabis sativa
cttgacttcaaatcaaagagccaattggtgtcgtgggcataaggctggccccatccttgttgggcatacaatatgaatggtgcggccaagtatttgatgcctttcgaggtgaattgggtcaggaaaatcttataatagttcacaatcttcctaaagtacggatgcaaagttaagatcaccccttgctcagcatgaggtccgaaccatgcacaaagtccctctctagggtttgtagctagctgtccaagattaggtagaaaagcttccactccgctaagaaggtatttgtcataaaggttctttaaactcttgtacataaggttggacaggggacacccaaagagaaacctctctctccctagtcctcataggaagggcctcttcatactcctctttaacatagtcttggtccagaaccaagacacctctggacacagacacaagctctctgactttattgtagcctccaaaagaaagagcctaatgagcttctttctcatcttctgatacctcatctccatcgctgagaggaggagtggctgcacagaccttggcatgatcctcaacctcttagatttta

SEQ ID NO: 122985 - DNA, 691 bp, Cannabis sativa
aatgttaagtaattgctctcttcgagacagagctaatctccaaacttgctcaaggcaatttcattcacagcataaaaaacaaaatagagtcatacaagaaatttatataatctcattacaatcctcaatagcaaattcggttactcctactcaacttactttctctcccttcatcgcgcccataacagaacaaagtctctcaaccagcttggcttgatcctcttcctcttacggcttgtttcccccttttcagcttggtcgatttcactgttcaccttctctttcgagccttctgtgatgtgctgagccgaagcttcttcccattctttgacttgctgtataatggcttctgggtccaattgtattgggctgattgtttgtgggctgtcaacttgggctttgctatcatacaaatttattgattacagttcattttttttttcttattatcttgttctttttctaatttctttatgcatgactccgatttctttattcatgtgaattgagagagtgggagaaaccgaggtcatgcatttttgaaaaagagaatattttaataagaaatttcatatcacaattcagcaaaagaagaaaaaatatatatatatatatatttcacatcatagttggtgcatgtgaaaaaaaaaaatcttcaacgacatagtatactgatcatttatagcagaaa

SEQ ID NO: 122986 - DNA, 688 bp, Cannabis sativa
taatataattcaaaataattacaaaattaacttcatgtaaaaatagaaaacctaaataatttgatggttgtgacgaatattttatttcttttggtcttcttttatgggtgaaaaaacagaaaattcttttagaactatttcgattgctaattgttcagtttcataaaatgcatcgattaatgctgaatgcccatgtggccggggtgaaaaaatggtttcgtaggatctggtaaaaagtggtcaaattatgtaaaactaacaagaatttatcaaaaatattagacagattttctactataaaatgagaatataatttctaagtgtaaggaaaaaaaaacaacactcctaccatatgtagaggtaaaaaacatgcacgatccctttaggaattccattaattgatgagtgggttagtttatgacaaaatgttaattatagcttatacaactgcccagcacttaagtacggacactatattttttgtttccaatatatatgtacagcaatattaatatataatggatcatgatgatatataacaccttttgaaaaattataacatatacagatacaataataggggaactagggccacgtgtacgaccctcttttttttttctcaaaaaattatagttttttttttttttttttgaaaaaagttattataaattaaatacagctatttaca

SEQ ID NO: 122987 - DNA, 675 bp, Cannabis sativa
caaaacacataactatgggtagaagaagaagtactctaattccatggtttgggtccctagaagtattcttcttcatattttcacttcttcatgatcatgttattcactcaactccattcaccaaacctaatcaagtaattaattaattttattaatacttctagttttcattcttattattaattagtataaccttattaacttttttgtatattaattaatatttaatttcatacaggtttacattgtttacttaggtaaaaaatatatgaaaaataatgacactgataagttcattacttccaagcgccatcttcatcttctttccaaggtcttttcaaggtcaaactctcttgctcgatcttaatcttatcacacacatacatataaggttgaatgtattatttagcttccgatataattaacatgttggatgatcaatttaatcatgatctaacgaccgatgatagaaatacaaaaatacgagacaaaatttactccctattgttagattgctttactttgacatattacagggtcaggtctaaactaaggcaggctaaggcgtaggcctagagcccattcaatctagaggcccaaaacaaaaacatcatcattttaaaaatatatgtatttttctagtaatttttgaaaatactatattttcttttgaaa

SEQ ID NO: 122988 - DNA, 1596 bp, Cannabis sativa
gaataacaaattggtttagcaaaaagtaaagatacagtaaaaatgtaataaataacgtttaacagtaaaaatgaaataaaagtaaaaaagacagtaccagacgtaaatttccctaatattaaaagtggtgaagcaagataatcaaattaaaaacaaaattaatcgagcttgataatggaaatgaaacatcatgattgagcataaaataaaaaatttgaaacacgacagaattgtaattgtaattgtaaaaaattaattatttaaaaattaacttccctcctcttaattgtaaaaattaactctcgtaattgtaaaaaaaataattatttaaaaatttattataaagacagaattttaatttatacaaaaataagtttaatttttgtaaataaaaaaaattataaatattataattaaatgacttaactgttaaaataattatagtatggatttatatataaataaaaaaattatgtataaattttaattgctaaaaaggatcttgtttaatatttatttaattatttaaaaaatagttaattataattaattaattctaaaaatagaatttttatctattcgtaacctgctattacagataaaaaaaattataaccacgatggttacaataaaaatataaccattgaatagtcacccatattaaatattaatatatatctaccacaatcaaaattcagtcgtgacacttaaaatttcttatatactaatattattttttcttaaatgtgataaaaataatttcaaaatactaaaagtataaaaattcatatcttagaagaaaaaaataataaaataacaatataaaaaaatgtatattttatataatataattttttatatatttgtaattataataaattaaactacaatataattatcgttataactagaatctcaataatttacaacattttaatatttataatttaataaacatttgacacaatttttcttttattcagacaactattttaaattggcccaaaatcaatttaattattatttaaatataaaattaattattttgatagaaatatatatttgtgaatgagcaacaacacaatgtgagatgccataatagcaatttctaacattatttattaaattataataggtagaatcctcatattagaacgaattctacttgcctaattggaagctaagaagctccttcgcatttctagtgagatataaggtgtgtttgaaagtaattgtgtaattattaggtatagtgtaattattaaagttgtaattacacaattttgtaattacactatattttaaaatacaaggtgtgtttaaatataaggtggtaattatatataaatttctaatattttgtttgacaaaataatcagtaattatacagtattacaaaattgggctttagaagcggtttttaagggctttcagcgtcggtattggcgaaattcgctaccaacgttgttacaggtgacgctaaagggttaaaaacaaccgacgccataggacccctatgtgtcagttgtttcatataaccgacgccatagggtcttcctatggtttttttttttcagctttacaattttgtatttt

SEQ ID NO: 122989 - DNA, 1026 bp, Cannabis sativa
aaaccgactaaaccgaccgatgtacagccctaactttaagtatactagtttgattgacacacgagagaacgtctacaaagcgatctataacatggtccactacagaaagcctccgcgaatgccacacggaggaagaaatagatgtgattagaacaaagaatgtgagtatcacagagagaagggtcacaccactaacgagtgtgattatctaaaggataagattaaaactttggtctgagcaagacatttgggacaatgggtctgagttccaatcatttactttggatagggggtcatccacgggaatgtgatcgttttgggataacaaaatgtcgtaaatcccccgcagggggtaagacgttctcaagctcttagaacatccctgcctgcactccctactccaccagtgccagatagggtagcattactcgcaccgaaacatggaaccccatatcctcccaaacttgccccacctccggtggatggatacgtggccacaatctcgggtggaccccatcttgcaaaaagcacgagaaactcgcaaaaaagatacctgagagaggttgaagaagaggaagtgtgagcgttagtgcaatctcctacacaacaccccagaatgatgaatctcctacacaacatatcccgacactcaaaactaacaataaacttaaatcacaaaaacacaactgttgagtgagttcttgaactcaactcacccaaatcaaagtataccaaccaataaagcttgaaagtacaacataaacaaccttaaattaaacttaaaaacatgctctgaacttaaccaaatctacatgcctgaaatcattcaaaatccccaaaaaaaactcaacctaaaactctagaaatcaccaagaacaagtgaagaacttacctcaaggcttgtacgacaccttgttgtggtattttcaacacgcaagtgtacgtatcgtaaacaagtaatagacttacaaagtgtgaggttgatcccacaagaattgtaggtaagtactttaaaattaaatcttt

SEQ ID NO: 122990 - DNA, 933 bp, Cannabis sativa
aaataaaataaacatttcattactcctttttaaaactattttatttatttttcattagttggtatcctttgcgatttaataagacgtagaagaaaactacgtacaacagtagatttaatatggttactaggagaacttcatataaaataggatcttagaaataggatcaattaaataataactttattaaaaaaaataaacaagtaaatcttagatagttggttgagaaatatggcaatttttaaagacttttagaattatatgaaatttgaaaaatctagagtttgttgaaacgatccctaaatattttttcaaattttaaatttcaactaactatcaaatgttaatgttatttaaaatattttagtaaaataaatagctaataagataaagtgctagtttaatatatatttgtctaatcttataatttaattttaaattaataaaatatgataaaataaaaaaaattgaaatatttaaattatagttaggatatttaatttttttagattaattttaaattttattattattttaatatcaaataagaccatctcatattaatattaataataatatgatcttatagttaaagtaataaataatcaaactaaaataaaataaccaaatttacaattcaaacctaaaattcaaaaaatatagttgtacataaaaaatctttgagctaggggaaaagctttgctagagttctaacttcagaattcttctggtgccatggtgggtcggggccgaccacgcaaggcttcttcttcggggaatgtgagcggttcttagaggcaaggggaaaggaaggttgcgattaaaaaatggggtcttacatcgtcggatttgatgcttaaaactaaatcgatggcagaggttttgggtgttgaagctctgtcagtttcggacatggatgaagatgagaaagtg

SEQ ID NO: 122991 - DNA, 1536 bp, Cannabis sativa
  modified_base (1480)..(1482): a, c, t, g, unknown or other
acgggaattacgtgttacttatagaagttttatacttcagtcttccttaattgagttatcaataatcactttaatgattcccatcacacatgacattaactactaaccttcagagggcaaagtcttttttaatatttttaagaaagattatggtaaatttcgaacctttgacccaaataagttaaaatgtcaataaaaacaatctctaccactatatcgacacgtgattaaaagctacaacatatatgacacatttatgctgtcattagaatttttctatgtgaacatataattaccaaaaataatatcttacacaaataagttatcactatcataacaaaattccaaatttcaaaattaatacatctgaacaaaacattataaaattcaaaattttcatatattttttttcaaatggtgatttttcatattttgaaaagaatttttttttatttgtatcgtttttgtaaaatttttttaaaaaaatatagctttttttttcaaaaaaaaattaattttgtaggaaaaatccaaagaaaaataaaaaaaaaattaaaaagcagtttaaatagccagttgcatagtaagaaaaaaggtaaccggttaccttatattatttttttcatatttttttaataagttttacccataaaataattattttttgaagaaaaaaagtatatttttatataaattatataaaaattcataaaatattaatattcacgtttaaaaataaatatttaagtttttaattataactctcataagatacaatactatagtaattactttactataaaaaatatcaacaaatgatcaacgattaattaattttaaatatatgaaagaagatgtttcaataattatatcaaatatataattattatgattatgttcatttttaattattagattaatattaaacggttgtgattaataaattactttgtagaacttctagtaaattcaaaggttgaagaagagatgaggtgtggtcatggttaatttgcaagtctcacactcctttgtttgttgtcctacttaattggtttttattctacaaaaaaggttatatattcttttaaagtaaaatagagaatagactacttgtatttcaaaagtaaagagaatatttttgtctttgaaaaagctagggtatttgccaagtaatgctagtttataaaatatgcaataatatctagctaatatctagatgaataggaaatatgcattattttgaaccacaaaacaaaaaccaaggtcttgtgttgatttttttccaaaggggtcttaagaataatctaaagctttgcctaattaagggtataagagagggtttaaagttcaaacatattgatcgagtgaatacatccaaatggagagataacttgtataattagtcttgtttgtccctagaaaacccatatatatatatatataaatatatatatatcatattacagtagaacctctattnnngaatactctattcaagaataacttctaatttgttataaaaaaatgaagtcccaa

SEQ ID NO: 122992 - DNA, 1831 bp, Cannabis sativa
taacaaaaaaactgtataacaaaaaaactgtataaaagtaacacgaacataacaacaaattaataagagtacaacataaaaatatatcaaaatttcatatttctaataaataaaatcatgaaaattgtaaaattgtttaaaattccatataactgtatttttttgtaaatttttgtgtatttgtaaaataatctcattattttttatcactgaatgttaaaagagacgatgacggggatgatactccctgccctgacagggacgcgtttaatattttactttatattttataattttgtattttttttagtatattattatcttttttatgaaatttaactaatgttttagataataattagtatattgaataatagttaatgtgtaatattttaatttttatattatttaatatttttatatatttaaatttttgttataaattttatttttatattaggggattctacgcatcgttctcgtctttattaagagattctctgcttatctccgatagaaaataatagaaaatggggatgagaggagcactcatgtacatccctacctttgacgctcattaggaaaatgtttttttttctccctaaattattattattattattatttgaaaatgggccttaaattatattttgtagagttttgctctcaatttattttgtttgacaaaaatacctcaaaattaaagtaataattacaaatatgtcattcgcttatattttgttaaataatttaatatttttatgtgttacactaattggtccaagttgtttatttattttttctttaaaatgattttttttaaaaaaataattttttttttattttttttatctattttaaaattaactaagatcaatttataagaattaattaattaaattataataaatatttatgtttggatttgtcaaggcacatgagcaaaaacgttaatttatgagtcatattttctaagtaaaaaaaaattaggggacaagactctacaaaaatacaattaaaaaaatcttatttatccaagattttattattatttccttaaagtttctaaagataattttagaatgaaaaaagtataataactttttttatttattcatattcttcttcaccaacacaaatatatatataattttaataaatataaaaatatatagcattgtattttcaagataatctataattaattcttacattagacaaagaagatttttttaaattcattaatctttattacttcataaattcatttcatattctatgcataaataatttttctttgaagataaaaaagtttaaaaaaattaaaagattaattgataatttaataaattaatattagatgtactataaatattttatgtttaaatggtttgtttgtatttgaatttcataaatataaaaccattgctaacaaagaatattagcctcactgtcattgtctagctgtccctttttattttataggaacttcatacaaggtatctaataataataataaataaattttacaaaaataatatttaacaaaaaaataatttaaaattaaaaatattttgatataacatttttttttttgcaaataataataataataataataataataatttgatttaatgagatggatcaaatgaaagtgtaatccatctaccttaaaaaatgaaaaagaatcaaaataatttgaattaatatattatgttaattaaatgcaacatgttattaaaatataatggtccacaatcatacttggtgatttcttcccaattattgtgaagccttaacaaatattattattgatataaatgtatga

SEQ ID NO: 122993 - DNA, 578 bp, Cannabis sativa
taaaacttaataataatctgatctagagatgttataacaaaactggttacattttctgcatctattcgtgttaaaatttgttttaaagttggttatattaaaaaataaaatttttgaaaattgagttcagagtcttatttttaccattttggaaaatatagggtctattttgtcatttaacaaaacaaattgtctaattaataatttttgcaaaacacatgatccaaaatgatatttaccaaaagaaacctaaatcatatatattccaaatggccaaattattatatattaacattccaacaataaagaaatgagtaagcattatattattattaatgtaattgaatatcacatctcatatatacatatattaatttattaagtaatataataaatcattaaccacctacaaactcataaagtactactacttaggactcgtttggtacgttgttaattattatattatgttggattatattagattgcagtaatattatttaggggaattacctcatatactatttttttaactttttttttttcaaatttacggtttgggtttctaaattggtttc

SEQ ID NO: 122994 - DNA, 1267 bp, Cannabis sativa
  modified_base (27)..(36): a, c, t, g, unknown or other
  modified_base (70)..(72): a, c, t, g, unknown or other
cacattttccataaacctcgttgattnnnnnnnnnntgcacagtatgtttaaaaaatcacgtaatacgcnnntgctagttagggtgttacagtcaacctcttctttgagcacattttgtctcttgggatccaatggttgttgcatttggcattttgttagataattagggttgataacgaggtgatggcaaatcacattccagtttatcccaactatgtctgagtgggtccaagcaaactgatctttgttttccttcaaaaaagtgattaattgccattttagttcttccccaaacttttcccaatataaacacactttatgggattgttcgggtctaaaatcaccacttccaactcttcaattggcttgagttggttgtcatcatcttagatcctaggatccaaatcttttgtttctttctcgatttcttcaatcagaattaaccctcagttgattaatggctcttatatttttaagttccactctataacactctcgagaaaagaattggtcgcctttaattgttcccactacagagtgcataggaaatttttaaaggacaagtgcttgattaagatcacaacccccactccaattaaagtcgggcgacctatcaacacattatatacgaaggggatgtcaacaaccaaaaactcttacatttgtgtcccagacaacggtggttcccccatagtcaagggaagctcgattatgcctaagctcgcgacacagtgccttctgtagccacataaagttaccatacaaggtcttagttttacctcttctaatcccatcttcttcaacatttttttgtaaaggatgttgacagagcttctattatccacaattactctccttactcttttatcggagagtcaaacttttatcattagaggatcaacatgtggataccacacatgtttcaaatcttcttcagagaaaatgatgggtggttcattttacttcactctctgcgaaggttctggagcgaatgctggtaattcatttttcacttcagtaatatacctctttttgtgcactgttactgtttcatgtgaggtgtggcactccagaaataactaaaatatcgtcggcctctacggaggaggttgcaatctcaggttcttcgggttatcgggctgattaggctcatttccctgtgttctcatgtattacctaaagtgtcctcatgatattagactttcaatttcatctttcaattaacaacattcctcgatagtatgcccaatatctttgtggaaatga

SEQ ID NO: 122995 - DNA, 1251 bp, Cannabis sativa
tgcttgtttataaaaaattaaaattaaatatatgaatattaaatgaacaataaaattatatcaaataatttcaaacttatttgtatgtataattttattaaaaaatgataaatatatagaaaattctaaagaattctaaaaaaaaatatcatcgtacaatttcttatataaataaataaaaaaaaaaaaagcacatgaataaatatcttcaaatgcatgctatagtgaagaaacattaaaaattaaacaattctcatacaaaataaaaaaaggacgatgtatctgtaaaaaaacaaaaaaaaatatcatcatataatttcaaaacaactgtcattatcgtatcttacttgtagtcatcactacatttaaagttgtatatgtagattaatgttttatttttaatacatatttatatatatatttaatggttcactacagaaaaaaaaatcttactttaagtcacaataaaatttgtgactaaacatacaaatcatcattcctttgttatcattaaaaagtccatacctaaaagtattagtcacaaaaatcacaagttgttgtcgtgaatgtgttttcaacccaaaacttattgtgaccaaaactaaactagtaacaacttgcatctaaatactactttttagatatatatatatatttttgactaaattaatgtgatatttagtcaaaaaaatttatgttgtaactaaaaatttatcactaaacgtagcattttttatagtggttatcatatacggttgtatgaattaaagtagaataaaaaaattagaaaaaataaaataaaatttaaagtagaataaaaaaatagaagaatgagagaatttaaattagaataaaaatagaaaaattaaagaattaaagagataataaatagaggtatttaaaataattttaaactgtcatgtcatcgtcttatttatcagctttatatataaatatataaataaatattaaaaaaaaccatgtaggagaaatttcttaaaagattatgggttttcacccttttatttaatggattttttttttttttgataaattagtagcaagtaattgtcttaaagaaaaaaagtagaatgtagaatcgtgcaacattgtcttaaaaccaaggccttttcaaacttcaaaacttaaacaactaccttcacttattataaacaaatccacccatacaattgttggaaatattttatcagtatctagatttactaccaagtatgtttgattaacatccta

SEQ ID NO: 122996 - DNA, 1733 bp, Cannabis sativa
  modified_base (41)..(44): a, c, t, g, unknown or other
aaatagctataaataatttttcataattaaacataattaannnntaatttccaaattaaactaagcggtctttacaagcttctattgctccagatgaaaaaggaaggttattggctaaccttgcctcctccctattgatgtacttttgagttcttttcatgaactcatctatagtgcaagcttcctttcctcataaactatcccaaaattgggacctattagtaattcctgcccctggtgtcataagtcttccactatcatcaacgtatctagccttggcagcctcggcattaaaacagttgacataagcttttaagcttttgcttggttgttgcttcacattggcgagggaggaaatttctaactttctggctttggtgacacggaattccttcttagagtcgtgtgagagttgatcacatgaggtaatggagtgcctcttgaactttttgaactaagtcttggctgctccagtaaatgttacggggaataacacacattttaagtcaccaaccacctggtgggcacacaataagtgtattgaagtcacttatgtggaccccggggtctgtactcccatcgtacttggttatggttggcattttgaatccttgtgggtatggtaaggccaatattctaggagagtaaggctctggctcttcatccgaatcatatccaacggcattttggttattggccaccatcaattgttgtatcatttattttaaggcattgagcctatggtcattgacttatcctttcccaccatggccaactaggggaatgttattttgatgtcccacattgatgttacaattgttatttgccattggtggaattgggtttcaacttctattcaaatgttccctcaaaataggttgtctttgattgaggtgttctcgtaaatcaggtcttcttgcatcctttaggggacagttgttgttgtgacgttcataattgtgaggcgcattattgtgaacactaatggagcgacatctatagtcacattgaccactactctcagtaaaactcactgtcctttgttgttgtggatcatgaggagagagtgggagctgctcagagtatggctcggagtatggcatcaaagttgtgtttaattttgacacatagctattttcttgagcaggttggcccttggtggcatcttttattttggcccacgatgtgttggcctttgacgagcacaatctttgcgaggagcggtgcgtcacctatgccccctaggtggttaagcatgtggtacattaccatggaaggaggaccgccttggttcttgcaaagtggtacccactgacagatcgggataccttataggtgacaatggggctcgaattggagaatgtgtctctcctttcttctccacccacgtcattattctcacggttaggccttggaggaacagctggggtctcatgggcttcatgaccatctccatgtaatggtacatgggtttcttgtgcatgtcttacatgaactctaacatttggtaaagtttagtggtcccccccttgttggatttttcacaagggcgtgttctccccttgggcgcccccttcttctcctagggggagaaggatctcttggtttaagaggttggttcccatgcctttgggcttgctcttggagctctttgttatggcgtaggctttcctccaactggacgcacagcactttattttcttagaacacttcatgcataggtatggacctaa

SEQ ID NO: 122997 - DNA, 1433 bp, Cannabis sativa
cggtttgatgaacactcctagtatcctcatacttagctttcaaaacatccaattttctagttaataaatttacttgagcttgaagtttctctcttccgccaagttgaaatgcaacattaaaattattagtaccattagtagtactataatttgcaaagtttctacatgaagcatagtatgttggaaaataaaattcaaaacgttgcttcttttctttatttatttctcttttattttagtcatagtttttttttaattaattttttttgtataaggtacaaaaatgcaattttacaaagactaatagaagaatgctcccaggccgattggtaaaggttgccaatgtaccacttcgtcccaaccttgcctagacagaaccgaagtttccaggtaaggtggagggtttatttaaaaaccaatctttcttagacagagcaaactcggtttgtgtcatatgtattattacattgttgtaaagaaatactaagtgttttatgatttttatactttttttttgtattttataatttttttagagttgctaaaatctaagagagctaaataaagaaaaagaaattttaaactaagcaaaaaaaatatgataaataaaaaagcaaaaagtaatataaactatcacactataacaagtactaaagtacaaaaaaaaaaaaaagtaaagaaaaaaaaaatactaaacaatagctatgaagaaattaaacatttttttaagaaaagcaaataaaaaaatattatatataaaaattatatagctatatatgtacttttttagtcaagaaattatttctgataaggaagatcggataaaaccgcaaccttagaatataatttaaaattcttggtaataattttttttccaaaaatatttacattacataagaaaatatttacaagaaaataaaatgtaaaaacaaattacttaacctcttgattgcaaatttcattatgcttttaaaaaattacttccccaacaatggcgccaaaatttatttaacgcccaaaatgtgacttccactagcggtggttgtagtatagatcgggcagtcgattccacatggagataattatagacaaaagcgttagtagaaaaataaacacaaaaggttaataaagagtgacaatagtaaccagtgagtttgaggaatttggtaataaatattaaaaaaagtaaataaaggtgtaatcaatagtaaaagggagaaaggcttcaagaatcatccatatgcttgttttagctattttgtacctttaattcacaaagttgacacaaagaatataacattaaagttcatattatattttgagtatacaagttcttggaaataaaataaataatttaatcttatgtagaacctagaaatgacattatacatcaagcaataatgcaataaaagattaaacataaaactaaacat

SEQ ID NO: 122998 - DNA, 1307 bp, Cannabis sativa
attctcaaagtacctaatttctgcgataattgaatttgaaccaaaaggactcaaatggttgttaatgggtctctatgggccgcctcatcgggaagacaaagaagactactggaaaagcattggagacatggtcaatcaatcattgcaccctgtccttctcgtgggggatatgaatggaacccttaaggaatccgaaagcttcaactactctcatcaaggaaactcctcaaggtactcatttgactttcgaaggatggtaaatggggtgggtttaattgatctgggatttcaaggtccttgctacacttgggccaaagaccgaaataatcatgatcaaggaggaccaaccaaaagagccagacttgatcgaggattagcgtcgtcggaatgggcgtattctatttccccaatgcaggtggtgaagcacctctcttcaacgacctccgatcatcggcctatccttgtggattcaaaaggaggtttatcgtgcaagggccgcttgttcaagtatgagaatatgtgggctagagatccacgatgcttttggattgtcaaggatacttgggctaagcgtctccaccaacaccccatgataaatttttctcgaaaagtaaaagctactgctcgaacgctgaagaaatggaactatagccaattccaccatctcaaaagacaagtggaggtagctacttcttcacttcgggatgctgaaactaatcaacccaatgatcacttaaccatccataaggcaaaaaacaaactgtcggaagcgctgctgcgcgaagagatccattggaaacaaaagtctcgagttcaatggcttcaagagggtgacaagtgtacgaagttttttatggcatcgacaattgttagaaggcgtagaaactacatccaatgcataaagaatctgaatggaaccgactggatagaagatccaaaagaaatctctgaatgttttctatccaaattcaaggagttatttcaaaaaacttctacgtgtgctaaggcctcacttgaccatataccccatccaatgcttgatatcgacgacttggagaatctgcaaactactccctcagttgaggaaatcaatgccgctctgtttgaaatgggcagggataaagcccccggcccggatggccttccaacaagtttctatgctcatcattggcagaccgttcaagccgatctggttgaaatggtgctgcattttttcaacacaaatgagctaccgagagagatcaacgatacatcaatagtgctaatccccaagaaggaatcatcggcccttgttacggatttcagac

SEQ ID NO: 122999 - DNA, 1055 bp, Cannabis sativa
  modified_base (539)..(550): a, c, t, g, unknown or other
tttatttttatttttatttgttgattttattttaagtaggtctagaatcgggtgcgaggtctggaccgagggcgggtccaagtctagtgccgagtttgggttaggtttttaaagtttaagttggagtcgaagtgcaaaatattgattaaaaaaattatttaaaaaatatcaaaagtgatttttttttttttaaaatttagattcttaattaaaaaattaaaaagtagagtgttactatcgaatattatttatatatacacagaagaatctaaacacatgagaacctaatcaaatgtacttttttttttttctagtactgctaataatattttgaaatgataatggaagcagagaaattgatgcttatttctcatatataataatattagaggggcatgtctcctgctaaattggcatttagtcacaacttacaaccccaatattatggtgccaataatgaaaaattgaatctatcgatcattttaattaattaaaaaatgtacaatgctgtttctgttcaaaataataataataataannnnnnnnnnnntaataataataataatattatgttgttttcttatgtaattatctttaaaaaaatatagttgttataaaataatattaaatatagagaaaaaaaaataggagaagagaaaacaaaaagaagaagaaaatgagagagtaaatttttctcaatagtatatttcaatgggtgaacctctatttatattaaaaattttaatataataattaatggaaactaaatcaataaaataaaaagaaatacaatagtaatatttctggtataattgatttgagtgatttggacatctatataacactccctcttggatgttcataataactacttcatttaaaaccttactagaaaacctaataagacaaaaattcggccaagggagaaagagtacagtatgagttaactcctccctatttaagcatttgtagagatcttctaatcgatgaattctgatcttatatgtcgtcttctcaaatgttgatattggtaataactttgtaaataagtctgc

SEQ ID NO: 123000 - DNA, 1153 bp, Cannabis sativa
gagagtactaactttactctttatcccatattaataaaaaaatattttaacttttgagttgttagttaatctatcttctatatctttttttttttgagagaaatgtatcttctatatattttaacttttgagttgttagttagttataaatattaaaattaatctactgtattattatatacatatatactctaaaactaaaacttataattattaataatattaaaattaaaatatccctaatcgaccctattatatatatatatataccctaaaactaaaactaataatttatttcagagcaaacacttctgcagaattgtgtcacagcaaataattatttttgttttttgttcaaaaataattattattgaggtgagaaaggtttcctttttatcatccatgataaatttcaatcttaattattttttgtttctaatataattacagtatggggatggagttataattacaatcttaattattctatattttaatttttaatttttttatatttatttgactatttgtcaataaataaaatcattctacatatatatgatacaattaattagagctagtaaaaatacctaacatatattatttatgattaaaaaagcatctcaatcataattaagattgaactttgtgtcatcatattctcgaaattatgatattaagtatttatttataatcttatagttatcaacaccaactacataaaaagttattcacatttttttaaaaataaaaatttcaattataattaaaattgaactttgtgcggttttttttttttttttataatgaactttcattgaatatagtcagagtttagtacatcatagagaaatggaggaaaatcatctatccaaactaattcgccatccaccctgagtgcacgaactttgtgcggttatattctctaaattatgatatttattttttattctttttttctaatataattattaattagtttaaaaaaacctattaattttttgtcaagtttttcttataattattttttaaaagttttttaaaaaataggatcaaaagagatggaaaaaaagaaaaaagaaaatttgtagatagaaataagttgtattttatttttaaaaataattagtatgataactatttaattaaattg

SEQ ID NO: 123001 - DNA, 560 bp, Cannabis sativa
  modified_base (506)..(512): a, c, t, g, unknown or other
atacatatacacgtaaacagaaagaatggaaaagaatattaaagtgacagttttgaaatagcgactttgtcatgttataaccttttgcgtaaaacagatttgttttctatggggtttggtgtttacagagcgtgttacataggttaatttcctactgattttgttcaatttggttaagtttagaagaaatgacaaaggttcaaagtttggtaaaaaaccactttttggttgacgaagaaatattgtaaatttgaaaaaaaaaaaaaatgttcaattaacaccgaattgaaaggataaaaaataatttttaaagataaaacattgggctgaaggaaataattagactttttataaatgaatcttgggtccaaattccagctttttaaatatgccataattatgtaaaagttggaaaataaacaacttaatgggattttttatctttttgcgtaaggtaagtacaagatgttaattaaaggatttaacttaggtggcgtttggtaacnnnnnnntaatcagttttctatttttaaaagtgaaaaagtgaaaatatttttcaa

SEQ ID NO: 123002 - DNA, 1656 bp, Cannabis sativa
  modified_base (1628)..(1630): a, c, t, g, unknown or other
atccaaaatatgaaatccgcacttagtgcggattgaatgttgtttaaccaaaaaagtacagattgaatcggatgaacacccctagttctgattccacaacatctgagctcagatataataattaagagctcaaaaattatagaatcaaagagcaattgtaagagttaaaattaatccaaagggtataaaagtaatttcaaaagtaaactaactaatgacatggtaggagaggataaaaacacatcgtctaattaaaacaaaaataaaagtcgaggatcatgggaagaacaaagctcaccaagaattgagtgattgggctcaagagatagagttaacgacaaaacatgcaaggaagtaggagaacaataatcgacgaaaagaccgaagagtgtgcatcatactttcccacctataaatagaggaccccaatattcaaacagaatacacgttcttgatcacgctagcttgtcaaaactctactgaattgcttctccgagagaatatttctcaaaatctaagatcgtcgatcaaaaaaccactaccaacaaatgaggaattaagcaatcaagtagagatatatttgataaggccaatcttagtgtaaaggatccaagaagaaatacagtttgttgttgagctaattttaaggataatttttttaataatttaacataatctgagattttactaatcgttcaaagctaagctaaaatatatatatatagggaaactctattgtaagaccagtagttcttaccccatggtatagagaagaaaatagtccaatcacaagtcaagaaattttttatagtatatatttttatgaaacataggtagcagattatcctcatgtagtagctggggaccataattacttttcaatctttctagcgcacaaaggttggtgaggcacacatttggccaaggaattagcatgagatgcacttgcatttttgaaagatttgagctcccttttttcaaagtttggtatcttcataaattcttttgctctcaaaactgaagatttggtcggtcatgtatttgatagtttagaattgactgcaaaatttattactttatattctaacacagctggatttggtttaagaaaatggcattgtaggccaaactcagatggcgcaactcacgaaagggggtggttgtgttcttgtgagggtacacgattagcatacatcaagaatagatagaatgagagtggcaaaggcagaaacaaagatcaggtgcaaatagtggttttgagttttttttaataaagtaacatagaaatatgtttgcagagatttcaatcctactcacacacattcgtttgtcacactttcgtttgtcgaagccactcattagtgtttcataagggcaaatagagttattacaagacgaaaactagttgaagacgaatcaaaactatacaccaggttcgtgggttcgcaatgggttagctgtggggtctctgttggtttgtcgtggggtcatcatgggatctccgtgtggtcgccgtccgattgggctggctacaaagaaatagtctgatgtagagagggatttgctgtaaagatcgatgaacaatattgtaatagagagaattataagggtgttgggttttatgcccnnnataaaactctttacaatctgattagt

SEQ ID NO: 123003 - DNA, 1638 bp, Cannabis sativa
tactattactttatttataataacacacatcaaaatgttatattttaaattatatcactcagtataagtacaatatatatatataaaatattacaaaagctggacaacaccgcgcgaagcgcggcttagttccctagtatattaataaaactaattatatgcttaaataacatattagacagcaacaacaacaacaacaaaatctaaaagaataaaatatataataccttttatataatgaaaaaatagttgacaaaaaattcagtagagaaattttgatttattgtttttcataatttctattaaatgaataaaacatagaataccttttatatattgaagagtattttaggtattaaaaagtaaaaaaaagacatttgctttattattttaaaaaatggacattaactatctataaagttaaaaataagaccatttacttgcattttttttttaaaaaaaaaaaacaccaaatttatacaattaaaattcacaataatcaattataatatttaggaagaaattaaaaaatgaatcttttataataattgaattgatcaatctctaccattaaacaatacggttggaatagataatgagaatatatataatgaaaatggtccaaacataacttatatatatttataggactaaaaaaaattaagtagatgattgttaaattattttaactttacaattaggacaaaatttactaatttgtagccactcaacaatacattcttcatgatacgtgtgagtgcatggtaacttaatagcttccaaaccaatcgaaacatcttccaaacaaatcgaacaaaaaattagattatcttttacctccatttttttttaattttttaattgactcttcactcgccgccacaaaacaaataggaacgtcattatcatagtcatcattataatccgaattaagttgaggtagttcatcaacataaacttcaatataaacattaacaccgatttcttcatttgaattataataatctatgttgttcatgatctttctactgcaatcaatgacttcatcagcaagaaaagagagatgaggaagtaagaccgcaacaagcatgtcttgaatggtaacaagcatgtcttgaatggtaacttgggcttgagtattgttgttgttcatcaatgtatcatatgaaattcgccaacacattgtataaaaacatatgggttttctacatcatcatcgagtacataagattcttcatcatctatagtaagagtgaacttgacatttaatttaatggtaaagaaacaagaattatgtgattcttgtcttattggatttgattcaaaatgatatggtattatttggtaaatggtattaccaataatggtttcttctggataactcataattagggttaattaatcaaatgtgtcaacctatagtttaggaaatgaactgaagaataataaatatgaattcgatgttcacagtagtatttatatagagatataaaaggttagtttaaattgacttatttgaattctattaggattaggtaacttattatattaaaatatatattaagaaacgtgactgtttgatattcacaaaagaaaaatattttaaaaaataagatataaattatggatatttgtaaa

SEQ ID NO: 123004 - DNA, 1634 bp, Cannabis sativa
  modified_base (409)..(424): a, c, t, g, unknown or other
attactaattagccttaaaataaatatgacaccatatatatatatatgtatacatttatgagcattgttatggggaattaagatgcttagcattattataaagtggcgatttaaaattagttagtaattctttataatctttattaaaataaaatatttaggacctgatattaaattgcatcaataataatattacacattacaaaagtgcgaagcactataagtaccctttagtatttttttgtatttatacatttgcctattgaatgtataacaatataaatctagttactcgttgaaattaaatgaaaattttaatttatgtgtattaaatttttgagtattgctattgggcacctgtggtgcctagcactttctcgacatgttgcgttgcgattggctagcgatnnnnnnnnnnnnnnnntatattaaactatataggacccgatacttaattggaccaatagcgatattgacacataggaagatgctaggcactactgatgtccattagcatttctctaaatttttggacaccacatccaacattttattccatctaattagatatttaaaaataatatctaatccgattacaattaaatatctaatatttgacggtcagttataattgaatccgtcggtcattattgaatttaatcgatttatacctacatgtgtcctcatcccaacaagaaaattctctacacctttcaacgacaaaccgattgtgacgttacggccataaaccatttgctcgccccattgcataatttcaactaccaaactctccgccctatttttattttatattatcttccactttttgtaagtatttaccaactatttatcttttaataattaatattttcatttttcatttttaataactaatattattttgaaaaaattactacaagagaaagtgatgtattattatattagcataataaattaaaatatataaaatttaatattaaattacacaaataactaaatatatataattataataatattatttaggacaaaccatgtaaagtatttacaatttaataggtaattgtaataaataaattatttatttaaaataattatcaattttagttaagtaagtctcttattattttttctaatcagaaatacttattactcaaccttaatttagatttagatttattagaaaaatgatattagcggaaaaatcatttgaaaattatgtttttcaaaacttaacaacataaactaaaattttgacggcaaaacttactaaactcctcttccattttgctctttacactttcgtccaaaaatttcacttaagtgccacagtggattgtccacatgtacacaagtgtacacgtggtaaatttctattggtccacttaatattaattataaaaaaataatttaaaattttgaaaataaaaaaaaatatattttaaaaaatatattgtgttactattctttttttttcttaaccctaaatctctctcttccaatttctatctgcttatgcagcgtcggagccaccaacgaatcaggagaccacaaaatcaaaatccccaagcccttagcctcgaaacccaaaaccccaacctccctcctctccccgatctctcgagctcaccccc

SEQ ID NO: 123005 - DNA, 1193 bp, Cannabis sativa
ccctcatactcatcaacaacaaggaagagttgaaagaaaacataggcatgtaactgaaatggctttaactttgttagctcaagccaaaatgccattaagtttttggtgggactcttatgtttctgcagtataccttattaataggttgcctgctgttgttaataagttcatttctccatttcaaagtttgtttggccttaaaccagattacacttttccaaagacattcgggtgtgcttgttttccctttcttaggccttacaatcaacataaatttcaatttaagacatctaaatgtgtctttctttggtatagtccctttcataaaggctataggtgccttcacccttcgggaagaatctatattgctcgaagtgtcaacttcaatgagcatgaattcccttattctgatctgttttccaacatacctcagtccacctaccacagaaatctcatagctcctgccttcatcattccacatacatcctatgtagatactcactctcacattcagtttggttctctcaatcctctgtctgaaccctcacataatgccccagatgtctttccttcccatgttattccttctgctacaaacacttctgcagatgactctacatctgcttctcctaaccttgatcctgccttggttgccattgaggaaacagttctgccaacacctattatttcttccattccaccaccattaccacatggtcatcccatgcaaaccagatcaaagtctggtatatataaaccaaaaatattccttgttactgcctcccaaaattagatttatgatgttccaaaaactgtcaaacaggcattaagcttacctcattggaagaaagctatggatcatgaaaatttggctctaaaaagaaacaaacatatatattagttcctcgaactgctgacatgaatgtgctctctaataaatagattttcagggtgaaatataataaggatggctctcttgacaagttcaaagctcgattggtagtaagaggttttcaacaaacacctggtttggattttcataacacctttagccctgttattaaggcatctactatacgaattatattttccttagctgttacatatgattgggacatccaacaaatagatgtcaacaatgcttttctcaatggggagttaaaagaaactgtatatatgcaacagccccaagg

SEQ ID NO: 123006 - DNA, 790 bp, Cannabis sativa
tcacctagagttttcatgtatacccaaagaaaaaaaccatgtatgaaacagtaaaacaaatattacaaaataagcttacatggattttggagccagagtcatacagtatcacagggtatgatttcttaacagtaaagttaagaagaaggaagtagtttgagttcagaataagtaccaagtggagacccggttgcaaagaaggaccttgtttgggcgaagttggaaagagaaggccttgaaggaattggtgctgggctaaaagcgcatgcatctgcttaaattcaaaatctttagaaatgaatattattactgtaaagaagagttggtatataatggggtgagaaagagaagaggggtacctacctcggattgaaacggaaagagaggcagagatttgagctgcagcggccattgttattgcagagagtggagctcgaattctatgtctctgactattgtggaactggaaggaaagcttgtctttggagctcgaagatgaccaaacactatgtgaatgggataatgacacgtgttcattcaatatgcatggtcaaatctttgtggatataacatttttcttttattttatcttttttttctaaaaggaaaaacactcttaaaaggtcgatttttataaaattaaattaaattccaagtttcatcagaggtcatttctattttgcattctaagttttttttttttttaaaatagtatattttttatgtgactaatcgttaattcttattttaatgtgaaaaaccgtgtttttgcaaatgtcagttgtatata

SEQ ID NO: 123007 - DNA, 1368 bp, Cannabis sativa
aagaagaatcatcttaatcaaatcatatacaaatatattatacatatttatatatttatactgatcatatatgctgtgtgattgtgcagttgtgctgccatatgctgctgttgtatgttggacgcatgcttctgaggattcaggatcatcatcatgactcatcttattctatggatttttatttaacactatttgtgttatatatttgtttgtttgtttttaatttttcatagcttttagtttgatcattgtacatgtatgatcacatattgtatcatcagactcagcacaggttgattgttttataatataataatactacattcagtagttctgctttacaaattttacttaaataattatagattattacaaaaccaacacattaaagatctcaatttagtttacaaggaaggaaaaagtgtagagaataagaataataacaagtggcgtgctctgctggtgcaacgtcattacataacaagtcatgccttggtgtcaataattgtattttgtggatgatgattcgtcattaaatatgggccgtcaaaggcccaataagtcaaccaattatgtcatctatgacttatacctttggtcctttggatgctctttgatttcatcgcttattatttttatttttaagattaagatatacactgacgttattgtcttaaataagtgaaattggtgacatttcgattatgatgagatcacatacctaatcctttctcctgcttttgtctgtcttatatgaactattgaaaaaaaatttaatccacactcttaaaatggaggtaccgatacatctttattaatttttgtatctaaattatagttatttaagaaaatttgtaaaattttatgaaattcggaaaaatttaacacaccgaaaactgtgttcaaacagagtgttgcacgcgtgactattttattttatacgagtgtaaaatagattatttgaatattattttctatattgtaaattattctgaatttatcaaaattttgtaagatatcttaaatagttataacgtacacgaatataaaaaaatcaaactaaaaaattcttccgtatatcaaaataagtaaagggtgcatcagtacatctcttctaagagggtgcattgtagaatcaccctaaactataatgcaatcttttataaaccgcaaaatgtaaatatatatagagtaaaaactaatatccaataaaaatttatttaataataacatctaaattataattagtatatatttttttaaatcttgtactaagaaaatataactaagaataattatcttttaatacaatatttttatagtttataatttttttttatattttaacacatatataaatattatatt

SEQ ID NO: 123008 - DNA, 761 bp, Cannabis sativa
aatggaatgaaaattatttcctttccattccattccatttcattacctccaaccaaacgccacctcagtgtccaaaaactcaacaccccatagccaccttcgttcacctcttttatcgtgaagtggcctccatccatctaaaagctccaatcgcaaagcctattatgcaaagctccactcttgtatcatagtcgatattttagaccatcttcaatggttatactaattttgtatggaatttacaccgatttgatatagaatcttttactttttgatgcaacatgtctaatgattcactctaaatattacactaaatttctacaaagtaaatatattttatataaaagatctcgtattttatattatttacattaataatccaaaatagttaattaatgaaataattagtaagaattatatcatgactactagtaagaatttaaaatcttaaaataatttagtaaaataataatatttattaaattaattaaatacttcacattttttttttaaaaaaaaaatcttattgaaattctatagttgatcttattatacgcgacgatttttaaaataagcaaaaaatgattatgcaaaagagaacttaccaacaatatgaaacatctcaagaaaatgaatattctcaaaatacctaaagtccgtatagctaatattttgatattcttcatggttaagattcacaagtgatcaatttgactattaaattattattttacttaatgttgttctttttagttttataa

SEQ ID NO: 123009 - DNA, 2536 bp, Cannabis sativa
acaatgtttcctctctcaaagctcccacaatgaaatctctgagtgttttctcttagatctctctctaaagcaattctttcgatccctttttcagtcaagctaaatcattagttatagggctaaatgcatgagggaaggtttccccttttgcttacaatatctataattggtaagaacattcattatatatttagaatacatgaaatgggggattaggacagtcttatgtatcccgttgatacaatcccatgattgtagggattgcctttgtgcttaggcttcacgatataacctctgaagtagtcaagtcttaatacagggctcggagagctaacttcactccttgcttggattacctgacctttactctgctcggtcaagcagactttgtgcgtgtagatgcattgcttgaaatctgttcggaatatttctccaaccaagtgtaaagaatgacagaattgtgtcactagtacatgctcccacatcatagtgtgaaaaatgggataacatggtgttagtcatgtattgatgcaaaataagttttgataactcatgaaattagttgtaagaatttagagcaactgataaatatcctgaaatgggtcagattttaagaataggacctaaattctgaagtgtacataggtggaggaaaccacatgagaagggagactgattagaagactcattattaagagttattcaacttagattttgtggatgaaattattttaacggggagataattgtaatgacgtcatacttaggatatggattagtaagggcattagaactaataaacaatattttatgaatatatgtaaatattttaatattttattgtaaggaccctattttcaagaaataggaattagagttataatttcttaattttagagattttgctcaataatgatagaaatgtgacagtttggctattagagtcacacgtgtattgtttagaacctttcatttaatagggaatttttatttgatattggaaatattaggactaggcaaagttttaatattggaccattttacccctaagcttcaaagttacttaagggtgaagcaagggacaaaattatcatttttcccaaagaattttagttttattgttagtgttttgtagaattttctaagttattcagattattaacttaaaataaaattaaatattattaaatccttattatattaagttagaaaaagaaaaacacaaaagtcacctcttcaccaaccttcctccctagtttgaccctaagacccaaaaaaaagatgagcttttcttcatttttctgtagtgataatcaagagagtttgaaatttaaaactaaacgtaagcctagaatccatttttctttgagttttgaatctttttgtctggtttgaacttgcaaaatttggagtgaggttttatccgaacaataggcgagtggggattttttcttgagatttggttgagttgtttgaagcttatttaagtgttttttgattactgattgtggtgttgagaaagtttgagttcaagaactcaaacttggctcaataatgatgttttttattattctaagttatagcagctattattgcttgggttatgtttattaggccctaattaggttttctgaaggatatctagatgttttggagttgttttgaggaagaattgaggttaggtgtgtttttgaggaaatgatctactatttttactagcaaggaccccaaaaaacggtctgccatttttatggaaatgacgtgccattatttaggcagtttttgcaaagtctcttttttctgtttcctcaatatttacagtattttcatgctctttattaataggaaaatttttagtttaagtctccaaaaaggtttttgcatgttctttactcgttatatgtaaatgtgatatagggcctctgttcagcgagtgaatttccattgaggctgactagtacacttgaatctacaaatgaggtaagaatagcataaaatgtttgtatatatatgtatatgtgcatgtaatttatatgagaatattgttagaatgtatgcattgatatcatagcggtgcaagctatagtgccgagcctaccacacactatagtgctggtaggggccagaatgaattagtatcacaatgacacaaactatagttttagatcaacagtgcgactttagtgttggttttgactaatatttaattccataaattatttattgacgttgtcataatagtgtaaactatagtatcgggttggcagcacaagtataatgcttgttaagagtgactggtcaatagtacttttgggtatagactgatgctatcatagtggtacgactatcgtgataggatctcagcgcgactatggtgtgggtagtggctgatattaaatgaattgtaccaaagaaaagaacattcttgatttattttataagcctcgtagataggtgtatgggcgcctagatgcaagttgataactctaagatttagagttattttgatatctttaagcttgaattttaagctaaa

SEQ ID NO: 123010 - DNA, 1334 bp, Cannabis sativa
gatctgatccaagatccaataactatccgaatgtttcggatcagtaatgatccgtcggatcggatcactgatccgatccgaatgaatggatctttttgccatgcctagtcgaattacaacattattatcagttaccatagtacctaacactcatcacggcatgacgttctataaatattagtgcttctttataattcttatttaagtaaaataattgagacacaatattaaattttaccaataacgatataatatttcataaaggtgttaaacaccttgggtgtcctttagcatttttcttctaattataatattttgttgaaactttttaaaataatggaggagtgtcttagtgtgtgatttgacaagagtttcacatgggataaaaatccttatctacaatgacatataaagagcaatcttgacacttaggttggtgccccaaggagtacctaagagttgtcacacacacgcgcgctgccattatcgttcatccgaccaagttgaacaaagctaactaggttgtgtagtgtgcaccttttaaatgaaaattcatttaataatacaattattttttaatgttacactattattttcatgtaagttaaaggtgttactttcttcccgttgttattattcagtcgtgtttactcagaaatttggactacacttctaagttactctcgctagctaggttggcgagaatgaaaaagtagttatgttattataatagagacacaacatatttatagtagttcacttgctatatcgcgacagtaatggacctatatttacttcgactttttatttctcacaacatggtaattacagaaacagactaagtggcagaaacttcaatttctaaagagagaaactagagagagaagctctgaccttgtgggtagttttctaaaagtgaaaaatgagcttatggagctctccttttataggtgtgttgacctcaaaaagtaatcaaccgacagaggggccgtgcagacttgatgcttgccacgtgtgtgcacaaataagaataaaaagcaatagacacaaggatttgttaaagaggttcggcacctttgtgatagtgagtaatgacctactccccttttagctgtattacaccaagaaaattactatacaggtcactataggtggaatctactgtagtatccttaggattacaatgtttgaatcaatgctcggcaaaactcaagtcttggacggtctatggtaggcgtgtatgttaggctttatgccctaaataaaactctatttcaatgtaatctccattatttaaatatcaataaagagacagaagtattttcatcacttat

SEQ ID NO: 123011 - DNA, 856 bp, Cannabis sativa
catgcataccctttctcagggtattgctagccagactttggcccattcagggctacaacccatccgagaatggccaatcaaccaaacccctacaacatcagatgcttgtgtacaagcacaattaaatcagataagagacatgattaagggcttggcttgcccgaagccttcagaccttgaactggataggtcaaggggcacaccattctcgacatacatcaatggcctgcccttgcccaagtttaagataccggtatggaaaatgtatactagacgagaagaccctctagcacacatcaattacttcgagaggtaacttgatctccagaagattactagtgatttgcaatgttggatcttcctggcaaccttgttagaaacagctcaataatggttattcaagctggcttcaggaagattcaaatcttggaatgcattttactaagaattctacactcaattctcatcctcaagactgataccttcacagctaaaacaccttgtcaaggtcaaacgactataaggaaaacctttcaaggattacatccaaaggttcatggctgaggccaccaaggtcaaaggcctaacaaaagaaggtcgatatacgaccatactggggagaatccttccattgagtgacttctagaaagataactggagaatcttaaccaacaacatgaaggggtttcttgatagagctgatagctttatcaagctagaagaagctgtccgacaagcccaataagggaaagtcaataataggcagtcttagggtgccctgcatccctaagacttgcaaagtgtgtagacaggagcaagcaacgccacccagacctctagtggcaagaacactagg

SEQ ID NO: 123012 - DNA, 1101 bp, Cannabis sativa
  modified_base (75)..(75): a, c, t, g, unknown or other
accttaggtattttcaccgccaatttttgaggttgaggactaatcggcatcaacctcaagtttttggggactttngccgcaattatccctaaaaaataaacatgtgccctaattaatatatttaattaagatgattaaagaagattattacttttgacattgatgatctatgacgttttttaaactcagacttgatcaaatttagtcccttattaattgccatcttctcaatatatgtatatctgaataatttaattagtttatgaatatgtacgagtagtattagtaattagtgatgaaacttatttaattactcttttagtacttatatcttacgtaattttattatatgtatatatggatcgatcaaaaaatgaaaatgaatgaatatgtactctttgtgtctttaaatactcaaatcataatactcctaatcctaattctaatataattataatatataataacaatcttaaccctaattattattgtgaaaaaatataaatatttttacttagtcaaaggagtctcctcgaatatttgattttttttttaaaaaaaaaggaaattatataacaataaataatgtgaatttgtaaaaaagaggatattattatataattatttaactaatatttaataatctaaatttttagtcacgtggtgtaattttaaatattttaggatctagaatcatctttgatcgatgaacctaaatttaaattacgtcaacaaaaaaaatttaaatatgtaatagttgggaggaaaagaagataatgttggtacgtagtgtgagtaccttggttgacatgcatggtcagagccggtcaaagggtggggcagccggggcctcggccacaggctccacaattttggagaccctaaaaaaattaaaattaatatatatacatataaaaacgtataatatataaatatttaactcaacaaaatacatgaaaaacatgtagcacaaatggtaagtggatcttttattggacttgagattcaagattcaattcttccctcactactttttatacttttaattatttgtgttttaattttaaaatattaataataaataagatttatatttattat

SEQ ID NO: 123013 - DNA, 624 bp, Cannabis sativa
gagatagagagagagagagagaaagagagagaatgagatttgaaactgggttttaggatattaaatatccccaagtatagccgacagttttgcactgtcgctattagtatagccctcaattttaaaccatcgataattaagtaaaaacacacatttttcattactaattaagtaactattgtaaactgaaaggtaatgcataataacttttttaagctgatgacaatactcaattatagttgtcgtttttcaacaaatggacaaatttcaatagagtcgatcttaaataaataattttctgactgacgagaatttcttatatttgtactcgtgattattccacctttgggagcttataaactaaatgttgatgtgtcagtggatgtttcttctaatactataggtattgaggcgatacttcaagaaacttctaggaatgtgcttgggtgtttatgcaaatccttacttggtatgggttttataacattttattgtctagctcttttgtcttgattaacttttggtaacttatttattatgatgatgaggtatggatgtcttttttgttgggttttttgccctaaataacacccatttcaaaataattagatttactaattaata

SEQ ID NO: 123014 - DNA, 949 bp, Cannabis sativa
agccccctcctcaagattattggcttaaaattaattgatgttaaagtgggtttggaaagttcttgcattgcggtggttgctaggaacttctatggcaaagtggtttggatttctaaggctagattgaagttttcgaaggcttttatggcgaggcggctgcgtattacttagatattgaagctcaaagggcacaagtttatcattgtgaagagcgactcaagagtggtgatcaattccctcaatcagctatcacattgttgggaaatcgagaactattcttcattttgtttgaaactttcgatgttttgatggttgtgtttttactttgtattcttagatcttataattttgctgcccatagtgtggttaagtgggtttttatagacggactaaatagtagcttgaacgttccttttattctgaaaaacttattttgtaatgatcataagatttaatttttattatcaatgaacgcgtatttcataaaaaagaagtgaataataaaaaaaagtaaaatattatatttttttagatgatgtaaaatgtgtaaataatgtttgggttagttgcaatgatattttatcattttaatggtgggacccaaaaaaatatcaaaatagttctaccatcaataacatgccaattacatttttcttattttaaaagaaaaaaacatatatatttattgtattagtactggtgccaagtttggatatcaatgcaactatagaaacataaattatttttcatactctctcatcaactcacttggcacaaggacctcttagccaactctaatgagagttgtccattcatttgactaaaaatttgtgggttataatatcttatggaatatgatagagaagagaaagaagatcgattaaaaaaaaaaattaaatggacacttgtgccccttaatattttgaagggtaaatagtggcataagtac

SEQ ID NO: 123015 - DNA, 1584 bp, Cannabis sativa
  modified_base (889)..(889): a, c, t, g, unknown or other
  modified_base (1338)..(1352): a, c, t, g, unknown or other
cgttttatgccactacgatcaatccactcatggacccatctcccataatcaagggccccaagactggcgcaagcagagagcacactcgtaagtaaaatgttatcaggttcaattcctgattgccgcatctcgcagaacaattctaaagaccccttgggacgttcacattgcactaatctacttatgatgcatgtccaggaaacgacttccctttctgagctaatcaaaggtttgctttcgctacacataaaagctcacacttgacatacatatccatcaaagcattgcctaaaagcaaaggagtgtctatgagacgcttaaaactcagtccatgaacccccttcccaaatctcaaatacccttttcgaccacaggcctcaagtacgctaacaaaagtcgccatattaggttaggcttccttttttaagaacaaagctatggccttaacaaagagtgagttggcaaaatatcctgaaacttttattagtaaaataattttttaaatattttaattggcaaaatgactttttttaaaaaaaaattgacttaataattaatataataactacaattaatattattttttctttatcatttaaataaaatcataaaaatatcactctagatttttcgtctctctccttcggtgatctcaccagagctatggcgaaaggattaaaggctatcagaaaaaccaaatcaaaattagaaacaaaaaaattggtcctccctcatcggataggaccattaagacactttctatggatgttgtgctgggtttgaaagagctcgaagttgaagatgcaacaattgaagaggaaaaatgggtagagaagatctactccattgaagagacggaagatgttgagaatattttaccaggatctanatttactaacaagtatgttaaattaacatcctaactatgaatatctctaaaacaataaaattaaacatataaaagtttagaaaaccttacattgattgcagtagaataatatgactcattctgctgagatctctaatcgttttacctttctgtcgtagagtattatcaagatctgagcttggatctctctcgttcgggttggttaccactgtcttctgctctatgattgagtacttgatttgctatgtgtgggcatggcactctatcactataggctgaataggtgaagaacaataaaggagggtttgaatcactagaaggtgtctctcatctactagttgtcagagaatgaaaactagatttggtaggttgaagttgaatagttggatgagatgagagcatcatgttcctttaatagtgtttcaactagggcttaggtttgaattatnnnnnnnnnnnnnnnataaaatattgggcaaaaatcactagagtggccgaccactgaaaggaccaatctctagttacaatttcgccattttatttgaaccagttattcttctttcaataatatcatattaccaattcaatcgtataaatgtcaaaataatttatttaataattacaattaattatcaaataaaattaccatttatattatttattaattagatcatgcaaagactcttaattaataa

SEQ ID NO: 123016 - DNA, 1846 bp, Cannabis sativa
aaatacactaggtttcatcgtccgccttaataataagggaacttaaaaacccataagaaaattaactatgaaagcggtaaactaacactgagtgctctcagtcttttctctggatttttctgtttgaatctgaaacctataactatattctaaaaacctaagcttctatttatagaagggtaaaaggactaatacacaattaaacttattacatattgcatgtggctagaaatgcaattacacaaagtttaaccatacctgccacgtgtcaccctttcattggttgcatgtggacacatggcgagatgagagaatgccacgtggaaagtggctgaagcaaatttgggctgatggggctcggagagaaaaaaggtccactctcggtcttgggcgtgaggcgcacacacgtttagggtgaggtcgtgcgcctcacgcgcgcgtgatggacaagaaggggacaagcccctggcgtggctgctgcgagcgagtaggagaccgccacgtggcgggcatgttggctggggaagaaaatgggccgattgggcctttgtctttttgtgctctcttttgggcttcaaaaataccaattttcatgtgtttgggtcacatttttatcacttttattccttctcttttattttcacaaatgttattttctcaatcaaacacaaacaaaattaaatccaaacaaactattttcaacacaaaatatatcacaataattttaatgaaaatatttatgtaaaatctaattaatttgtatttctttaaataaaaataatgtattttttttaactgtatatttctttttctctattatgccataaatactaaatattaattataaacaaagataaaattaaatctaaataaaatattttcaacataataatatatggcatcaatttcttaaaaatattatttaaaatttaattaactttgtatttttatactataaaatatgtaatattttggcatttaacatgcaaacttctcattcgcgagcacaccaacaccttaatacaatgataaagggatgaagaatgattaaactaaatctagaagacctatgacaaatggttgacaacaccagccttaggactaagtgatgaagacaaagctcaccaaaattagtctataagaacacttgaaagaattctcatagactaggaggcaagtgttgaccccaaaaaatttctaagtgtaatctttggagtcattaaggttatactcgaaagttcaccaagtgtaaattctaaaatacacccaagaggatgtgttggtaagaggaagagcaaatgcacgggccaagctccctatgcccacacacaataacggggagctccacgtagcaggaggagtcctttctaacaagtagctccaagcagtaggatgaggctcctccaacaagctactccatgcagtaggaggaggctcctctaacaagttattccacgcagcaggaggaggctcctctaacaagtagctccacgcagcaggaggaggctcccctaacaagctgttccatgcagcaggaggaggctcctctaacaagctgcttcacgcagcaggaggaggctcctctgacatgttgctccacgtagtaggaggaggctcctctgacaagctgtaccacgcagctggaggaggctcctctgacaagctgctccacgcagcaggaggaggctcctataacaagctactccatgtagctaagggcagctcctagaacgagctgctccacacagcagtgagcaacctcctcagctcgaacacctatagtgtaataccctagaattaagtgatggattagcaaaaaccctaattagataattatgaataattg

SEQ ID NO: 123017 - DNA, 1158 bp, Cannabis sativa
gtatttacccatatatatatattaattttttaaattaagtattttctcttataattttaattgttagatttaacttaaacaaaagtcactaacggttgaaagattgttgttctataacatatactatttagggatttttacatttcacacttttttttttgatctaattgtaaaaaataacttggtcaagtattaataacatgaatttattttcttgccaaaaaaaaaaaagtattaataacgctttcctttgtttgggtatgtctgaataccttatatccatacattcctctatttcatctttctttctcattctctcaatttttgttaactttaaaaataatttataaccacgtcgttactcagttaattctaaaaaaaaataaaattgtgatttacttttcaatgtgaatattttaagatgtggaaagtatatgtttttttttttgctatttcttgctatttctaggctatttctagaaaaattctagaaaaaaaaaaaaaactatttagttactaatatagtaattagttactattttacaattttttttaaatattaattaacatttattttagaattttgttaaatatattatatcatattatattatacgataatttattagctttcaaaataacaaaaaaaagtatataaaataattagtatataaaagtgatagtttgttatattgcatatcaacttattatatttgaaaataatttttaaggttacctaaatgtattttaaattataaactattataatataattttaaaataactaattaattactaaggtatatacaaataagttttggaggtaaccaaaatatatctcaaattatatgataagataatgaaattttttatgtagttaaaacgcaagaaaatgaaaaaaaaaatggaaaacgtcacaaaacgttaaagttaattaacgtgacacattaaataaaaataataatattattattataaattagatgtaatatatatatattattgtaaactttcctattatttatttaaggttaatttttttttttaattatgatggaatttataaatattaaatatattttggttgatttgttaaatagggtattaatttaggggaattacctcatatactatttttttaacgtttttttttttttt

SEQ ID NO: 123018 - DNA, 3122 bp, Cannabis sativa
  modified_base (2120)..(2123): a, c, t, g, unknown or other
  modified_base (2417)..(2439): a, c, t, g, unknown or other
  modified_base (2592)..(2599): a, c, t, g, unknown or other
  modified_base (2733)..(2733): a, c, t, g, unknown or other
  modified_base (3047)..(3075): a, c, t, g, unknown or other
tgtgcttcaattggagaattattcaaacgaagtgcgttctattgttattaacgattgcgagttaatgaagttgctctaagtttattaaaaaaaaaaaaacaaaataaaaatcagagcatggtgtattttgtttttttttttttttggttcttacaagaataccaatcttttttgttatttttactgtcatatttttcattttatatttttactgtactaagtttttaaaaatgttgtattaaagtttcaaaattacaaaaagattgtgtttcagtaaaacttaaaaaaaaattatagaacaccttaacaacaacatgaaaacaactataaaataacaaaaagacagctacaaagcaacagaagaaaaaaaaaaagcaaagaaatacaatatgcaaaataatatcaactccttaattagttttcacaacttgatttatctttttgtactgctatattatttttttctatgaaatttgttgttacaatttcatactttcatctcttttctttctcttcctttttgggttaatgataattaaaatgacaattcattttttggaagttaactaaaaagttacattaataatagaaataataaaatcttatgatttcaaaataatatatataatataatggataatatacaatttaaataacaaaaaaaaattaactagataacaatattttagtctgttatacttatttttcggaatagttgatagaaaaatcgaattgaatgccatgtggcataaataataaattctcgcaatacatacattgtgggacatgttgaaaaaaactcaggactcaacatgtgaggtgatctcatctaaataaggatcataaagttcatgaagtgaggtatttcaacattgtcgggatgtcatttcgataaacattcaacatcttgcaacaaggactttgtagctggtcgaaatataaggatcttgtagctacttgtaatacaaagatcttgtagctgctcataatacaaagatcttgcatctcctcgttacacagtcagcaatgcattgcctcgtatttcacaccagcaacgcatgtcgttgtaatacatagtcagcaatgaattgcatcgtattacacaacaaaaatgcgcatctcctcgtaatactcaattagtgatgaatcacctcgtattacactgccatgatgaatcatctcgtaatcctcagttagtgataaatcacctcgtaatacgtagcagtgataaatcacctcgtaatacacagcagtgatgaatcacctcgtaatacacagcagtgatgaatcacctcgaaatacacagtcagtgatgaatcacctcgtaatacacaacagtgatgaatcacctcgcaatacacatttagtgataaatcacatcgtaatacacagtgagtgataaatcacctcgtaatacacagtagtgacgaatcacctcataatacatagctagtgatgaatcacctcgtaatacacagtagtgataaatcacctcgtaatacacaacaatgatgaattacctcacaatacacaatcagtgatgaattatctcgtaatacacagtcagtgataaatcacctcgtaatacacagtagtgatggacacctcgtaatacacatgcagtaatgcgttgtctcgtattacaaagtagtaatgcacatgctcacaaataacatggtctgaccaagtcaaataccacttcaaagaccacttctttgtattttaaatataacatagttatatatacttatctaaatgggtcaatatggtgattcatgttcaattatacgtgaaacgtgggcattaaccacccatcaattataactttttactaagataatattgagtaaccactatcctactcctataaatagggattcacaagggaagggggcaattctgttttacaaaaattatgccaaattgtaaacacaatcaaaactcaaaaataatattgactcgtggagtatatagattttgttgagttttgtgtccctaaataaaaccatatttcaatgtaatcttgaatattcatttatcactaaagaaacagatgtatttcattacttgtttaatgggtcatttggttcatgtgattatttatttgatttataaattcnnnnaaatccttatcacatttatattctagatattgtgttatcaacatagtggaaagtaatcaagattatgtgactaaatgaattcctgtgatttatcattatacagggtttaactgataggataatctataatgtagtttactttgcacattagataagtattatgttctttctaggaaattagttaaagtaagtctgggttggatgcatggagtatacattggaagagaccgatattaaacttggataagatgtaataaacttaccgtaacatctatctaattcaatatcacctannnnnnnnnnnnnnnnnnnnnnncaatcctgagatggttaggttctacttcagttgtattatttatgttcttaactttattcattaaagttaaccaatggaacttctcgtgacatatagaataaggacatggtagttcaattgagtgggagcactaatcatagatacggaatctannnnnnnnatttggacatagaagtgaaatgatgatttcctttgagcttagcttaatagagataaatagttgagtactcattttagtaattatattagtttactataatattatttataggtagctaagtgtttaaggataanatacattgaagggtgtaacgataaatttgtctgtacttgatgtaaatcatctatagaggatcattaattattaggattataacaatagataattcatagtgtatctatatcgtggaatatatagagcgttttataaaattaagagtgtaattttgaatctatagtgacacaaggaggaattaataagttagagactttaattggtaaattatagagctacttattagaagcttgattatataggcccatggtccccacactagttgcgacaatactgcttataagacttggttaattggttttaattaatcaannnnnnnnnnnnnnnnnnnnnnnnnnnnntttatgaattttcactaagcaattacttaattgtgaagaaaagaggt

SEQ ID NO: 123019 - DNA, 1149 bp, Cannabis sativa
taggaccaggacctaaacccgaacacagataaaaaccaagatcgagacccaaaaccgaacttagactaggactcaaacctgaacctagttcgggacccaaacccagactagaactgggacctaaactcgaatcgggatagggccttggggaacgaaacaaggatcgagacctattacccgattccagacccgaacttaaacctaggagccacctcatgacccgacacaaaaaaaagaacaagaccaaaacctaggatcaggatccagatctggactcggggcttggaccgaatccctagttggtgtctagatttgggacgcagccccagacccgaacccagaccaggacccgaacccagacccggacctaaacttggacctaaacctgtaccctgtgacccgaaattggaaccgaaactagaagtagacctagaccaaggaacgggatcgaaaccaggacttggaccttgaaccgttacccgacctggacctagacccgaaactgtaactgggccaggacctggacttcaactcagaccaagacccaaaccgggactggaacccggatcccaacctatatctgcactcggaacctaaacccaaacctaaacctatgaccccgattgggacataggatccaaacctggtgcgggttttacgttcggatctgggtccaagtccgtgtctgggttcgggttcgtgtcccaagtctcgtttatagttttgattcgggtctgcgtcccagtctgggtcagggtctgcgtcccctggtcttgttcgcaggccccagtctgctttttgttccacttccagttgtggatcacggggtacggtcccgggtctgggtccgggtttgattctgagtccaggtttaggtttaagtccgtgtatgggtcccagatccaaacatcgacaatgggtcaggtccaagccccgggtccagatctggatctcggtctcgggtcccagtcaagttccacttcggatcccaggtcgaggtccaggttctagttcagggtcggggtccgggtcctaggtctcggtgccagttctgaggcccgggtcccaggtccaggtttcacattcaggtttaggtcctaggtcccagtcgaggtctaggaccggttggggttcaagtcctagtccgag

SEQ ID NO: 123020 - DNA, 758 bp, Cannabis sativa
ggcacaaaacccaacactatctagctcgcgaattcggtgctgatgttgatgcaagggcgagatcaattgccaacggctactttccctgccttttcactgtgtcacaaagttgatcaaagactgacgttgtaagatcgcgtagtgacgatagctaagaggagaccattagtatcacctacgcccactaggttttgtcaggcctggttatgttattattggttggaagtgtgttgttaaggtaaaccatttttgacaatgttttttgatagggacttatggcattacgatgtaactataactccagagttacattgtagaaatgactcgagtaattaaaaactcgtgagggaatctctactggagtaacgttcatcctgctgtaggttcgagtctttgcctcgaaagctactatgcgccttgaaatttataagaagaaataaactaccctagagatcctagtgcatattgggtcatgcgcatcccaagaccttcccacatcatggatggtgcatccatgatgttttttatgcatgaaagatcattggggtatgacacgtcacaaccctccttccgggaagagaaggactgccctaagtctgtcatacacgcccccagtgatgttacccttttttgtcttttaaagcaaagtcatcgattggatttttatgcaactttagccttccctcacggaagtcaaagtttgtgaaagtgctactagtagattttattgattcaagttaccaagttgtacatcttta

SEQ ID NO: 123021 - DNA, 2678 bp, Cannabis sativa
ggtttgggaaccaagacagttttggctacccatccggggtaaaaagcttctatgatgaatttttttgtccagagcttttctacttcatccttaagtgcctgtgcatgttctttgtcaagcaatctctgtttttttgtacgggagaaaaactaggatcaatgatgagggcatgggaaattacaaatgggtctatcccgaccatgttctcatgtaaccaagaaaaaatattaaggttttctttgagaaatttgattgaagcagattttatttcaagtgacaaacctttcctaattttaagcttcttggtcgccatagtgggatcgatctctatttcttctaattcctcaacttgcctgatgtttggattgggatatccaaagcaaggatccatgtcttcaaccccgcaatgggtcgatccctatttattcaaactttgctcaatctttggcccttggccggctagttcttccttttttttcctttgtcaaagtagggttgtagcattagcagacaatcttctagtctcccttttgacatccgaccccattcctgatagggaacatgacgcttaagtggtaaattaaagtcattgctttcaaatcatatagggttggtcatcctatcatgacattaaaagaaaaaaggacatcaggttttaggccattacaatgtttattgttggagacaaagaagaacatcaacacttgttcaaaataagcaaaggaaatagagagagatagcctcccactaggaaaaattaccataatcatcatctgatgatgaagaagaactacaataactactaaacttcccagaaccagtaatcatgtataagtcaaagggatttagtggagacatgtgccagtcaggaaggctcaccctataagaattggtaccatattgcttgtcaatttcaaaataagaactgttaaacttaattggacatgatactcgggataccaactatcaaacctatgagctatgtgataaacacagttccaaatataaaaattatattgactatccttaaacttaactaaagtagtacgcttggccctaagtattgtgggagaccatccataattattatctcgggatgcatcttctccagcttcctgaggtgttgtgttccttaagtagtgggtacgagccacataatctctgtcttcctcgtcaacaaggacagaacctgttgccaatcagcatacattggaactttgaagtcacaggcgacttggtcactgccaagaagattgcaagtcttcaaattattctcgtgaagtaagaaacaaccacctcgcagactgaagggaagaccgagaaggatcttatgctcttttcaattttttgagttgccataggcctcttcgtaaccgctgtcaatacaacataaacaaaataagtaaatgcctacaattgtcaaattgaaaactcaaaatctagtttttgagataagataaaaacttatgtattatttgaaagacaattgtgttaataggggtgaggcctactgtccagaagaagtcgcccttaaactcggttttgttgggctacctcacaatgatcctttgatcatttgtgtgggtcccaaaataatagaagcccgctgctcctcgcttccttccaaggcaggcttatactgaatagaagtataaaatttctagtggggttggacattcccacttcagaatttaatatagaactttcaagtcagctaaaatcctgtaagaatttggaatcaactgaaagggggatatttcgaggtagttgcagaattccttgtaataatccttatgagcgagtactgatccatctcttatatgtacaaagctccaagcacctatcctagatggctcgctagtattgcagccttcttctcgaaccacccgttcaggaggaaaacaactaaattcccctggagcaacgaacctaactcgacatccttgctcatacttgatgccacaagactttagtacctcgccaacgtaagctcctatggatctaacttttgattcaatgagctctggctcaaaagtaattgtgggatcttgaggggtattgtatttttgagcttttgaagtcatgatttcaaagtctatatatgtcatttggtgaaaaattaatagtgactggaggtaaaaataaaggtctcgctaaaggaatattagataaatttagggattcaggtcgcttctcgtaaaaaacgatgtttacgctcgattatttcttacaaaaattgcctatatcgacctgaaatgtcatcgtggttgctcttaataagatgttccctaatttttgcattgtttatctcaaaaaaagttttagggtatgtttgttttgggtctgaatggagtggctaaattctgaggacaatccatttctaaaaattctaagatcgtgatttctagaattaattgggtcatacttgtgaacgaatgttatcccaatttctggaaaaacccaaatatgacttaacccataaatctataaactgaataacctaaaattttccttagccctataactatccaaacaatcaaaacaaaattaccaaaaaataaacaaaaaatacagataaagaaacatcaatcaagaaaacaaaactacaagtatagaaaaggaaaaccattaaaaaaaatgagagtgtatcacttactattttggttagaatttctagg

SEQ ID NO: 123022 - DNA, 977 bp, Cannabis sativa
aaatggagtttttatagataaggtatgtaatgagggatcttagattcttgatcttaattaaacttcagctagactaatgcattagatcatagacacttcagcatttattcaagttggtaatttttttaagttaagtttggtatatgttggcttttatattgataattattagtttgcttttttttttgtttagttttgttataaagtgatcatatacattacatcaacgagatgatgtgaagattttaagtggtggctggcagcaggactcaacaactttctagaattgaaatactataaatatagatacaatatatatgtgtaaaattatatggattgttgttataattatagttcttcaatttaataactttgtatttaagttacttcttaatttatttattttttttcttgtataaatagacatatgttaatattattatattcagtctaataatattatttgaatattgttttgacaatttatatttttgacgttaatttttgtattatacactagtacttaaaagaataaaaaaaaagttctataaaaaaattgaaaataaaagaaaaataatttaatatgaaaaaaaagtaaaaaaaaaacaataataaacatataagaacacttgtacaatacatgctgttgtaattatatttagagtagcaacatttagaataaaagtgttgctatatcatattataattttttttaatattaacataaggcaacatttatataagtctcaaactctatcttttagcaacaatttaagagacaacactttttcaagtattaccttttatatttccttagttaaaagaaagtattgcaaaatatatttttctagtagtaagtgaaatgacgatttcctttgagcttagcttaatagagataaatggaagagctcttattttagtaattatattagtttactgaaatatcatttagtggaagttaagtattttaaggataa

SEQ ID NO: 123023 - DNA, 914 bp, Cannabis sativa
tagaaaaatttaaattttatgctttaataaattagtaggatcataatcccacttataacctgattaaccgataatataaatataaaccctaattatttaccattaggcttatcgggatattacacctttggttttggtcagccttgacatacttctgtaaatgcgagttattttttcagatcaaaaactcgatttcttgctttagattattactttcgtttgtgtcgcggccgtaatctgcatgaaagtggtaaaacttggatttatttctcttacttacatctttttcatgagagatggttttttgtacgacaccaaagactaagttgtcgcatagactgtgtctaggtcgtctgtcagtacagagaaggcaatattttttgaggcattttccctggggtgctactcgacattgctagttaatttccccttctttctattaccctgcctgttgccgttgttagacctcttcccatttgaatttgagctactggggtactgtggattctggacggacgttcttatcgatgaggcaagttgctggtttttcttttgtctgacattatccacacatcgaacaacttcttcgaactttatgaacccatctgctatgtctagaaattcagccattgaccccacagttaaccttttaatgtcattccacaactcttcaagtggctcaatgcccccagcattgcagccagcctgccttcttcagttagccctttaacttttgtagcatcgttcataaacctactaatataagctatggggagttctcctggcatttgctttacttcgaccaggtatccaaggtatgagggaagttgacgagaggaggaaaactgtgcatgttgttggaaatattttaccaggatcatagatttactaacaagtatgttgtttaaacatcc

SEQ ID NO: 123024 - DNA, 629 bp, Cannabis sativa
ttatttttataattaatatagtgaataattaattgggtaactatatattattttagattttgtatttttataaaatttattaattaattttttattttattaaataataagttaaataataacaactcgatctcaaaatgttattacaagactgaatgtatttcttacaactgttttgtgttgaaaactttcttcaaattgattatattaaaaaaataattattaaaaattgaattaagagttttattttgtaatattttaaaaaatataatgtctaatttatcatttaacaaatcaaaaagttggagaatggtattaattctaatcaattaaccaattgattatatgctttcttacctaataatgtggatatgatctctatatatcttgttgggtaatatgtattcatcttcacttatatacttacttaacccttacgttatctatatttttttaattaatttcatttgtaacgtagttgtacaactaattaacttgttaattaataataattactacatatctaccattctgtttttatatgtatgtcttctacgtatatatataatatctttttaatagtaaatatatacactacaaaaaactgttatttttagtgacaacttttt

SEQ ID NO: 123025 - DNA, 3455 bp, Cannabis sativa
  modified_base (48)..(68): a, c, t, g, unknown or other
tgaaccatgcaacataaaaagatttctgatcttttattaattagtaannnnnnnnnnnnnnnnnnnnnttttatttagggcacaaagcctaacagttatataggctatccttaaacctaactagtgaggtatgctcagccctgagcatagtaggggaccatccacaattattacctcgagacgttccttattcaacttcccgaggggactgtttattaaggaagtggatgcgagccacatagtctctatcttcctttccaggtggaacagggacttgttgccacttagaatactttggattgtaatagttggaggtggattgtttgctgccgagaagattaacggtcttcaaattggtctcgttcagtaaaaaacggttgatcgcagtccaaacagaaggcctaaaagagctttgtggcattctgccatcttaggagtgggaattgacctttttcgtgatcgttgtcaacacattaagaaaaataaataaatgccttcaatttaaaaatcaaaaattcaaaaccaagcttttgagaaaagatgatacttacgtataaggcaaaatgttattgtgctaatggggggagaccagttgtctagaagaattcatccttgaattttttttattaggtagcctcacaatgatcctgcaattgttcatgtgggtattgaggtagtaaaaaccacctgatcttcgcttccttgtgggaacgacctttacagagtaaaaataaaattttttaaggggagtaggacactcccataccataatctgatacaagacctttaaacaggccaggtttctgtaagaacatggaattaactgaaaaggggtaattccaatgtaattatagaaatccttgtagtactctctcagagggaataccgctctagctctgatgtgctcgaggctccaagcgcctattccagatgagccactggtactagcagctccgcactcttcttggattaatcttttaaggggaaaacaactaaattccccttgagcgacggacctaactcgacatcgtttctcgcatttgatgccacaagcctttaatatgttaccaacataggcagctatggatctgactttggattcaattagttctgcctcgaaggtaactgttggatcttgaggggtctttgatttttgagcttgagtggtcataattttgaaatctaagtgaccttgtgaaaaaacaacagtgactcgaggtaaaaacaaaggtctcgctagaggaatagaagataaagtttggtgttcaggccaagttgcatctcgcaaaaaatgatgcttaccctcagtcatttcttgcaaaaattgcctatagcaactgaaatttcatcttgattgatttttattagatgatccctaattttggcatcgtttatctcaagtatggattcaggaacgtaagttatggattcaaatggaagggctaaattttcaagacatacagtttcaaggaattctggggttgtagtttcagaaataaattcggtcatacttacagactagtgtgatcccaatttctggaaaagataaattcaaaatctaagaacctaataacctagaaattttacttaaccctaaaattatccaaactagcagatgctaaaagagaaataaccaaacaaagtagataaagaagacaatcaatcacgaaaatcagattgcaaatgtcaaaaagaaaggtatatagaggaaggagaagaaccattcactattctgatgaagatttccagacaaagaagaacttcgtgattgagattttgatgagcgaatcaatgtgttttgagaatctctgagattgaaggtgaaatccaatgaaatacgcaagaagtaagtcaaagacaatgagggcatacaaatacggaggagaaaagcaatcaaaaaagccttttgcagaaaaatttagaggtttgaaaagcaaaatggcaaaatgagctctcacatctactttttatacccaatcaccgataaccatttgatctaaaggaattagatctaatggatgggaatactacaaattggaaaagataggacatttaatgctaatgatgtgcctcgaagttataaaccaccagaaaaccaaagcatgcaatttttaaaaattgtgttatgaaaaaaatagccttgtaatcatttaaaaagttctttttaattaaacagtactttttaaggggaaattattatacttaaaatttggctacacttcagaagctgacacgtgtccaatatatggaagatgaatcaattctgaataatataattaatattatttaaataaatgcatattaaataactcattattataaaataaaggtaaatagataatattcattggctttatagtcaaaaacgagacaagaataataactattgatctaagattaatgagacatatgcatgccttggaatatacaaacaagaaggggatattcatccacccgagcagaatgaatgcatcaacatagaccgcctcgcattacatatagcgagaagatctcttcgcattataaaagccacaaagaggacatagcgagatggaaaccttcctaacacttagtgttttttcttatcaagatggacaaggaagataattcgaatcagaaaagatataaccttccacgtcagcacaaaccatctaaaggataaaactaaaaggcagttgagtagttatttagtattatctcacatgtaatttaaataaaatgtagagattgtccacgtttcataaacagttatacaagtaacaatcccataaaagataactaccaacctatatttctataaatagggacagattcatgggaaaatggacgaaaaatttgagaggatcattattattcaaaattagatattgtattttgtactctaaaaatattcctaataagaaagattcatggagtatgtagattttaactataaaaccacgtaaaaatacctagagttattatatcttttattaattattaattttcgtagaatacttattactgaaaggctatttaattttggttaacgaagatctacgttaacatctaataatataatatcttaatttgaaaattgagacatttttgatattatatttctaatcttataatttaataaaataaatttaataaaataaacaaatttgaaaataagatattttgaaggttaggatattaccaattttatttaactaaaaaaaaaatatcctaagtttgaaaattttatggttacaaaaccctaaaatttctattcaaacgaaaattaataatttttcaaaattttcatgttattccgaccaaaatataaaaattaaggtaaatatctaataagacaaaatgtcaaaaataaacatttttctaatcttataatttaaattattaaaatatatttcaaaaataaccaattttgaaaatctgatatggttagaaaatttgaaattctaactagatta

SEQ ID NO: 123026 - DNA, 2125 bp, Cannabis sativa
tgtaagactgaagaatccaaacacctgaaggagaattgggctcagatcttaataatactctgcgatagaaaggaacaagggttagcgatctaagtgggaggattcattatatcccgttgcaatcaatgtaaggttactcaaactttatatgtgtttaaattctattattttacaaattcatattttggatgttaataaacatacttgttaataaatctagattctagtaaaagataattcaacacggccatcctactaaaaccatggccgaccaaccttttggaggccaggtcgatgctgtagttttatcccatctacactcggttggcttttccccctagcataattgtcatagagcctttatgcactcctgtcaatatctattcagcttctttcttggtaacacttcttagaggtggtatttggataccacgtctgtggattatgctgtcaaggatttggcacccaacaaccatccctctaatccttactttctggcaaggtttttgtttagatgtatgctgctgtaagtgtatccaagttggttgtccatcatgtctattccttttgaaatagaaatgtttagttctttaaggaattgagaaggtaccaagtttcccttagttgtcaagacacaactggctagttgagcgagtgcgtcggttattgtgttatctttggggacatgccttttaggatagcctttgagctaacttgataagtcttagctcatacaggtcgtcatcatattgcattgagttttatattcacctaagacatgaccgacgactgtttgagagtcgtggtgtatgtctaggtgttcagtacaggcttcgtgtgctagcccgaggccaacattcgaagcttcattttcatccttgttgttagaaacattgaaattgatttttgttgtctcgtgcagccatcgccactaggtgtttggagggctaggcctggatcgggtaggtggtcaatgcaccttctaggttgagttgtattgctcaaggaactccttcatgttgctcattgagatccttttgatttctttccaaaattcactcaacgacaagatgcttctgagtatggtcatatatcaattttctttagtcaggcctttaaccttggtggcctcagccatgaacagttgaatgtaatctttcaaagattcaccttgtctttactttatcttgagaagatccaccagtcgtgaaggtatttgtcttgaggcagagaactgaacatagaactctttggagaattctttccaagaattaaatcttcctagggctagcttaaaataccactgttgggctattttagccagagttatctgaaagattcagcattgcatgtatcgagatacttggttgagatctatttggatctcaaagtgttttaggtgtactaggggatcttcatttcccgtgtacatcttccaagttggcatcttaaatttgggcaagggcaaggcattgatgtatttttgagaaaagtgagccccttgacctatcctgctcaaggtctgatggtttttggtcatccaagcccttaagcaagtctcgtattcgatccaattgtgcttgcacaaaaggatctattgatgtaggggcctagttagttggcctttcttgattgagcgacaaccctcgattggctagagcctcaccgggcttaccctgggagagggtatgttcaaaggccggccaaccctgggcctgagagctattcagggctggccaaacctatgttgggtagggcttggctgcccattcttccttgattggctaggggaacctgtgcgttgagatggggtagatcacaccaatttctcgagtttggtggatctaactatctaaactgattgtgttcactccttaacttgttgctgtcttcgatttttgcacgtgttcccaaaccttgctagttaaatattggcctttaggttactcactcctgggtgctccggcaaaggaattcaccatggttgccaactagaggtgcaccactaaggtgttggaccagataaaggttggtaaataaggggtgttctcaccaccaaatctattgggttttgtgccctaaataaaacccatttaaatataatcagatttactagttaataatg

SEQ ID NO: 123027 - DNA, 1089 bp, Cannabis sativa
ccagagattaaacgtgcatgccagcctaagtggacaacaaggcttgacgatcccgggtcctatgtcacgacaacgaaatctattaaacaacttatccatattccaaacaaaccctaactccataaccggacaaactctaacactccactggttcaaaacaactcaaacatcattaaaataccccattctaagttctgggaaacaccccaaacaaaatcgatttcgaagcctaaaactaggttttcccctgctgacaaaactggttaattggtttcactgtgcctgtgaaaccgatttatcggttacccctggtgcagaaacgggaaaccttggtttttgctccaaaactgaaccaaatctcctccaattctaataaaaccttccagaacagtctcataccataaaaacaatgtgtacaatcattcaattctcaaaaattcatcactatatccaatccaccatgttagaacctaaatttaggtttttaaacttaaattttcaattcctaaccaagcagccataaaattcaaccaattaaaatctaatcaatccttaaattaaatctagaacaagttccatacttaagctaactacacagccccaaagtcactgaattccacccaatactcaatttaaactttgctaaatcaccataaaatagaaaagaagcttacctcaaggttttggacaacacttagtatgaatgtttaacaaaaatctggattgaaatttgagatgaacaactgaccttcttagtttccttctagggccgaaataggagagagagcttgataggtttcctcttaattttaactattagtcttctaatgaataaaatataataaaagaattcttttaatctatcacttagtctaatgtaatcagccctaattaagtcaaaattcataaaatgtcaacattctaacttagtaaatgactgaattgcccttccaataaaacacttacataaaaataaagcctaaggataattttgtaatttttaattaatctgccaaaccgataacttaaaattttaaactagtccggtctaattccaattcaactcatcctttaatgtcgtgacatttc

SEQ ID NO: 123028 - DNA, 883 bp, Cannabis sativa
  modified_base (857)..(857): a, c, t, g, unknown or other
taggaatcaaagatgacaaatctcaagtgttgagagatgcttatgtgtgcgtgtgaatgggagagagagagaaagctaaaaaacttagagcttgacggtttgaatgagacttaatgacttaggtttagccttagacttaggtttattagggttgagttaaggcttcttatataggagagattaaatcctaatttacaaataaaataagtagatatctacatattaaattgattttataaaaaagactaaaatgccctttaaacatggatattttttttatctactttattgggttgttagggcctaatttgtagtccaacttgtagtccacatgtaaggttgtgcaccagaatcttgccaggtccaattctaactggccaggcatctgtagggagtaggctgaccagccttgtgatgtccagaggctggccgaccttagaagaggagtcatctgaatcactagtggctgccttgcccttgcttctagatgtaggtgaggggtgagtgggcctgacaaaactctggcctccaagcatgatcagtagagtggcgtccccaatagtgcccccgcgagccaagcactggcaaagggccctttctctcttctttaaattcctggctatccgggataaaggaacatatcgtcatccatatcgagagtatgcccgccttctgagctagcctccttaatagctagggctccatctaaacaacctaatgggccctcaatcttcgtaactccataatcggggggatacatgccgtatctccaatagttggccacactaaccaacctctgtatattcctcctctctactaagagggacagaatgtggttgtaaagcccgcttagttantttggaaattagcagttatttatgtt

SEQ ID NO: 123029 - DNA, 2318 bp, Cannabis sativa
gtaaaataaattccaacagatggctcaccccatccttgtgaggcgtatagtacgaacagggtagacagatacttgaggcccttgggagtgaactaggtcggactgatgtgttaataattggctatctttctaaagtatgggagcaggggcagcattgcaccctgtttggtatgagcttccaaccaagcacaataactctctccagggtcagtagcaagttagtccgaggagggaaggaagcattctacattccccaagagaccgccctcgaaaagattagttaatttcttcatggtcatcacaaatggcagagaaatccatcgatctccctttggacttttccttctcaaaagatgagcctcactatactcctcaacgacatagtcctaaccggcctctaggacgtcacctacttcagacactggttctctttcatcattgtaaccaccgaatggcagcacccgagctaccccttcttcctcatcactttcggcatgagaaggagtagcaggtcagaccttacccttgtcatccacttcttggacttcaatgtccccaacaatatcttccttgtcagtgtcagaacaggtcagttcttccctagccagagtggctaggcgggcaatgtgcaggtcggttgatgaagatttcctaacagtctatttggtttgcgccatcattcaacatttgggcggagttttatcaaaagtgtgtctggcgatggtcacaacaaaattactaaaaggttttcccacaacagtagggcttggatggccctcgggcaaagtgttgaccacgtttggatggaccatatacgtgcaattagcagaaaggtaacatctccaacctttcttaagtttccaaatgaagcggttgtatccctcacctcgaatgtggtcgagatagaagtgatgttgcaccttgggctcaaggaaggtgtgtgttcgctacttacttcccattattcgaagctagaatttaaaagatcgtcactggacgaggatgggctagcacggagacgagggtgatcctcgtataagagttggagtaaatcctggtcgatatgatgcttgcctcccaaaaactcactagggttcatctacaaaaggtaaaggacaagaaagtgagagttggtcagaatgatgaatgaaaaatagattgtatataccaaccatgttcgattgagaaatcaaaagcaaaggtttcacccaaaaatagaattttcaatcccagaagttcgaaactttgaattggaatctgattttcactaaaatcttatggatgagtggaaatgaacattgcaaggttaaatttgaagtctagacagataatcagatattatagttaaacataaatgagaattccatgtcctaagcctaggtattctatggttaacctagaatagttcaagagcaggcgagattcctaacaaaaaattcagatatcatatttcatcgcaaatatgtaaaagaaaaaaatgaagaacttactgatttgaagccttcttgctctactcggatgatatagtcgaaggttttcctatgaatttctcgaagaatttgggaagaaagttggctagaaaacctttgctctagtctttaagagttaaagtggttaaaaggattactaggaatccttagtcctatttataagtagtctgaaagaggaattgatcgtttcaaaattcaaatttttcaaatttcccccaaaaagtatacgttacgcactcattgcagggagtgtaatcgtcaaccacgctcaagtatcaagccttgatttgaggcacatccgtcaattagcattaatggatagatattgaagagacccctacttagagtcacatcagatcatcatccgccatcaaggacacgcgtcacccatccgaataaaactccaggctgagtaaaatccatgtgcgaccaggaaggtcctgcgcagatttgggggaaaaatgctatcttgttttttacaacttaacattgcaataagaatagatgacacatgtcccatatttctgatacctgggcgaaggaaagtattcctagcagctcaattatggttggtcaacatctgtaatgctcggactcccgagcagggtggtcaagaagttgttcgaccaagatgcgtatatgtttatgccgagcaaatacatgtgcgaccaggaaggtccttctctcaagttaatacaaatacatggggagtaaggtattaccatacttacagggccgaactgttagggataattttaccaggatttagatttactaccatgtatattatttaacatcctaaatatgaatttctaaaataatggaatt

SEQ ID NO: 123030 - DNA, 1195 bp, Cannabis sativa
tttgaatatgcagtagaacattttcaatgtaaattcattggtacattatgattggcagagaattgtaaataaatacaattgttttaagttctcaatactttctctgacctagccaacatccttgtcctatgcagagacatatttatggtttccaagaaaagaacattcaaatatttgcagacaacagttgtttagcagtaaattctttttatgtaaaatcttggttggagttgctgtcgcgaacacctcgagtggctcctttcctcccaaagaatgatccgtttatcttggcgttgaaaaaggtttactgtcttttcatatggtttatgcgttatattcttgtgttctgttcatttagtttatgttgttgcaatggacaatgtagaatcaattctgtataatattttcaattattaacaaggttttaatacttagctgatccaaacaaacaaaaatgaaaagattatacaccttgatttctaagcactaaatctaatatacacatatatgcacacacgatagagggtgaacttaaatgtggaaccaagtaattttttccatatatttctaaagttttgaattgatgtttttaaatactattatttagttttgtatattatcacacagtagcagttatttgcaattctatgtaatttcgttctatctatctttgttcggcttctgttttcagtgggtgttttcacacactgttttcttgtattttattcaccttaatagaagactggagtttcattttagaaaatgaaaacttttttgcacattacaaatgaattttttttatatataattatatttatatcataaagtaaatattcaaataataattagaagattttcttctctgtttgtcttgttattattttctttttgatctagaaaattatactctcttgtggtcttatcaagtaaccaaactaggttttcttatagctcttctctgatacatttcatcttttagattctttttacttatagttttttagttattttaatttaaacaagacatgttttagccttttagggtattgtatatagaataacctacaagttacttgatgttggcttaatggttatgtaaagaccgcttagtttaatttggaacttagcatttaattatggaaaattatttatagttatttaaataattatgtatgctgttattattgaattctga

SEQ ID NO: 123031 - DNA, 1393 bp, Cannabis sativa
attattatcaaactcaaggtactaatttaccgagtctaacttaattatgccttgagcgcattattctttattacaatatatttagcatggcatggtatttacacattaataattactagggtgataaccctaggccattaaaccgctcactttagggtaataaccctaatctcggctttgtaatttatcataaatataatattcaatataagcgacaccgcacatatctctacatgcaactactgtcttacctgatgtcccagaaacgtggagagtccaaatctccgggtgctcctgaccaagtgtcggtaatcctagtcacaatttctgggattcacaagtatagggttaatccctaaatccactttcacataatataaaatggcattcaaattatagataaacatatagagctcagaacgagctctccaacaatataaaaagaatgtccaaaacggagtctcgagtcaaaagttatggccaaaacaaaatttagctttttccccgatacagtccaaccagaattccggttggaacagccctaaaccaaccgaaattccggttttctgggcagaaaaacacgaaaaaatcttaacttttaagcccccataacctactcaaatcatccccaatcaccaccaaactttccagagcatcatcatgtaacatattaaacatattctacagctcaaacacaataattggtccaagaattaaaaagtgccattaaagctccaagcttgagttcaatgaactaaagcttgctctgcacagccaaaatcagaacttacaatcaaattttaaactcaatgttaccctaaaaacgcctttgaatttaccaaatacaaattccacaattcaacaacacaaacatgccatgaacatcaagattaagcccaagtttcttcacacatgcaaagatgagaaaaatcacaaataaagcatgtttctaaacatagttttagtagcataaaattcaaaataagatggtagagaagactaactcaaatacctccaataatccaagcgccaacaccacgaaattcaagcttgaatcaagaccaatttctcaaaaattccacaaaataaagagatgaatatagagaaagagagagtcggttcttgagatagaaaaccaaaataatgcttctaatttcagtcaaaaattcaatttgttgtaaataaaattaaagggtcaaaaagaccaaaatgcccctaaggccttaatgtaacacatacacaatttcaagggtagataagtcattatcacatcacacatttctcaaataaatttcaggttatcccaatatcaataatatgccaatataaaatctcaaaaatatgtttcggccccgaacccggttcggcccaaaatacctgattgtgactatac

SEQ ID NO: 123032 - DNA, 2530 bp, Cannabis sativa
agagagagagagagagaccaaaatgcccctagggccaaaataaagcataagcatcaagtaagggtaaaaatgtcattctcacataacatcattaaattaatttttagaataatcacatattaataaaataccaataaataatcctaaaattgtatttcggccccgaactcggttttgtccgaaataccatattgtgactatatcgcgccaacttgtcagaacacacctgaaaaaggacaaaacaggcatactatataataatatagtccataagcacacaataatataaatttctcagttttacccttctctggtcaaaattactaaaatgcccctggctcaccaacagggtcttaacatgtcatatatcatatcaattcacatataataaattatataataatataattccataataatttacaattaactagttagggtttgctaatcaattttcttaatcttagggtattacaataatagtcgtgacatatgttgagaggatgatacccttctgacaaaatgtcaatggaaagaagtagcgttgcctcctcagcataaaggttagaggaagtagttagacaactatatatatcaactgacttatagaatgtagtaaaattgtagattagtttacttacgcgatctgtaagacattcttgcagtgttaatagcttccgaaacaacgatggatcataatcaccaattttcaaatcctgaagtcgatggttgggaatgagtccagaacaccacttctagaaagtatccaataatcgcgcatccagtggagccaagggatataatgtggacgaaggcctctatttcttcttcatcttcgtgtagtcttcaaaccaagtaaggggatttctcttcctcttgccaaactcaacccctccacgtggtgcctcgaaagccaaaatatcaccctgtgactcgctgtcacctatggacataatagttgcatcggtaggggtagctggagtattctcatagggatcatacccgtcaggaaagatgaattcatcttcacccatccagatggtgagggtgatgcagctgctgatggctctagtgttggatctgttgttggcgtacgatgaagcatgctcaatataattttgagctgctcaataatgaggtcctaaccacccttcaactcagcatgacaagcgtaaagacccttttggttaggctcaatcttgtccaacctccccactaattctcaatactcggcaccaccaaggcctaaagatgatgtagtgggctaagggtttgaagtagtggccagataaaatgtataccaaaagcatacagtaagcatacggtaatataacaaattaattagataattatcgacataacatcgacaacatgtcgacatatcgataatatcttaaaaaacaaaaaaccaaataactgttgacaactaattgacaacatgtcgaaataccatcgataatatcttaaaaaacaaaaaaccaaataactgtcgacaacatgtcgaaataccatcgaaaataacttaaaaaacaaaaaattaatgaaatatcgacaaccaatcaacaacacatcaaaatactatcgaaaataacttaaaaaccaaaaaactaaataaatgtcgacaaccactcgacaagaagtcgacataccatagagcaaaaaaatacaatgtcaataaatagtcaacaacatgtcgacatacaatcaacaatattttcaaaagaaaaaagataaaaaaaatatcgagaacctgtcgatatcatatcgataatatgtagaaaacccacaataaattataaaacaatgactgaaaacctatgtaaattacaacaaaccaagtaatcacaactaatgacaaacaataatcttaaaaaaaaagttaaaaaaatggtacctgagtctctccctcgggcaaagaagcatttttgacatattccgttgctttttctacttgtcttctgaaattagctgggtcttgggtttcctcctcagcctgtgtcgcatctacaccaacctcaaccaggatctccacaccatcataagagatgatcctcacatattcctcctcttctgtgcgtggaagtagccccttcatcacttcaagttattgtttaagattcagaaaatataagagaaatgatttagcatttaatacatgtatttatcttgaataattactctaaataaaaaagaaattcatacccatctagaaaataatgcactgcgctccttcttccctatctcacccttgctcgtctagctaagcatcctcgaacaccgaatcccatgattcgtgccatacctcttccaaccctccaaaatggcctcgtacgcccaatattgtattccatgtgcggagccataggctgtgtatttgcactcatgctgtgttgggaatattttacaaggatctagatttaccaataagtatgttgattaacatcctaaatatgaatatctttaaaacaatgaaattacacacataagactttagaaaatcttacattggttgtagtggaatataatgact

SEQ ID NO: 123033 - DNA, 1018 bp, Cannabis sativa
  modified_base (945)..(945): a, c, t, g, unknown or other
agggcacaaaacccaacattaaatacgttataacacatattattcggggacgtctcgctgggaacataacaacaataaccatgttagggagctggaacttttcccatgtcttttcccagttgataatgtaaacctcgtcgtttctgtgcttgaagacataactctccatttgacaatcgtagttcttggtgaaaaggtgaacttcaacagtcaacatcatttgaatgtcaacttctatcagagagagctgacttgacggagctgtgaatctcattaaaagatgtctggagttgattagtgaaggtaccatgagcgcgccttcctatagcgagatcgatgccttgctattagttgtttggatttattgtctgtcacacttagttttttaaatatgtattatatgctaagcgccttaacattcatcatgtctcgtctgtgtctcttcatgcgtagagaggttgatgcctcactttgcacatctggtgtcgtatggtttctcgttaatgcacgaggcaacagtttgtatatctttatctcgcgtaagaccttacagtcagcatgttgtaaatatactctatcacttccgcatttaatgagttattcctggtctacccaaaatttggcttaaggacaagtgtcaatgaaaagggaatgtgaatcttatcttttatggaataactcattaactgcgtgagtatcagagtatatttgtaacctactgattataaggccttaggtgaggaatcaatgtacgaactagtacttagtgtattaccgagacaccatatgtcgctaaaggagaatagcgagccaccagagaagagtaacacttaccttagcttacagtaagcaaactaagtataaaagtcggatcggctcgaaggacaagaatgcgagatgactatctcggtacgaggaaactttgttggaaatattttacaaggntctagatttactaccatgtatgattcattaacatcctaatatgaattctaaataatgaaataaacacatataa

SEQ ID NO: 123034 - DNA, 799 bp, Cannabis sativa
tcgtgtgcttcagttggaggatagttggaggattggaagattgttcctccgaagtgcgtccgaagtgcgttctattgttttgaacgaatttattaagtacatttttattcaaaaaaaaaattatgaatgttattgataatttttttgtgttaatattttagtcacaaaaaaaattacatgtcattaaaatgttgtacttaaatataagttgttaatttaattttagttacaggaagtactgtggctaaaaatacatttaatggcaaattcaatttatgattttagtaactaatatttttagctataggctttttaataataagataagaatgattatttatgtttactgacaatttttttagtcaaaaatttcattatgattaaaagtaaaatatgtaatattgtttgtatctacatagcaaggaaaagggatgacaagttattcaaacgaaaaaaaaatgacaatgatcttattaactctaactaaatataataataactttatctatcctttcaaaatagtaatatataattttatgaaaactaaagcatatgtagtagtagggctggcacaagtattatgagagtcttgtgcaaattttaagattgggtccttttaaaaaaaatcgtgtacattaagattgcaattccatcaactaatttttttttttttaagattggctcttaaacatttaattataaattttctatttatgtatgtataatagggaagaaatggggtgagatgcaaaatagtcctaaatttgaaaactacgttaataaatgtcccttttataaa

SEQ ID NO: 123035 - DNA, 1351 bp, Cannabis sativa
aagctgtgaactggaaagataagttggatttgcactagctgattcaacaactctaatatagtacgttataatttcctatcttctacttagttttcttcacaacctctctcttttgtgtttactataaatatcccctctctcaacctatttttccttttatgcattcctaaagcctcataaaagaagaaaaactctcaccctttgagttttacaaattttctccctttatgctcttaaagcttcatcacttgtgcttcaggaggtttcatcgagcaagtcaagatttcaacttgaaccgtgagtaagtccattttccatcactaatgaagttttcttttaagttttgatctttatgattttgtatttttttgtttgatgggataatcatgggagggtatcatctttgtttatgttgaacaaaaatcttaagtagtgaacgatttagagtagtttagttatatgttaggagttatattgaccatgagcgtttggttttacacatccaaatccttttgcctcgccctgttgtagtttttctgaattctgagtttcttgcgataccctaataatatttcgttccctagaaatattttaaggaaaatgcaaaatcttcttgttggatctttactcttttctggttggcacgttgaaggtgttttatatgaaaaacctttcaatatagttcagtgtttcacctctttttcctttccttctgaagatgaacataattgacttctgggaaggtgaacactagattgacgacgacctactctaactcttaactgagcatactctgaccctctatgtagatagttcgtcatcgtcctcgagcaaattgtccattttttctatgaccattgaggaggagctatctagcgattcatcgaattctaactataaacacccccattactctgttcaaattagcgcatactctgggcaagtagtgattctcaagccaattcttcgagcacttattctaacttggaagtcagcagtggttctttcgccagttcttcgagtaattattctgactaggcaagtagtgattcgacgatcactttatttgggaaatgaactagtgttggaggaaatttcctccaacttcttagacatatattgttcagccagttgctagagggacatatatcatcctttgtgaaaagaccctctcatgatgaggttaccgtcattattgcacagtatatcggtcaggatccaaacctagacaggacaaagcaaacatatatactgtacatccccttcaattggccccacattgctgaactgatggcaaggggaggggctacacaggccaaccaagctgagaggtttgtgttaggaatatttt

SEQ ID NO: 123036 - DNA, 1168 bp, Cannabis sativa
aaaaaaaaaaaaaaaatcaaaagtcggccagaaagcattttcttaaattgggcatgtgatatataaatgagaatataagactcagatttattacactagcttgcttttccaagtttaagataatgttagaaattttgataataaatagtaataagttattatataataatgatattattatgactttcatgcatgcggcatatatgcaatttataaaatgtctccatcacaataattattttctggatttagtattaagtattccacaccaaacccaaccattgttgctttctgctttttttaaagataacaaaaagattattaatccattaataataggtcacaaagtctaattacaattgaaggtaatgctccaacagcaaaatcaacccaatttatacttaccaaccaaacctaatagataacttatactaatttcatcaatttcaattttcaagtcaaaagtagtttattatgtattactaaaattaatataggattcagtatatacattcaccatatagtttcttgaaaattattttgtaggatgcttttggtaggagaggcatcttcgttttcatcataaataacgtgtgtatatatatagtaataacatggaatatatgaaaggatatgttatttttttttgtattttaaattatttgtattttttaaaatttttagataaaagatgtgtaattacaacacacatagctataaaaaacattgagaaaaaaaactacgatatgcattttcagaagtaaatattgagaaacatgttaaaatagaattaaccctacgtagcgatctatcagtatatattagaagtattttcttaacaaattttgtaattaacaagcatatatacaataatttttttcatttaaatattggttaataaaaaaatattagttaataattatttttgaactttgaataatttcaatttttctttcctgaatgtatttgttaagaattaattaagtggttgacaaagtagaatgaggctggtgtgtaataaaaataaaatgcaatgtgatctcatctaaaaatgaaaaataattcatacatcttaaatcgtatagtatatcgtattacattgtatagtattatattaaattatattttatgcaatatttttatgtaaaattatatatggtattaattt

SEQ ID NO: 123037 - DNA, 2997 bp, Cannabis sativa
tttatgaaaactctttggatttctcaactaaggtagtaaggaccacaacacaaaacacaacacacccattgaatgctttacacataattttatacttttcaaaagcatgttttgaaaagtacacaaaccaggcttcatgagtggatatatttataacacatatcccttatttaattatctattcattttattattattattattatatatatttatccaatccaaaaaaaataaacatttattaaaatatttaaatcccaaaaataaaatccaaaacctaaatccactatatgtatttttcttttaatatttataactaagatttttgcatgaattttgacttatattaaaatatattttaaatattttaaaatatttagttgtttaatttttaagactctttggtattttaaaacattcgtaacagctttgtgcctattaatgcaattttttttttagataaaatgctattatattaaatgaattataatacaatagtcattagaagagatagaaattcctctattcataaacattctgtgtccaccgaaaaagtatcctttgctaaagtatgagcaacattattagtagatctataaatatgagagatttgaactctaaaaaataattactattttaaaaatataatttaatacataaataattactacgttaattataaaaatttttaaattttacaatctaaaccgttcaagaatttaattacctaaaataaattaaaattataatttaatacatatcaaaatttcagaaacaaatattctaagattatcttcaatccaacactataatattttatataatccaacactataatattttatataatgtgaattttctcattttacactacaaaaaacagtgtcccactgatgataataataataataacaataggaaagataaataatggaatattttttttaattgttaacttttaataattatataatgcttttaagaaaaaaaaaaaacaaataattaaaagcattaaattactcttattttattaataaaataatataataataaaaaaatatatattttttaaattaatttttaatattgtgattagaatcacaataaaataatttagtactgaaataatagcttcttagtattgatttaatataaatttaaattttattattagagatggcctaattacccaaaattaaaagcattcaaaaacaaaaaaaatatcattgttaaaaaaaaatttatttatacatatatatttaattaatcaacaaaaaagagaataatgaatcaaacaaaacaaaatccaatttctttttttcttttttttatgtttccaaaaaaagcaaaaattaaatttaaaaaaaaaaaagaaagaaagtgagacacagcatatgttatcctgcaccgccactacagcagatcccagtaagagaagccggaaatctaccacaaacaaacccagtcgccgccgtagacgacgacggagaagacgaagaaatctccatctccgtctgagccggcggaagaacccttccatcagcaaacaacaaccttccatttctcctccgatcatcatcatcatcattaaccacaacaacaccttcaagctcagccgtcgcaccgtaaaaagctccgtcgccaaatctcctttcattctccaaaaaatctcccaacgaagccgtgggtttcgcatcgttctcatctctgcaaagactccaccaccgccttcgtctctccgcaaccgatgatgatgacgtggcattggatttgttagaccttcttcgagatccactcattgttcttgctccgttaatggcggaagttgataaaggagtttcgcggtggcgttgggagggagctcggaatgtaatggctggaaaactgactcccattagggttccgagagttgtgcttcgatcgtggaagaacgaacctgtagactgtaaaatcagaaataaaaaaatcagaaaagattcgtaattgtttgaagagtttttttctatttgatttggttagttacctctgtgtcgagatcggaggaggagatggaggaattggttggggaagaaggtggtgggagtaaatcgttattggctggatctaacattttcttttgtgttgtttggatggatggaaaatggagggtttagagagaaagagaaagaaaatgaaaaaggaaaaaggaaaaggtttgtgtgatgggttttagaagtttggatatgatgagttagtttcttctttacttttaagttatttttttctttttatgtagaagaaaagtgagagaggactagtaggtgtactaatgatattttcgggtgtcgggaacagtggcggatccaaaatttaaagtggaagaacataaggaaatgattcattcacttctaacttatatgtaatctaagccactaaggctagcttagtggtgagagagggatgggaaaaaagcagaggtcacgaattgtaaaataccattacgctatactcaaaaaaaaaaaaaaactcgtaatctaacttaactaatattatgtttataaatattattttttaattataaatatatttcgtaactaattaaaattacatatatttttttttcaagggaggcgactgttctacctcacctttatgcaaggccggctataatggagtgcaaagtgggctactgcacagggcccaaaaaaaagtaaagggcccaatatattttttctttaatgtccaatagttttttttaatgaacctaacttttgaaagagctaacaatttttcattagtcacttctatcccaatgtccaaagcccattttcaattctattaatgcttttaagtaaaaaaaaatctattactgttatttattatttttttcaaattttttatattctttttttcttatatgttttttttgttttattggaatcaataataatttttataaatagttggagttttttagtattttgtaaaatatataactgaatgataatatttaaaaat

SEQ ID NO: 123038 - DNA, 2593 bp, Cannabis sativa
gtttgtgcagttctttgaggtcttgttcactaatatgtccaagtctgtgatgccataactttatgtccaattctagccctttcaccatacttgcctcttcagctaggacaatttctccttggagaacatataaaccattgatcttttcacatttcatcactaccaaagaacttttggtgatccttaagcttctgtgaatggatttgtatctgtatccttcatcttcaagcgcacccagggatatgagatttcatctaagctctaggatgtgccttacatttgtcagcaccttgatttcagcatcataccgtttgatggcaaccttcgttgttccaatgaccatgcatgaatgaccattacccattagaactttacctccatcagctgatttatagtcataaaataactctcaaatcaagcacatgtgataagtgcatctggagtcaagaattcactccctattcatagaagactccgagatggagaataactctcaattcgtggagcaatcatcattatcttttgtaattgtagcagagtccttcatgtggtgatgatgtcggttgtccttcctatctccattgtgagatttattgaacccttgttgctccttgtacttcttgcaaaatctttgcaagtgtccagaccttccacaaaagtaacacttccttgtttccttctctctagacttcgattttgattgagagtgatggtgtttactattcaaacttactttcttaggcaatcctcctcttgccaagtacacttcttctttcttggattcattctccaattatagtttgaaatctttcgacttaagtacggcaagaacatcctgcaatgcaatcacgtctctgccatacttaatggatgccttgacttcttgatatgtgattgggagcgatctcgacaaaatgatggccaaacttttgtcatcaaccgtatgatttatgttagccaaacctagaataatttcattaaatctatcaatattatcatttaaagaaagggaggaaatcattctaaaatagtataacctttctagcaaattaatcctgctagcaattgatggctttaagaataattcttccaatttattccaaactcctgttaccgtcttctctgtgatgagtttctttcgaacattgtttgacagatacaagatgattgtgtagtacgccatctcctccatttctgctttttttctctggtttcttttttgccaataacttctcatctccaagaatcttggagactttctagtacactaggattcctttcagacttttttccatagcgcaaagcccccagttccatcaaatttctccaatttaaatctcgccattgacgacattcaaagttttcttcaagaattgcagcaaaaaaaactttgagtctgcgttcttgatcgattaccaagctctgatttgtaaaaaaattacgactagcagtgcagaatcaaatcaacgaaaaacaatcaaataattagcaacgacaagatttaacaaatgcaaacaataatcggagaaaatatggatgaacaaggtatggaaaaccagaaacaataaggaaaaaaaataaagaaattaacaccaagatatatactggtttaagtccgatagatcgatgtgatctatggctctattccatttctgaaacactagtaaatcttctttattgattgagcaagaacaggtacaatacaatcaagaaggattctctgttgagttctctcaaagtgtttctactctcacactcttacccaagaatcttctttatctatagaagattcttcttacaaaacctaaatacaatctctcttttttctctgtacccctctctctacctctcaatcttttctctctttaactctcaatctcaatctgaaccatctgaagttcatccttttttaaatgcttaagtgcggatggtatttatagacttaggatcaagattctaaagttggtggctgcaagaattgacgtttttaagttagttaggaaataactaatttaaccaactctccttagagtgagatctccatgttagcataagtcttagtgcattgaggaacataaatgagcttccggaatcatggaccaaaaacactcgttgaaggagcttccggataggatagagccagctggagtcgactatccagaacttccttcccatgaggaataactagccaactagaactccatccttgagagaggctagctattactgaagacccttcttggaaggacaagggagccttcaggactagcttccgtgagtgagtgactttacaggaatgacactctaacttatgtcttatggaaatctttttatttggagaaattatactacaaaaatctttagtaatacaatttatatatgtcttaaaatatgtgctacataagatgtagtactcaattgcattcacaaacttattacaatgctgttaaatctaaaaggaaaagctccaattataaaagggaaatttgaaaaactatactttaaaaaccctaatattttatgcttaaatcaatacatttcaaaataaaaaatatatgacacttttatcaaaaactcaagaataaccctcaca

SEQ ID NO: 123039 - DNA, 929 bp, Cannabis sativa
ttcgctttgggtctaagccctcacggttttgtttttgggcacctttccaaaaggcctcatactaatgaagtaggtagaacacttatattcaagataactctattctattcttccaatgtgggacttgggttgataccctaacagaaacgaagtcttgctcctgacgccaatggaaagcttaaaatcgcgtttccatggctcaaagttgcaatctatgaggacaggtgtggccaagactaattcagggcgatcagcattgctgagatagtagggagaacgaacatctttgtaggtaagatgatcgattggagtggatcaagaatcgatcagaattgatcgagaatttagaactggattgatagcagttgattgagaattctgaactggatcgtcaattcgaacttgattttctacagaagtctgtgatggtgacggagctagattggcattgaccactggaggaggatgagcagtggtggtagcatagttagtagcttgcgttctcgccattgatgatcgagttcttgaaggtgcaagatgaagttcttgaagcttcaggatgtttacatatgataccatattagttttgtaaaacatagagaatttcttactgataagaattgaattaagtgttataatggcattgggaatatatagacaagggtagagttggttgaaatagtcaaccaactaagtaccaactgaattaaccacctaacttcctataacgaacataactacctaatcactagagtctaataattactaataagtatatgtaaaataatttttttttcttaaaaaaaattaataagaggcatagcccctaatgaaagagtggatctgtaatgaccgcttttgtaatttggattagtaaaggcaattagcactaatttatgttaattttataattatttatgagtttattt

SEQ ID NO: 123040 - DNA, 753 bp, Cannabis sativa
gcggtactcagggtttccactcttgtttaaagagccataggtattttcaaagccttggagatagtaacgagctccgataagcttattgttacatgctttttctggattaaattgttctcctttaacgcattttcctttccatgttgaagggattggattcattccagtctcttcttggaaacttttagattctggccatacacctgtctctcagaacaattgctaaaggggttagagtataatatgcaatagtaattatcagggccgatcctgagtaataatggacccaaaatttttttttagtgtggagtattattggatctctttctataaaatttatcaaaaatattatttttttcaatgtaaaaaagtaaattatataaaaaatttggaccctgagtttgagtggaccctagctaggcacgggcctaacccgccttagcctaggaccgagcctagtaactatatggtgttcacattttcatatttaaattgtttggttacaaatacctttaataatttataatgtatgagtgatattattatttgactgaaaaacacttaaaacaataagaaaagtgattacttcacaaataaaaaataataagaaaacatatttttttttttacaaatttatatttttacatattttaataaatattttacaaaaatatgaaggattgttttttcgtacgttattttcatattgctattacaaaatgcaacatgaaaacaatgttttttttttttttt

SEQ ID NO: 123041 - DNA, 1470 bp, Cannabis sativa
acatacggctcaaaaatgttatcatcggttcgatataaccttcactggacaatctccatctggccctgcaaccagtgacaacaatgctaaaaatccccaagccaatttggctgaaacacctgctacaagtgacatttcaggtgcatggttcctcgatacaggggcaactcatcatatgactacagattctcacaacctgcacaatacagttgactacaaaggcaaaggcaaagtcatagtgggtaatggttcttctatgcctattttacaaattggatctaattccatttctaccactaatcctaatcactatcttattcttgaagatgttttacatgtgcctaatgtcaccaaaaacttgttgagtatttcccaattcactaaagataacaatgttatcctagaatttaatgatgtttgttgtcttatcaaggacaagaaaacgaggcaagttcttctaaagggttctctcaatgaaggactctacaaactccaagttcagccctcaaatcagtcttcccactctgttcttgactgtcaagactccatcaaaacctgtccatctgcattgaattctaccaccagtagcaacccggttcaagataaagctaatgctctttcaacttggcattgtcgacttggtcatccatccaagcctattttagccaaagttctttctcatattagtcctactctcaaatgtaaaaatattacattttgtgatgcttgccaaataggcaaaatgcaccaatttagttttacttctgtcaaaaataaaaccactactccatttcaattagtgcacaccgatgtttggggtccttcttttcatacttccatggatggatacaagtactatataagctttgttgatgattttagtaaatttgtttggattttccctatgaaaactaaatctgaagcaccaagcttattcaatcaaatgcctttgttgaaagacaattccaaacaaaaataaagagtatacaatctgaccttggcaaagagttttcccctcttaaacaacaatttcaaaatgctggaattgttcttagaaactcttgccctcacacacatcaacaataaggaagagtggagagaaaacataggcatgttgttaatgtaggtctcacccttttagcccaagcacacatgcctctcaccttttggtgggaagcttatgtgtctgctgcctatctcatcaataggctccctaccctggtgaacaattatcaatctccatttcaaaaattatataaagaggcaccagattataaccttatcaaaatctttggttgttcttgtttccctcttttaagactctatcaatctcacaaagtctcatttagatcgtctaagtgcttattcattggctatagcatgacacaaaaaggttataggtgtcttcaccctagtggtaggatatatgtggctagaagtgttcaatttaatgaagctgaatttccttat

SEQ ID NO: 123042 - DNA, 838 bp, Cannabis sativa
gtgggacaaggaagagttatgtgtttaatttttatgtgtgtagtaagagaggggacaaggtagtaagttagtagtaaaaaacttgatttgacttacttaaacttggttacaatttagaagcttgatgtggtatttatagttggttacccctacatttaattttttctagattattctagttctacatgatttgacttacttaagtttgattattggcatacccatccaaactactctcaagccttaaagccattgtatttagttgctcttatggccacagtatatgaattttggagagcgacaaatattattttttctgatcataaagtcattagaagagatatcattattaaaaatatagtgtatagtttaaaaaggattagtcaattcatttcttccaaaattaaaactatagatattgcttggttagtcaattcattcatatatatgcatactaatatgtaatttgttggatttataagtggtgagttatactatttttttttctttttaaattgaggtttaattatattgaaactaatatagtgattttttttcaattctttctttttttttttgaaattaaagttttattaacaacaattagagtttaatacattaatgaaaaaagaaggaaaattctcaccaattcaccatccaccttaagtgcatgcacagttaattcatgagcaaccttattggctgttcgtctcaggaaaattggaaatatgtatgtctagctaatggtaataaataaagcattgtaataattaatatgttaattctatttttggcatatttaattgacaaaaatattttattattctttgtatatttc

SEQ ID NO: 123043 - DNA, 759 bp, Cannabis sativa
gtttgaagatacctgctttgccccgagtcatcatggggtgagttgaggtgatggttttggaagtagcttgcggaggaggtgaagaaatggttgctgaagtattatttggtggctgttctaatgagagaggtgaagtggctgatgagtgtagctgatgggaaggatgaggagatgaagccgaggccctggagagaggtgtatgtggtgtttctgcagaggaaatgtcaggaataacagatataggtgaaccaaaatcagtaaggggtgaaggagatacctgtgttgatgaagaggcagccgaggtaggtggttctgcagaaactgcagaagaaattactggtgcagcagtaggcaaattaatctacgagtgaggcatggacaaagcaacttgttgctcaggagaatgattattcaagaaacctgatttaaagggaaattccttttcattaaatactacatgtcgagaaatgtatatgcgaccatgaggactaagacatttgtaacccttatgggcctcactatatcccaagttcacacacttaatggagtgaaattggaatttatggttttggtatggatgaaggcaagggaaacatggcactccaaaggttttgaggaagtgataatcgggatcctttgaatagagagtggcaaagggtgatgtattgtttaggacagcagtaggaagtctattgatgagatacactgctgtactaaacggatcagaccaatatttgagaggcatggctgcctgagcaa

SEQ ID NO: 123044 - DNA, 1105 bp, Cannabis sativa
  modified_base (35)..(45): a, c, t, g, unknown or other
attttattttttatataaataaaaagtcacccatnnnnnnnnnnnaaactaagaattctgttatatagacacactttatataaaatagatatattcacgaattttttttatttaatttttaataattgacaaagtttgagaaatgcgaaatatatattattgtattcatttaaaaaaaaaataggcaacactaaggttattagaaaataaataatattaattttaagataaataattgtgaaatatatataacctttgagtttaatgttcactctagtcccacactactaaaaagtaattatatatttttatataaacatctgttaattattttatgtaactaataatattatatatatttaaataaaattaaaaccaaaaactctatgaaaaatacattttatataaaatatttgacaaagattaaaaaataccaaaatatattttacatgattaagttcatcaatcacccatataaaaaataaataatactaattttgggacaaaactgaagtgaaaaaatagtgatatatatataacttagaagtatatcactcatataggtttctaaaccatgtagaattttttcaaaataactctaataatactaaaagaataaaaaataaataagaaaatgtataaaagatgaagaaaaaaaatacaatgaaaattttgtagcatgccacttcaattttgtttgtgatatcttttatatatattgatgatatagatatagattggtaaaaaaaaattaatatttttatcatgatttagaaatgtaaaaatatatattacattcataaaaaatatactataagaaagattaatttcttaaaacttactaatcaatcaaatcattgatatatataattaaaaatataaaagaaaattaagatgaaaaaaaatatcatgtgtgatgtcacttcttttttataattctaaaagatattataattaattgagcaagactaaacttttagttgtccataaaaaataatacaatactaattttaagacaaactgaaatggaacaaaaatgaattacagtagaatctctattcaagaatactctattcaaaaataatttctaatttgttataaaaaa

SEQ ID NO: 123045 - DNA, 1292 bp, Cannabis sativa
ggggaaaaaagatggatgatttctgaaaatttaccaattgtcttggtattttctgatacttggcaagggcctctttgatagtattgcaagcttggatatttgaacaacaaaacaggatgttgtcgtcaacaaagagaatatgagaaatttttggggtagttcgagcaatcttcataacaaaagcatcttcagtgagttcagaatgctttaaaatagaagagagaccctctaagcagagaaggaaaagataaggtgagagagggtctccttgtctaagccccctacaaggaaccacatgtccaaggaaatgaccatttatgttgaacgtgaaagtagcagtggtcagacatttcatgattaaagaggaaaacttaggagggaagccacatttttgcatgaacttgctcagaaaagtccattccactctatcaaaggctttgtccatatcaagctttacagccatccaactaatcctgcctttctttctacttttgatggagtgtaagatctcttaggccataaggatgttgtccaagatgagatgcccttttaggaaagcgctttgggtaggacagatgagagagataagaaccaacttgagtctattagtcaagaccttagagatgattttataaatagtagcgcacaagcttatgggtctatagtccttaagggtgagaggatttttaattttgggaatgagagagacaagagtggtattgaaatgggagatatcggaaagattgttgaggaaatttagaatcgcttcagtaacttcccgtccaaccacactcctgtttttttggtaaaattgattgttaaaaccatcaataccctgggacttgtctgaggccatttgaaacagggcttttttgacctcaggaggagagaaagcttcattcaaaaattgatagtgggaagaatcaaggctggtgaaagagccagagagggcagtgtcgatattagtatcttgagggcattgagaggtaaaaagatcagagtagtaggattcaatgagggagagaatcgaagtagtgtcctcaaaagcaactccatcctcattggtaagggagttaataggattggccctttttctatcacaggcaaacttgtggaaaaaacgagtgtttttgtctctagaatggagccattgtatacgtgatctctatttcaagtatgtctcttctttgaataagagagtgtcaagatttgtttgtaataattttcgacgaagcaacgcctcaggggaattgtcctcagagtttctggcttgttcaaggtatttctgggat

SEQ ID NO: 123046 - DNA, 1039 bp, Cannabis sativa
  modified_base (782)..(784): a, c, t, g, unknown or other
ggtaaaatgggaaattcatgtaattaatggactaaatttgtacaaattaaggaagggtataaattttgatatggcttgtattattagggtcaaaaattgaaatttccctaacttaattctactttataaaagtgttacttttcttatttcttttccaaagttatttagtgatgtggttagctgtgaatgacctttcgtttctataatatatagtttgctaataagtacgatcaattgcccgtgcttctcaattattacaatactaaagctgcttgtgatcttacttatataagaaaaaatagtaatgattaaattagttattttgtttattttagaaagaaaaaaaaggataattatattaaatttattaaatataattaaagaaaagtgttacgaaatcttataattttattaaatttttatgcataaatattattttgaaatttgtgttttgtaaaagttgttaactggatattctattttgttaaatgattaaatagaccttatataaccacttgaggctagctcaagtggtcataggagggtgcgtgtgtgttggaggttctgggttcgagtcccagattatacaatgtaatatataaacgcttaaataaataaaaaaaatagactctatattttctaaaattgtacaaataggactctaaactgattttttatcaaactaaaacttaataataatctaatttagagatgttatgacaaaactgtttacatttttttatatatgttcgtgttaaaaattgtcttaaagttggttatannnaaaaataaaattattaaaaattgaactcaggatcctatttttactgctttagaaaatataaggtctattttgtatggtataagatttttgttgtgtatagtatcattcatttaaaatgatatttagtttccatttggttatatataatgattatacagtatataaatttgttagtatgtatacatattttaatagtgatatatataaatattggaattattacataaaaaatataaattgacattttatttacaa

SEQ ID NO: 123047 - DNA, 978 bp, Cannabis sativa
acagtacgtttaaaaatcacttaacacccctatgctagttagggtgttacacaatgtatctaccctttgcgtttaatatctacccaaaacaaagttctagttgtaagtcctgatgttaggaccaccatttttatgtcatcagtgaccttggttttagcagccacatccatcatccttttgataaacttctttaaggtttctcgttattattgattaacgctagtcaaggagctggcttccaaatcatagtccttggctactataaactactttctaaacattacttataggtctctccaattgtggatcgatcccagagacaacctcttaaaccagtcctccacgaacttgcttagcgttaatgaaaaacataaaaaatttgcataatcactagctttggcgacttgcatgatgtgattgtatttggacaaatggtccctggggtctgtgcatccttcatctagctccatctgttgcgttctaaaacgctccgccagtggggcatcaatgattctcttcacataaggctctatatcttcttcctcgaaattggatacgacaccactttgttttctagaaaatttttcctttattttcatcaactccttaaccttacattccaagtgttgagtcttatcacttgaagattctcttctgcgaacacaatcattgatgtggtttcttaaattgttactgcagggtcttgcttttttctgctttagctctttccttcttagcatttagtcgtatttggagatcattcgttgaaaggcttctgccactatcgtctgacaccaaatgtacttcatcaacatcctcattgttgttactagagtcactaggaagaggcttttccctttgagactctagcattagtcttattcttctgtatgactctgcctctaaaattggtcttgccattgtgccttgaggtgttggaaattattttaccaggctcttagatctactcacaagtat

SEQ ID NO: 123048 - DNA, 969 bp, Cannabis sativa
gtaattatttaccaaaatcagaagttagcatatttcttaaccatttatacagatcataaaacatattcaatctgcttagaaatatgtgtgaaatactatccatgattttgtataaatttattgtaaaatatgaataaaaccttaaataattaaccaaaaatagcaaaacatctcaacatagtctcaaattaattccagacactataattataccttaaaattatattgaaggttccccaaacagtaaacacaatttttacgatttattctatttaaaatctaattaaatagttaattagtcataaataattataataaatacttacagcagccaataaaaaaataaaaacatttttgtttcgtatcatagatagtaaacagtattacaaaaatatactttactgttttagcatcacttaactatttttcataattattttaagtattaaataaataaattcatgaaaaatacaaaaaatgatcgaaaaccaaatctaacaattctaacacagcttatagtatgtactaagccctaaataattaactttcaattttctgaatagtctaggtatttttcttttttaaatttagaaataatacaaatagtttttgaaaaatacaaaatcaaccaaaaataaaatctattaattttgtaacattttataatcaataaccaataataaaaaataaaattgtattttttttgaggaacctaattattttttataattaaattaagaaataaaacaataattcatgaaaaagacaaaattaacttaaattaaaatgtactaattttccaacagtttgtatctcataactaatcatataaaataaatttagatttttctgagtaatgtaagtttatttcctaattaatttaataaataaactaaataattgataataaatcaaataattgcaagaaaattctcaacttcatagtagacctaaaaatacctaaaacaa

SEQ ID NO: 123049 - DNA, 739 bp, Cannabis sativa
  modified_base (202)..(206): a, c, t, g, unknown or other
atatactaccttttagttatttcaaatatatatatatatatattacgtttcaatttttttttaatatattattgcacataaaaagatatactattttgtaaaataactataccaaacacttaattattcaaggttataattgtagtttcattatcaaacttttaagagattggacattttgttaattttttttaaaaagggnnnnntattaacttaattgttagatttagagccatttttcatcttggccctttttttttatgctgcttagaaaaaaaaagtttttccaaaaatacttattttttttaaacttttatttacaattttatagaattttttatttaaaaaaatatgacttttttagcaaaatgtaaaaaaataactaaaaattaacaaaattcaatctcataacaattataagttaactataaaatagccccaaaaaggaaaaaactaactccatgacaactataaataaacaaaaagaatataacagtttaccgcatttttgtaaatgataggaggagagttagcagtagaccaactaaacaaaccaaattatccactcttcaattaaaatttcataaccttttttgtttgcttagaaaaatcttgaatccacaatattaaaagcaaaaacctagctgttataaaatacgaataattatataaggcactatttttttgtaaaatatttacatttttacgttcagagaatatattttttttttttacattt

SEQ ID NO: 123050 - DNA, 1971 bp, Cannabis sativa
  modified_base (1712)..(1719): a, c, t, g, unknown or other
ttctaaagaacctgaaaacatagaaaacaagcgtaattccgtcccaacacagcgaaaaacgcacataaattagatccaaaacataggctaaaaatagcctaacaatatggtgatagtgactcgcacttccgacacattctatggggtttaaaattatcttctaagattcagaatctgatgtggtgtgcctgtacagatcttccaactatggtttagctacgaaccaaacatgttgatgttagtcctatgtgtcccctctgccatgacgaagaagaatcaatcctacacgctcttgttacctgtcgtgtgattaaaaactactggaatagggccggaataagcacggtagtacgagttgggcaatcgttcttcgactggtgtgtggtggttttcacaaagcttccactgatctaatgtgcataattgctgcaacttgttgggccatatggggtgcaaaaaatgacttagtttggaaggggaacgaggtaaaggaagataacattattgtgtttgctaatcgttaccttgaacaatggagaagtgctcaaagttccgaggtggaatcatcatggcctttcttacgggctgaagatgtacccaagcattggactgtaccgtgtggtaatactatcaaggtcaatgtagatgcaacgttgtttaataatatagaaagctatggtttgggtatggttacatgtgatgcctcgggtttactaatacagggtcgaactaaactcctttctggtatggtggaactgattgtggccgaagaaattggtgttcgagaagtgcttagttggattaaagacagttgttggagcaatgtacatgtcgaaatcgactgcttgagcgtggtgcaagcaattcaaggctcgttaagtatgatttctttgtttggtctagtcattcaagattgtaagaatttgcttgctagtttgcataatgtttatatttcctttgttaagcgattagttaatgtagtggtccattgatttgctataactgctacattattccctgattattgtttcagtttggagtctgttccaactaatttactactttgtttagtagcagaagtaatcatttaataaagattaaaaaacgtattaatcatttaataagaattgggtgctgaatttgtaatttgctaggaagtttagatttatagcagtaagtagcagtaattagccgatttggtacaaaacttgtgatgtaaattgatagtttgagcaatacaagattccttattcataaaaaaaaaaaaaaatagtgtgagtaactttcattgtactttaattaattaaatgagattaagacttgagtttaatattttgatgcacaaaatatatttcatgagcattttaattggacgctagtggtatttagtattttttagcggcaaaactctgtgattggttaacaatattttttaaatattattatatcaaattatatgatatctatacttaattaaattgataacgatatgataacaaaaaatatgatagacaccacttgttagcatttctcatagggtgttcatccaattcaattcgcactatattattcatggtgcatccgatccgcaataagtgcagatttcatattttgcatccaattcaatccgcacaatagcttaaatctaattcaatccaatccgcaaaagtgcggattctatcggttattttgaattggttactttttaatannnnnnnntttaatatttatgaaaaaaatattttttttcaataaaataaaacaaattattgttattttatgtcttcaacaataaattaaaataaataaaataactaataactaattcaatcaatgaaaaaaattgtacgtgaaatatttaattttattttaaattgtgtagaaaaaaattatatataaaaatagaatgtacatttaatctattaagttttaaaatataattgtattttataagtattagacttttaaatt

SEQ ID NO: 123051 - DNA, 773 bp, Cannabis sativa
ttacttccaattacacagttacagtgtaattacatggtcagacaaacatgccaaattgtgtaattaccttcaattacacacaaatccaattacattgtggctttccaaacgcacccttaatgggaatcacaacaaaataccataaataaatttaacaagaattctaaaaataaatatcgttggagcagtcatcatcgatggaagtgtcacaaatattggaaaagttaccaaaaaaatcttcaaaaaagttatcgtcactaaagctattagagttggacgttagaatctaacacgaataaattagctatatttatcaactagttaaaaatatgacacaaaataattgatttcgtgtagcaactaaaataaaaactaatattcaaaaacgagttacctaaaataataaaataatattattcaaaaaaaaaaaaaactgaaacttaaaaccaacttagataaaaaaaaaaaataaacaataattaaatagaaaaactaattacttaaaacagcaaactaaacttcctcaaaaaaaaaaaaaaaactaactaactaaaaatttagaaataagacatataaacaataaaaatataaattgaaacataaaaactaattaattaaaaagccgacacatagaaaaactagttacgtaactcaatcaaatgaagaattaatacacaaaatctaagggaaatttacacccactactgttttttcccattttattacatttatactgttgcacggcaaatacaacatttatactgttttttttt

SEQ ID NO: 123052 - DNA, 2246 bp, Cannabis sativa
tgttgtaaaattttaccaatgttggtaatcttaattttttacaaccatcgaacaagggatcactaacccagtagttgtctaatttttcaagatcaacaaatcaagcaattccatgccaataccagtagggaattgatattattaattgccaacgacattaaatgtcgttgttgataatactttttgccggcgaactattcccaacgactttttaccaatgaaatatcctcattgatagatattactgacgaaaaatgggctttgcaccaacaaaatttgtccttattgatgcacatatttcttgtagtgaggatactcatcaacatcattaaacttaaaatcatctatccctgctttcataacgaatatgggtcactagttgaccactctccgtgccaataccaatagtgtatcttttattgaaacccagaaaaattatgtgatctttattatcgtaatattcccttttgttccgttacaacaatctacacacggacagggaattcgttcgtgattactaaggttttttagggcaaactctagaaatttattgaacccatcttgaaattacggtgtttctgtcctatcaagcatccacgatttatgcataccacaaatttaaaataaaatcctaacaattaggtttaaaataacttaaataaaaaaatttatccaaattctactaaaattttggcagcatgaagctataaatcggacgttcttgaaaaaattaaccataaaatcaaaacatatattaatgcacagcaataaaatagtaacttccacccatctgaccgcagtacatgtattcgaagaatctacttcactacgaatgaatatttaagatattcaaacttgtgtaacatgcttattaattcataattaattaagatagaaaaagtatacctctagttagatagctaaccaatcaacacttggaataaatcgtattgtccttctaatatatccatgatgcttaaccgtaaaacctacaaacaaatacaattactagaaaagtttgtagaaaaaaaattgttattagctaccaaattcatataactagttgttactagttatttgacaaatgattactagttacaaactcatctaaacatgcttatcaatttataattaattaaaagaaaataaaaaataggatatatctctagctagttagcaaaccaacaaaccttgccaaaaatcttgttctcccttagttaagatcgcttaaccacaaaatctacaaactaatgtaattattaaaaagtttaaataaacaaaattgttcctagttactaaatttatgtagctagttataactagttacaaaattaaaagtaactagttagtgtttaattatttaataaattaaatactagcattcctattcttttactgattctaactaataaaaaatacatttctctaatacattgttaactattgagaaaatttattaaatttatgtaacaaatgtcaataatgcatgaatcattcttctctttaatatattgtaactaattagaaaattgttcttgggaaataattataataatatatgaatcaatatgagagatgattaatagatgtgtttagcaaaaaaaatcaatataacacacgtgcatatagctagctaatgttttaggatgagaaataattcacaaaaataaaacaaaaagagacaattgattactttgtttgctttcagattaggtggtagtaattgggtgtttgtattgcttcaagaaacaatcatatatagcagggtgatccttttgcttgaattagcctagcttgggtttttcaacaggccatctaagccagtggtacttaaaagccttaatgctgtcaaacttgttaactttcttggttcttctggtttggttactctctctatgatgtgcttgtgttttgtgcttcagaatacatatacatatatatgcatatctatatatatatatattgtagtcatagttaactgtgctgcactatttccagaaattttatacactatttgtattgtattcgaaacagtttttcaaattttttaccgtatcagtaagatatttttagaatttttatttaaactctagttttgaagattttttttctccaaaaacttacaaaaaaaaaaaaaataaataaaaattgttgtaacatgataattataacacttgcatgaactactataccatatactagtggaatagaaagggaaatttgattttctatacttagaaaatcaa

SEQ ID NO: 123053 - DNA, 1226 bp, Cannabis sativa
ttcaacaagctttgttttttccaaaaaaaaaaaaaatctcaaaaaagtagaagagagaggcttttgttgagattaaagaatttttttttctctctatagaagctattttcactagaacccaaaagaaacgagaggacaggttcatttttttcaataataattaagaagtttaacattttgatgtgagtatttttactttttaaaaaatattgaaaaaaaaatataatttgctacataaactacatattatataatgtggatgaatggttaaaaaaatgtcgctatagtatagagacaaattaaactaatgtcactactataaaattattctatagcatatattctcatatcaatactattattgtcatcatggaagaggaggatagtagatgaaagctagctagtgatttcaaattaagaaccgtcagatgaatttttattcttttttgcagtatttctttgaaaatagagataagaactttgctctagacaaagtaaaaggacgatatcaatcagtagtggaaaggtgttagtttttttttttttctttcttttttgaagatgtaattgcaacaacccaagagaagggaaggaagagatacaattacaagctttgaaacaagagagccattaaactctctttatatgatccctatcaatgcgtagagcgtccctcgcttcattatgtgccgacgtgtttagcacataatgaaagagaacgaccattgaattagagtttttcttttacttttttaatgcaaaaaatgcagtaaagttactttttttttgtcgagaacttttgatttttaaaaatgaattaagttaaagctcatactgtttttaataatatttatttcatatttcttagattttttacttttatcaaatgtcacatttctcattgttcaaaattttgtgtattataaaaaaaattactagtaacatatttaatttagtacattcaggtacactttaattaagttgcaccttcaaaagtcattaatatctatgatcatgaaatatcttcattttatagggacaaaacaagtatgcctaccatagaaattttttatacatctatgcaagtaatcacataaatttcaaacatttaaaatagaaaaccccttatgactaattgaaatttcttagttaatacagtaaaacctctatttaagaatactctattcaagaataacctttaatttattataaaaaaattaagtccc

SEQ ID NO: 123054 - DNA, 1117 bp, Cannabis sativa
caaaccaccactgttacgttagagtagaaagcttcaaaccaccaccgcgaggaagaggacgatcgaaacggaaaggggttcgagtggccagtttcgaagaggacaataggaagggtcgagaggctgattttagagaggacaatcaagtggccggtttggagaaaggtgtctatcttcagagagcactggcccgattcgaaagggttctaaatcttataacaaaacattataaactaattatgacagacctgactaacatattgaagaaaagagaattgaatgccaatgtagaactttatacgaaacagagagaatcacttcactgattatttatcagaggggtactgatagtctcatctcaactctaagcgtttaaagaacaaaacacaggttgatttaattgctttaacactaatcagagaatataaataacattacactacagtacacaaccatataaacaaacaggaagaaagagaaatcaaaaaaaaattataaaaggggcaaaagaaatgtctctagaaatagatgaaagctacctgtgagtgaagtaattgtttatccgggtaatgaagccgagttcgacaacccaacggcctatagtcagcagcggatgcctcctctccgatctgtgaacgaggttgaaaatctttttatggtacagcgtcagtgacagaagaaaggaccgatggagagtttgttgaaattgactttgggtttaggtcttctcttctattataagggcttctgatatttgcactaactaactcaaacaatacgtaccaaatgcagatttgaagaagagagctcacaccagttacgacggagacatagatggctgtcctttctcttccgcagtctttaaccaaacccaagggtttttgctattttgttttttctttcccaagggtttttgcttggcaaatttttaattgctttccaatttgagtttttcgcaactaaccctcaattctaaaatttactcctaaattcgtgttctgttaacagtttaaaatttctatctatttttaactgttaaatgtcattgtagaatgtctatgtgtacaagtttacacgtagcacaattttattaatccacgcaaataaatatttaaaa

SEQ ID NO: 123055 - DNA, 1085 bp, Cannabis sativa
gaacttggaccccaacccaaaccccagtactcttagaccccaacccggatgtcttggaccccgactcggacctggtcctgaacggggttcgaagttagagtcgagtttatggtaaagataatataattttatataacctattaatataagttataccaaacttgtattaaataatattagtacagtacaatacaatccaacacaatacaaaaatacaatataatacgacataccaaacgaggccaaaagtgacatgttattttccaattgaataggctatagtattcaattttttattatattttaaattgtattccaatattatgtaaataaatatatatggagaaggttttaattgttacattaaatatgtaatcataataggttacatttacttttaatcgtccttggatcattattagactattatgattttaaaaatttactaaaaataattaataaattatttataacctgatactaacgtgattttattaatttccttaaaataaaaaaaataaaaaaatataaatattaatttctaaaaaaattttattaaatatgttaattaaaaatttaatttattttaaataaattattaatttaaatctaaaaataaaattttaacatgacatgttatagtaagtcataaaactgtgttaaactttattaaaagttgatacatcaactaatctaatttatattaaatatgttaacaaattttattgactttattagagatttaatttttttataaataaaaaattaattaacgtgtcaaattttgattagtttaacacagtatgagacaccaattttaataagagatcttgattcatgtatatatatttgctgaatcagcagtgaaatacattacaaacatatccaaaatggttacagtaattattgaccgaataatctgtaattttttttttttttagaacgaatcactaaaactacagaagattaattatatcactatctcgtgaatttcagttaaaatcttctgtcccaaaaagcatgtctccaccctgtctcaccaacaagtttaagccacctgttttttttcatttattaaataattt

SEQ ID NO: 123056 - DNA, 1491 bp, Cannabis sativa
gagagagagagagagagagacttcatggctaaatttcttgtgttcaaagctctctcttctcttactttatatagccaaagctttaggttttagtttctctttttgatataaaatatttattcatttgattaaataaataaatgaaaaagcaaattgcatcaaaaaatccacattgtggcccctatcacaattgtgaaagcccatttaaattttttccatttactttatatcatgatatgattaaaatatatttattttttacaaatttatttattaattcagttctacttacttttaatttaataattatgaataattattaaataaattatagtttcaatatatatatatattaattagactcgcaaagtgtcataattaataaataaaacttctctcttttagtctcaatcaaaaataatcttcttgtaaattcttaaaaattgacatagtaagtttatgaattttaattaactattccaattagttacttgagttcttcaagaagatcatattatccaatacattttggggaacatggcctatataatcaagcttgaataagttaataatcaagcttgaataagttaatctgaaatttacctttgtaaatttcctatcttcttactttctcatgactccatgttaaatgccaaaatattacatgttttatatcgtaaaaatacaaaataagattaattctttataatatttacaagaaattgttatgatatattttatgttgcaaatattttgttaggatttaatgttgtttgtgttcaaatgagaaaatagcatttgtgaaaagaaatataaaatgataaaaatgtggcccaaacaagagaaaagtggtatttttgaagaccaaattgagcccaaagaacatcaggcccaaccggcccattttcctctcccagcacattgcagccacgtggcgcccttggattcgcacgcagccactgcgtcatctcctttgtccccttcacctcccacgcgcatgtgcactccacctccccacttggtccaagtgtgtgtgtcacacaatactcttgcaagtgattctcctctctcacgtgaacatttcaacatttcaactcccaaaaatccattttgtcttctctcttctgcatgcgccaagtggcgtccttttgtcaaaattgctcacaatggcagccaatgaaatgttgccacatgtcaaagttgcacacaaaaagtaccaatccgaacttgacacgtggcagctccgaattgagttattttaattgcaaaaatacccacatgcaatttataataagtttaattgcgcattagtccgtttacccttctataaatagaagcttaggtttttagaattcagttacacttttagagtttcagacagaaaaattcagagaaaacgctcagttagtttaccgcttttcttagttaattttcttatgggtttctaagttcccttattgttaaggtggacgatgaaacctagtgtattta

SEQ ID NO: 123057 - DNA, 1879 bp, Cannabis sativa
  modified_base (1813)..(1816): a, c, t, g, unknown or other
tttttttttttttctaatttctcaaattttcttgtatattttgagtttttattattacttaaaacaaaaatttgtaaccaaaaaaactttttgtattctttgtataactcctatattatgtttatattaattctataattaattattaaaactatatttatattcatctactaaatgaaaaaaaaaaaaaaaactctttgtagtctaattcttatttctttgtctttatatagtgtcacataagttaaacattcataattttgaagtgtttattgtattttttttttcattcttcttttttatgttttattttcatattctttgataatgacatttattttgaagattttattatatttttttttcgttatttttttcctaatttcttaatgttctattttcaggttatgcattggcaagtcttttaatagatattttgcaccaaaattattgggtaatttctttcttgctttaaaagattatcactaaactctatatatatacatacatacattttatttttattttcatcatatatctctctttctacttaagtttttttttttttttctcaatttttctctttcttataaacttgattttcataagagataaccataacactctaatttagataactattaaaagtggtataacaaattatacttaatttttaaagaaaactttcaatttttcaaaatggaatcagtctaataaatcatattttagtgtttaaaattattagtaaattaattattttgttaattttgtttgcagacactttagaagctagctatggccaaatcaatttgaagatattgagaaaattagagattaatttgttttgtgtaggagttcaattaatttgatattataaattaccatctttcatgtaggaatgttcaacaaaggctatgtgacatcctaaatttcttttagcctaacttatctattttacaggaattttagatttttttaaacaaatcttataaataaaattgataatgtcttttcatttttttaattctcacatatataatactcataaataaaattgacgatgtcttttcatttttataacttttcaagttataaaaaaaatatataaaataaaaaaaatataaatagatagaaattaattttaccatcatcaaaacctcgatatcattctcatctttaagtttctcttaaccttcaacatattcaatcttaagtttttatatttttcaaagacaataagagattagaaaagaaaaaaaatataagtaattcataaacaatcattttttactaacatcaaatttaatttatatagtgtagttttttttaaaaaaataatttatatagtgtaagttataaaaataaaaaaaaataacattattaaaatgagaataatattaataatgagtaatatgtgtaagagttttttaaaatgaatgaatttttaatataattaaattggaaaatggtatataattgaagtcttacgtttgatttttacgtaattttttatattttttcttttattaaattaataatttttttattcatcgatagttttttttaaacaaatattgatgttttttatttatttttgagtcagtaaagatttatattttctttttttattatcttctcataataaaattagatatcattttttttatagagtttaaagttttttggttaatgctctcaattcatatataaatttatttatatatatatttgttgtcgaagatcatattctttttattatcaagtatcaacttgttgactggatttttagccaaccgacgcggagtcgtaatannnnagatttaaaccaaaatcacaataataaatgcaattaataacaccaaaattcgtaataaatgta

SEQ ID NO: 123058 - DNA, 1053 bp, Cannabis sativa
atgctagttagggtgttacaaattctattatcaacttatcttaataatcccatcaacattactaactaaaaccgttgtgatatttttagcctccgatcgggtcttcagggtcgccgaacttgaaaatatttcatagataacttacattatatctacatatttcaaataaataattgtaattaataaattacgcttatttattcacttatggcgaaaattataatttatagtaaattaagttagcaggatcatgggtgtatgagttctaaattatatgttttatatatgttgtatgtgttatacttttcttactaagtttgtcgactcacatttatgttccatgtgtaggtaaaggcaaaataaaaattgaacagcaataaaagacgaacttggtgaagattgtacatatccaaacggtcagactcggagggttacgatcctcgagacaatacatgcttagttttgttatgtcgtcagaaaaaacttttgtgattatgtaagttatgaatgttttaataatagattttagaatcccgaattgtaatatttagaaaagtgttttatgtttattaaagttttaattattatgaaaattttattaaaactcctttgattagcaagggttagtacagtaattaagaaatcactataacatgccctgattagtagggcgttacactattgtatcggaggcgccaagttgttctccgaaaatcagccatcatagacaagttcaactcacagttcagtaaacttgtatgtactttagtagtttaaatatgatagcatgattagaaatacatgattagaggcatgctagcagtatgatagttgaataaatgtatgcttaagtttccatgttatgcgatcattagtatacagttatgatcactacttgaacgacccgacttatgagtttgtaggctcgtctaatagaatggacagtacacccgacacaaatacaaatagattataattaaagaaaatatgtttaaaaaattttttaaattgattttttttttttgtttctaaaatttttaaaattttgattct

SEQ ID NO: 123059 - DNA, 1079 bp, Cannabis sativa
tatttaacttgaaatttaataaattaattatttaaccattataaattttttataattataaaaaccgcgcaacgcgcgggtctattgactagttataaaataattaagatgcatcataatctatgcatggatattataattaagaccagtgtgctagacaacttagggaatattccgaaaagtataacggaatagcaatacgataatgatgaggacagtacacaaatgatgagctcataatgttgacaaggcaaggtaggtgtagaaacgagaaaactagagaataaaaatctcttaacacctcctctcaaactggagtgttgaagcaacaacttcaagtttgtcaactatgaaattaaaccaagaatttgggagacttttggtgaaataatctgctatcttattagaagagggtacatataaaataccaagggtcttgttaagaactttgtcacgtacaaaatgtatgtccatctcaatatgttttgttcttgcatggtagatagaattggaagcaagagcactagcccccatattgtcacaccaagttataggagtaacagccaaaggaaaataaacttcacttaacattgaatccaagatagttcggctacaacctgagcaagagcacgatactcaaatttagtgcttaaacgagacaccacacttgcttctttgatgaccaagagacaagtgaccaccaaaatatgcacagtaccctactatactgactttctatcatcacgataacacacccagtcggcatcatgaaccagtaagggtaagtctatcactgagtttgatatgcaatccatgatatattgtcccctttaaatctctcagagccctcttaaatgcagattagtgagctatagttgttgctttgagaaattgattgagttcattcgcaacaaaactcaagttaggtctggtgtgacacaaatattgaagtccttttatgatactcctgttgtaacgccctaaataattaggcacgctacccaaaatgcttatgaaaccctaatcccctaatcaggattactaattaaaatagggcagaatttaaacttttatattaa

SEQ ID NO: 123060 - DNA, 1848 bp, Cannabis sativa
ctctttctctcttcatcttcttctttcttctcttctactttatattattttataacatttatataatatttttatgaaaataattatcttgatatagttattttacggaaagtaatatttaaatacaaaaaataaattaattatgacataaataaaaagaaagacattatttaagttcattgggctttgaaataattaagagcacaataaaagagaacaagccttacaggtaggggtgttcattggggtgtctatctaattatatataggatgttagattttactatccgatccgatccaatcaatttcagtcatccaatcgatccaacatctattgaatgttggattggattggttctatccattggatgtatttcatatatatttatcggttcaatttaggcttatctaaaattttagacctaatattttttggatcggatcggatccatccaatattttatgtccagtatgtattggattggactggatttatccaatctaagaaaaaagagaaaattttaatgttatttttcatatatacatatagatttgacgtataacaatataaaatctaattactcatccaaactaaataaaaatacaaattagtttgattggatgttggatgtattgaatttttagacaccccatccgccatccgatccgatccaattggatatttaaaaataacatctaatacgatccgatcacaattggatatctaatgtttggcggtcggttctcattgaattggatcgatttatgcacacccctacttacatggtttggtcaagcatggttggtgaccaagcatggctcttttatttactttactttatttatctaattaattggaaggaaaaagtcttaggatttctttttccttgtaagacctttgttaaggagagactttcttacacttgattttctgtaagaaaaaaactcatagaaaattttcttctcattctttctaaattttgaaacacacacacacacacactctctctcttattgtaatttttgaaccacacctttgtggttgtaagaattttccacccaattttatcacaacacctagatctttgtggaagactgtaaagaaactgaagattgatagcagtgttcttgttctagtaaggatccaagtttaatgatttgtgacattcttcgacagaaagaagtaagaattagatcacaaaatagaaggagacatattcctatatgacctttgtaagtattctatacttaatatatgaaattaatatttatacaaattgatctctataagcatgttttcccaacagtttcaatctaatagttccaattccaatcattttacaagacttgttatcaccaagatcaacagttccatattccctaagtttgaactcctcgaaccaagacctgattggtgtcatatgaaatgaacacccagaattcaagatccattcaaaatctaaattttcagaggtaacaactaagaattcttgtattagtgtcgtagataacggtggctgccctacaattaacggaagttcaatgatgccttggctgacgacactattaccagtgaatccacataagctcaccatgcaaggttttaactttgcatcttctaatcctatttttattagtgtatccttataaaggatatttactgagcttccattatcaactaacactctatttatcctcttgttagcgagctgaactgtcatgacgagtggatcgtgtatcctcatttgagaatataattggaggttcatatgtccttacttttttcagtggtttttgagcaaacatcgattgctcgttctttatttcattgacatatcttttctgggc

SEQ ID NO: 123061 - DNA, 1182 bp, Cannabis sativa
cctcagtgaccttggacggagggctcacccacctggcgcctagagcaccctgcctcctgtgaggaacggctgcagtaagtttgttagtgatgtaatccacgccctcaaccaggacgtcactgtccgcgtcaacccgctccccagcctcattgtatcccccaaagtttgatggtgcaacctcctcctcttcatcctccttggaagcactactagggcagacatcgccctattcctcgatctcctggacctcaccatacccctcatgatccccctcctcttgcacgggcggatcttgttcggccctgggcaaggtggcgtgctaggccacgtgagggtcagccgcgtcgactttacgcattgtctttttggtatgaggcatcatcctgtggctggacaggaaaattgaaccaaagtgtctgtcgtttgaagaaggcggacttgatcaaagacgaggatgatcctcgtgcaagagttgaagcaggtcctggtcgattcggtgttcgcttccccaaaactcacctgggttcatctacaaaagacaacacgcaagatgagtatttggtcgggatatcgaacattaaacaggaaaatatgtcgactaggagtactcaacagattaaagaatgaaaatatttgacaaaaagtctaaactcaaaagtttgaaattttcgcgagttagggcaaaaaatttcataaagcttaggataagcaagatgaaagaccgacattgtgctgttcaaaaagctagccattatgaacgatgaattcgcatgaatcgttacaaaggaaaatcatagagtatctaaaacctagagttttcaacatatcttctacaccaaagttaaaattgcattcagaaagtaaatgtgcaaagtaaaagaaatcgagaacatactgaaggatcaacgtttgggttcaggttacgcaaagctgaatgaacagttctcgtgaaaattgtttagcaaacttgaagctaaaaacctctcttttcgctctaaacttgcttagcaaagaaggttggtgaaaatgagtttttgaacaaatgctcgatgatatttataggcaaacagcgaaagggggtattcatttcagaaacctcagacgcctcggttccccctaaagcgaatatgggaaatcaaaagcaatcaagtgcaaccatcaaactgttggaagttattttac

SEQ ID NO: 123062 - DNA, 3716 bp, Cannabis sativa
  modified_base (39)..(41): a, c, t, g, unknown or other
tattattattttaattaattactctctcaatttaattcnnntatatatgcgtacatatatatatataaataaaaatatatatatgcaacagacaattgtttaaaaaagcaaaaaaggttttcgagggctctctctctgatagggcttgactggttttttcttccctcggcaacgaagggctatcggagttccggcttggtgaccgatcacccccgctatggacgaactactttcaaagaccaatcaacttcaagtctcggatgaagatgattgggaggtgcatcagagtttttcctcaactattgccaagaataccttatgagggcgactgtgttcaaacgtggatcatagcagggttttttcgaagaaggttgtggggagaatttggaggctaaaagaggcggaatggaatatcaagattcaggaaaaatttgaatcaggtatgttcttaacgttctcttttgcttctgaacaagatcagtcaaggatactatcaaagatgccatggtatttatctaatggggttttgattttgggggaaaatggtgaatactaatgaatcttggaagaatgatcttacagcttttcttatttggggaagaattttgggagtcccaattgattatctaactgaaaagaataccttgagattggcttctatggcagggacggtcatcacggttcagaactcggatgtagcgaaaatggtgatgaacggtttttacagattccaaatttggatatctataaacaaaccggtgtggcctggttacttactaccttgtgggggtgccaagaagtggatagcctgcaagtatgaggagctctcgttcatgtgcttccgatgtgggagaattgggcatagccaaaaagaatgctcttcggagtttaaagaaattacaggggagggaggaaaacaagctaaggcttatgggacatggctaaaagtggacaatgcaataagggatgggtttcatgaggagggacacaatacaaggaaggaaattcagttggaggcaacggaaaaataaggaaaattgtaatcgcaacaggggctgagaacttcgaattcctttgcactacttgtagaaactgatggggaggagatggtgggtcggaatgaggtacaaggggagaaaaatcaagaaagaatttaaagggtggagatggaacgggaaacaactgaaaaggggatccgtgatgaaaccgagaaaagaaatgtgggaaatttggtacaccaagatgagaacgacagaggcaaaagaagaattgtggaaagtggggagtggggaagctccaaaaaacagtgaaccctctcaagaatatgccgggggcttggaatttgtttgaagttccaatcgattattctcaggaatcaatgagaaaggaaggagagccatcctttgtctttggtcctagccaaaaaacaatttccaaggaacaaaggcgaaaggtggctgtcaagaaagattcgaagaataagaagggcaagatcgagagtatgccaaataaagtttctcaaaaaggggattcggtagtaggttcaaatgaagaagaggtgaactctgctatgcagggtcgcctacagaaatgaaaaccttactttggaacgttcaagggatggggaacccttggacgatccgctccttaaatcccttgttgtttgttggaaaccggatttggtgttcatttcggagtctagattacgaaagtctaaagctgaagagttgcgagtgatgttaggtttttttggttgttttgtggtggaagccatcggtaagagttgtggcctcattctcctttggtctacggaggtcacttgcaccattcagtccttctcatccttccatattgattctttcattaaggaagaggatgacaaagggtggcggtttacgggattctatggagatccagaccctaatcgaagaactgattcttggagacttcttaatagagttgggaagatgtattcgggtccatgggtgattggaggagactttaatgaaattttgcgaaaaaaagagaaattgggaggccaaccgaaactaggatacttaatgaacaatttccgcaaagctttagatgattgttgcctcagagaagttgatttcgaaggtagtaagtatacttggtgcaatggaagacaaaacaacatcatttttgagatattggatagagtttgtgggaatgaagagtggtttgatctttttccagcaactaaagttacccacctagaccgtattaattcggatcactgccctcttctcttgcaaaatcttaaaagtagtcaatgagaaactcttagaaattaatggcactctcggttccacttcgagagtgcttgggctaacaatgaagattgtgcggagattattcatgactcatggggggctgaaagtggtaatggtacaactagggagttaaggatgaagctagccaagtgtggaaacgccctccaaaattggaataagatgaagaagaaggagctgaacatgaagctgaaagagtatgaagataaaattaatacactatccaggaaaacggatccaaaagattggagtcatttaaagggcatcgagcggaaacacaatgttttattagataaagaagaggctttttggaagcagtggagtcgcgctctttggttgaaagagggggaccgaaacactaaattctttcatagaaaggcgagtacccgaaagaggaaaaatacaatagaagggctgcttgatagtaatgcaaattgggtcagtggtaataagaaggtgggaaaagtagcttgcaagtatttccaacatcttttccaagccaacccagcaacccgagaggagctggacgagtttcgaaggcttattcctaacaagatctctaattcaacaaatgatcttctcctggaaccatttacttcagaagacatttatgaggctatgcgtgctattcatcctctaaaggctccgggaaatgatggcatgtctggactattttatagggaatattggccaatgataggggaggaggtgtccaaggtgtgtttggggaatttaaatgaaggacagcaggtagatgacattaatgacactcttatctgcttaattccaaagaacgacaagcccaaccaaatgtctgaatttcggccgattagtttatgcaatgtaatttataagattgtggctaaatgtctagcggggcggatgaaagctagtcttcaccaagctatttcggaagaacaaagcacttttgtgggggagagactaatcaaagataatgctataattggttttgaaagccttcattgcatgaaaactagaagatttggtaatggcaagaaaatggccttaaaactagacatgtcaaaggcttatgatcgggttgaatggagcttccttgttactatgatgaaaggtcttggatatgcggaaggatggattgaaaaggtaatgcgatgtgttacaagtgtttccttttaggttctagtaaatgggggaaaggatagggaattttcatccaacacgaggtttgcgacaaggagattcattatccccatacctattccttatttgttcagaaggactttcatgtctaatccaagcagaggagagggctcgaaaaatccgaggcattagatttggcaaagaaggggtcaaagtgtctcatctcttcttcgcggatgatagttttgtatttttggatgggagagaagaagagtgtgatac

SEQ ID NO: 123063 - DNA, 1285 bp, Cannabis sativa
gttcgtgaggtctggtgtggactagaggccgctgaaatgattttttagggctacggaaatgtaaatgatttagggttttttatttttttaattaataatttaatatatataaaatgtaataaaaaaaataaaaatatatataatatatttatataccgggttggcgggaagttcttgggttcaacccgaaacccggtacccttaaaatctcaacccgcgaacccgcccgaagggtaccaggttgaaatcgacccgcccaaaactttttttaaaaaaacaatttacgagttcactggttcgggttcgggtcgaacccgctcaaaatgttcagtcctatgcacaccccactgtcacatttcaatggtctttgtattttggccataactttctcaatatatgttagaattagacgattcaaaatgcgttaaaaagatgagaaattgatctatggattttatgtgtatgaaaatatctatatctaagcacatcattatgaaaatccttcaaaaaattttacttagtaagttggtcttactaattctactcatgcctgccgacctctatcaaaaataccttaaataatcacatatgtatgatggacctttcaaaatcttcatagagtaatgtctcatcctttgtactttctcaatttacccaatactttgcttgtgggtaaccatgagtccagtctctgaaatgcttggacaagtcttcgagaattgtcaacactgattcttggagttaacaccaggttaactgttgactaatctcgtaagttaggtttgatcatttttggagttaacacttcccccagtctgtaagaactctttttaagtgttcttgtagactaaatttggtaagcatcgtacctccagcatggtctgtttcttttggtacttgcgccttgagatcttttatttgagggagccttttgttgtttgggctttcacaaccacttttccaatgtaacctaattataaagggagtatagactctttgagcagtcttgaccttttactggttacttatttgatgttaagggagatgtatagcctcttgggccgcgctcagtctttttcaaatttcatattaaaggttaagggagctgtttagcctcttggattgcgctctgactttttcagttttgtgatgctattgagggagcttataaagcggcgctcgacctcttgcattgcattcgtggcacttaaagtgcattttaaatgtaaaaaaataggtatttgttacgaaaattatgaacaatacgcaagtgcacgtaatcaag

SEQ ID NO: 123064 - DNA, 1965 bp, Cannabis sativa
ttaattgtgaagaaaagaatttttggaatttatttgttaattaagagactttataaggtctaattaataaataagataaatgacaattttgattgataattaattataattattaaataaataattttgacttttatagaatttaaattggaaaatatgacattagtagaaaaaaaaaagataaattgttgaataaaatggcaaaccagtgaagcccactatgtatggccggccacttatgtaatttttagctattattttatcttttttatttcatataatttaaattctaaaccctagttgaaatactataaaaggaataaaatggctctcattctcatccaactctaataacctagttttcattctttgttagacaactagaaaattgagagtcttcttctttatatttcgaaattccttcctattgttcttcattaaatttgaatcattagtgatagagtacatgtccactcatatcaagtcaagtactcgatcatagtgtggaagattatgaagaatccaaccaaactaaatgagagaagatccaggttcagatcttgataatgctctgttgcagaaagaaatcaagggctaaaattttaaatggaagaagtcattattattctgctgccatcaatataaggatttcttaatttcttatgtgttaattttatcgtattaggatcttatcttatttatagtttacagtaacatacattgcggaaccatccctaacaaccacctcaccttctgctaccagaggcggagacatccaaatcagtaatggaaccatccctgccttcatcagcgagaagaagaatgggacgagtttttgtacgatcgttggagcttcgcacaatctggatacggattcaacagatgcgattagatctgatctgaagatggtcttggtttgaagattaagatggatacgaatgtgaaagtgaagatggagagcttgaagagtagtaagaaggttggaattagggttacatgtgatggaatcaaaggtgtggtggcgccgccgaaaaggtttctctacaaaagcgaattgaaggatgtctgagcgccaccgtgtcggagatggtaggggtgtcgtacgggcgaaaaaaattgctgcatatcatatgacgtaatttgtgctctgttaatttgggaacttcaagtatttattattattagtcaattatttattcttataattcaactttttaatttatatttataaattttttaatttaattatttctcctgcttttatatattaattttacttattcttaccgtatttattttttatttttgtaaagtttctttcttaaaatattttttatttattattttatacaaattttattcttctataaaagaattattcttctaatttaacatgttagtcattcttttttcttattatttattttttaatttatataggttatttattttaatttctaatatatatatatatataatgtcattatagtatgtatttatttaaaaaaataactaatatttttattttatatttttaagtgtcgtgtttgacctaaaatttaatttaattttacttattgctatatttattacgtgacatttaaatttttaacaaattttatttaatgctaagaactttttacattcattttagtttttgtaattaatattttattaatacatatattttcttttatgtcatattaataaatttgtatttatattattaaatattacttaatgttattagatttcagagttataattataattttagtttctttaattaataattatatactttaatgtattatcattattgttatattttcatactattatatttattattagtgatcttttttacattaatttatattaattacaatttttattgaataactttatatttacttttatttatgtttatggaaaattctacaatgcacacccttaaaatggata

SEQ ID NO: 123065 - DNA, 919 bp, Cannabis sativa
caaacaagaataacaacataaaatcaagtcccagaaaccaaagcaatattttcacaatttctgaaacaagtaattactagcaacatataaaataatttcaatttttcccataacaaaagaactttaaatatataaacaaagaagcaatttccaactacaattcccatatcactgaagagtattagtattattattattattattactatttcagaactggttgaaattaaacttacaggagaggaggcagagagagaagtaagcttccaaaacatgtcgagaaagaatagagagaaagcgagaggaaatcagtaagagaagagctggtggtttagatctgcaagcaaaccctagaaagagcagtgaatctagggtgttgatttttcagagtgacgaatgaggcggagtggtcgagatttgaaaggctagcaagaacagttcttgtaataacccccaaacaaaaaaaaaattattatggacctgaaaaccctaattttcaaaaattaaaaaaaaataaaaaaaaaattacgagatcgaaaggaggcagaaccgtgaagatcgagagaaagagaaagagagccccaaaaaaatcataaaaagaaaggtaagagagagaaagtagagagagaaaactataaacgatgatgatgatgatgatgatgatgatgatgtgtattctattctattctactctcaaatttatgtgatgatgatgatgatggtcatgcatgtattcatgcatgttacatagttttactttttttttttttctaatgagtagttagtggcgaaatctgttcgtagtgtattaaataataaataattttatgtttggattaagtaatatattgtattaattattacgaccaaattttttaatacaatgtatgttgtattatttaatacataataattggtc

SEQ ID NO: 123066 - DNA, 740 bp, Cannabis sativa
ttcaaggggcatgatttagtacatgttaaaattcagggggcaaaaatcttaattagcttaaaaaaatacaaaattagggtcaaaccgcgcgaagcgtgacttagttcactagtatatatatataaaggagtgtttttaagagttgaggtggcaatttatatgggtgttttctccaaactttcatcacttaattttcttaattttattgagttctttttttttttttttattgctcacatttttatttattcctcacatttaattattttacaattttaatttgatatggctagcggttaaataaattaaacgttattgatgacttttcaagttattgatgacttttcaattatatattgattggatacaataaattacaataaaatacacagaaatctattccaattctaatataacacatgtaattacacatttagatcattaaatggaaaacataaggtaaaagcatcaaaatatcaaatttaaattatatatatactgtatatatatatatatcatatcataatctatatatctatatgcaagatgacatggcatcctaattgagctttgtttgtcattctttaattttctaattttttcacatttttataattttctttaatttttggtttccattaccatttaagtagaaagatttaactgaaaaaattagtgacttctcatttttaaattagggacttctcattttattagtatttatgtaacaccctaactat

SEQ ID NO: 123067 - DNA, 612 bp, Cannabis sativa
tagcttttccataatccataatttcttttcaataaaataagctgttttttaactgcttaccaaacacctttttgtcacagcttttttgaaaaacagcttttagcttttccaaaagctgtgccaaacgggccctcagtcttgttagatttgcttttcgggtggactctgtttatgtttggagggccaatattcctggtcctatacatgttattgttgtaaatgatctcattcattaatatcaatacatgttttctcaaaaaaaaaaaaaaatgtgttaattcaacgaaattttaagtgtgttaattgcccccttgcctcttccacctatgcttacacgtgttgtgttctgtttaaaatactaacgaaatatatctattactataataaaagtgacaatactttgggccttaactaagtaaattactaaaaaatcctttgttctcacatatatactcacatattaatatgtaaggtatttttattgtttattttctatatttgatatgagactccaatatatactttcattttgtttgattcataatattatgcaagaaaagataaaactattttgataaaaataatagaatattcaattgttgaccatgatat

SEQ ID NO: 123068 - DNA, 836 bp, Cannabis sativa
gagggcttaatcttaccaacttgaccaccattaaggcacacatttagagaggtggtggaaatacattgctcaacccagttacaaactttctccagaacttcaaagcactcaagcacatgcctaataaacttccaactcagcatatcataggctttcatcaggtcaatcttgattgcaaaaaagccttctttaccgttcttacggttaaggtatggataatttcttgaacaattacattattatcttgaactctcctacccagcacaaaagccgcttgcatcggacaaataattcttgggagaatgggcttaattttgttggcaatgagttggaaatgaccttatacgttacattgcacagagaaatagacctataatggttcgttcttttcagattttgagtcttggggataagaactaaattcctatcattaaaacccttgtgcatacggcccgtaacgaagaaatccagaataacctcacaaaattcattccccacgaactcccaatagtgcttgtagaagaggactgacatgccatccggtccaggggccttaccactccccatcctaaaaagcatcttacggatttcatcatgtgatggtagccacactaactcttgtttctcacccaatgatattttccaatggatgaggtttctacaattcagctcatgcctatagcaagatccagtaaagatttccacaagtagctggtaaactcttgcccaattaaaagttttgtggtatctaaataaatttactttaaataatttacactaacacgttctatacaacaaagaagaagtcatgtttaaaatagggttgtaaaaaaaaa

SEQ ID NO: 123069 - DNA, 1705 bp, Cannabis sativa
tccattaaagttggactagataaggttttctagtccctttttgtgttggacataatatccagggacataaaaagtgtatttttcatgtccaacaatattggactagataaaaatttctagtccaacactattggacttgaaaataaaacccataaaaatattagatttctagtccatctttgctggacttgaatatctattttacataaaaaaaaataataaataatttaaatatattatatatataaatttaaataataataaatccataattccttaattttaataattaaataaaaattaattaatttcattaaaattcaaatacaataatttcatttcactcaaattaaaaaaaaataatatttaaacaattaaaatatattttacaaatactcccaaccctattcagcaaaaacaaaaaagaaaaccctgccaatcgccgccgccatctatgcccggaattgagccgtcaaccacgaacctcgtcgaccacgaaccatcgtcaaccatgaacccacagtcaaccacaaaccccacgaagcccaagagcaaatcagagagagggagagagagacaaaccgaaaaaaaaaatctcaagatatttacattgaaaaaaaacttttacgatatagaaaatatgcagattcatagtctagaaattcctacccttgcaaacccaagcctttgcataccaccatctatggacaccacgaaattcccatctccacaaccgcaaactgcagctaaagtgggacgtcgctttagatgtaggaatgttaagcacgattaagaccttggagctatttagggtcaaaagttgaaagagtagaaagggatgaagatggaggaagagattgaaaggaggaggagacgttcttagactaagagggcggcttgttgaaagaaattaagagaaaaattagggttttatttaggttatgtatgaaggagagagaaatgatgtttttatttaaaaataataaaggtaaatgaagagagaatatagagaaataataataatataataataaatataaatggggtatagtgtattagtgcgtgagaaaagaaattaagtggtataatgttttaattttttttttatgagagtaagatgttttaaattaataataaaaatactttatttatcaagtcaaataaatataaagtatcatgtattctttttctttttaaaataataataataatacaatataaatgcatattaattatgtataaaaagcatacctattataaatggattttatatttgatatcatacaatttttttttttaagaaatgtcaagtccaacatatttggactagaaaactcctcaaaatattttcctatagtccaactttagaaaactttcaaaatatttttctagtctaatatagttggacatagaaaatagacttagttttaaaaaatatatatatcaccccactacttgttttctagtccaaaattattggacatgataattttttctttcatgtctaacaatgctggactagaaatctactaaaatgattttatgtctaacactatttttattggacatgaaaaagggacataaaaaggttcttttgtagtagtgcactctctcgtccctctctctcttccctcttgaatggttgtttctcggtgggtgttggtggaaaaccgaagcacaacccaatatcactcaagaatcttac

SEQ ID NO: 123070 - DNA, 2042 bp, Cannabis sativa
tggcctattctgataggtggccttgctggcagagaggactgccaaggaggctggcatgctgtgactgaactggagcaggtcaaggcggacaatcgcaacttgcgtaatgccaacgagacccttctagctaagctcacagaggcgaggctccaggttgagggtctgcagaaagagaaccaactactagaggaaaaaaatactcattaggcttgtttcataaggagtatgagagctgtccatgatctttatagggagaccaaggaacggacgtccggagtaggttcttccacccggtcaggtggtgcccagtcttaaactttaataggcctttttgatgtgtggttgttatggttttgtttttttttttttgtatatatgtccctcttttgctgcaattgttaggacatagagacaatatttatttgccctggccacggggactatatgtattagtaaatagggttgccaatccctttctagagattcattgtagtagattcttaggggttggttgcatcattgaaacatccagttccaacaactagtgtttcaacccttcccattagtcttaatgatctctcaattaatccagggatagtttcttgattttaccctttcattccttgagttgtaatgcttctttccgccacttaacctcttgcttgaaaaaatcacccatttagagttaacccaaagatggtttctttttgcaaaaaaggagcctttacaatttcctgtaccttctccatgctttagttcttctacaaggttgattttcggagccatgcccatgattacttcagacttttaggcattcttcttgtcttagcccttgtcagcctaacattttaacaaatcacgcaacctgatggactaaactcgtgggaagtccacagagatttgtaagaaagaattcaggcatatttttttctttgtaggaatttttgccgaatacgcatcttatctccagattcgtacttgagtttagcctttgaggacagaattcaagcgtgtttcccctaggaagacttagttgaaaacattttgtgcttttggttgcatgtgtatacttgtactaatagccttagcaaacggacgtaagaagttaaagttgtcagcaatcgggtgtaccataccccccaaattagctgagtatttcggtctcaaattctcagtcatttactttggaatctaactcatgtccttttctagtttttaaggaggaggtttgagtgtggttccgccttgttttagggaccatactatttttttcagcccatgtcttccctctccgtgactacttggaagggagtctcttgaatgtgtaatcaaccatttctcggcttccatgaggaaaagtgatggggttgttggtggaaacccaattgtatggctgaccccaaatgattcctctgtgatatggatcgtgtgggggaaagtataggctcttgggacatagcaggcttttggttcacggagggaagctggggctgcatcctttcgcatacagttttccctacacagaggtctgttttgataagcaagagtcatgctaaattttgtactggcaaacttttggctttcactaggaaaggctaaaagtgcaaaaaattcagacactgccttcacttgcaagagctggagggtgaaacattttagggcgtgcgagagtcatgttgaatttttatgaagcaagcttcggcttccgtgaaggaaagctaaagtttcataaaaattcgagcttagacttcacttgaaaagatcaataggagaaaactccacagggagtaaggcagacttcaagcagtccttccattctaggaaggagggatgacgaggtgccatagccctagtgatctttcttacacaaaaaacatcatgcgagcgtcatttgaatttttatggagcaagctttggtttccacaaaggaaggctaaagttgcataaaaattcaagcacagactttgcttgaaaagatgaaaaggagaaagcaccacggggagtaaactagacttcaagcagtccttccattctgggaagga

SEQ ID NO: 123071 - DNA, 1802 bp, Cannabis sativa
ctagcgcgcctatgcctaggaccggccctgaataaatatatgttcaatatatataatttatttttcttatagagaaagcattgggtgtgtgttatattggtaccctaggcataccacgtatattatttggaccctgttaatgcacccataacaaatcgtcctatcattttaaaaacaatcaagaaagcatatgacacatacttaatgagaaagagcaataagatcccaaaaagcttaagtattacggaccttgtagtaagtatatgtaaatttcaatggtaatttaaagatttaataaattattaatgtgattatttaaattataaattattgttgtgtcctcatcaaccaagtaatgtagagtggctactatattatgaggatgataaaagatctagttcagttacctaatcaacgtgactatattaagaaagaggtacataaatatttgtaaaataattatcaaatataaatttatgatttatttatatttattatttaattaatttatttctcttttatattttgtagctaatagaaaaaaagtcatatccaaaaattatgattgaagagtgagcgacagatatgcttccacacttgcagagtcatcacattgtggtcattagttattttttttaaaaaaatatatattatttatgacaaatatttagctaacaatattagataattatatcttctttttctctaatacaatatttattaattttgttatgtatatatatctttaataaatattgtaaactttgagatatctataatagtttaaaatttatattcttttttatgtgtattaattgagttaagttaattatatataatttgttggaaaaaaaatatattatataatataaataattatttataatttaatataaaaataaagaaacaaaattaattttacagcatttaatttaaaaacaaaaaacaaaaaaaatctagtttcaagtccaacttagctagactagaaaagtattcctagtgtgggatcgcttttcaagtccagcattgttgttggactaaaaatatttttctaatccaacaattaaatttcatgttatgcgaccgctttttaagtctaataatattagactaaatatgtttttctagttcattggactagaaatgtttttgcagtcaaacattgttagactttctaatctaataatattgaactagactttaaaaaaaaaaaatattgaactagaaaaatatcatttttatatcctaggctatcatatccaacacaaaaggcactcaagactaatattgatggacttaaagtgaggtttttctagtagtgtttgtatggtaaacgatcttttgacactagtataacagtagtagtagcaattctgctaggctcattgatggttatgtctggagaagggggtcttaaaccaacaaagatgggtgcatgagagtttgaggttgagcaatgcccttccccttatcagtatgagtaatcacataattaaccatgattggggtgaagggagaatcgagatgaccctattcaaacccctagcgtttcgtttgatgtaatcttgaattgtacatctcattttattggtaacgaaagttaattcatattattgaggtttgtgttctcatgtgtatatatacctccttttgtcaactacactaaaatcaaacaacctatatttagtgtgattctaaaataaaataaaaaatacaatgagtggacaaagaactattcacattaatattttaaatttgatttttatttttgtaaatccttattataccaaaaaaaaaaaaaa

SEQ ID NO: 123072 - DNA, 909 bp, Cannabis sativa
tgtagcattgtgatcatctcaagtatcttaaaaagcatgtacttaattttgttgatatccctcattaccctagtttagatttttataaatttcttctcttttttaaaaaaactgtcattagttgtgtttgaaaattttggaatgtatgtttgaagaatttggtttagaagaaataagtaggtattagattagactattcttaacgactgtatggtgttagattgaagcattgattaccttcacaggtttaaaggggctaataatcatacaggcacaaggggattcttccttgcgcaagagcctattccatcataggccaacaatatcgtgaatctcgcggtcccttccgtaagattgcaacaccttatagttgcagaacttattggcgatttgatccatctcccatagagattaattgtaaatttcttctagaatagcgtctctggcttgttcctcaattagttcttcctcctcgagacggatgacgcctgccattgtagtgacttaaaaagaagaagcaaaccaagaagttaatatccacactagaagaatagcacggctacagagagtcctccccttaaactgcttctagacccgtcatctgaaagcaaaatcctcaaagaacttttccccaaaatgatccaatcgggaacacaagaatttgacaagaaattctcaaagtgtctcatccaaaaccataagggtcctagaaaaatgatcaaaatcgagtcatactcgacaatatcatcctacactcagttcttcaacatacattccccacaaagacaaagtttcatagaacctaatattatctaccaacaggacacaagctgtaacgccctaatgctaaggcacgctatagtaatttttcaattacagtgctatcgttactaatcaaagaattttctc

SEQ ID NO: 123073 - DNA, 1429 bp, Cannabis sativa
  modified_base (1387)..(1395): a, c, t, g, unknown or other
catgcccacacataacaagttaagtactcaatcataatgcgaaagacggttgttaaccaaacctaaaagagagaaagagatcgaggatcaaatcttgtgattactctgtgacagaaaggaacaaggattagagatctaaacggaaggagtcatattattcggatcccataaatgtaaggttttctaaacccttatgtgtttaatttcattattttagagaattcatatttagggagttaatgaaacataaatcttaataaatctagatccttgtaaaataagttccaaaaactagcctcaaagccatggtaatgatttactttcatgaaatatggatttaagacgattattgtgatgatttggatgtgttcatgttggtttatgtgcttaattcatgattgtatgttcattaaaaaagtatatttttttggaaagtagatgaaaaatttatgaatttaaaattttacaaaactcaatttggaattttattgaattagttatgatattttgacgtttgaaaaaatattaggctatggtgtaggtggacgcgcgagtgaataggctatcactcgatcaagaccgagcttcagacaagcccatgacccagttttctcgaacaagggctctcccatgccccagctgactaacaaatgggcctcaaggaccccgcgttcagccttcccactcctttttgccccccaatcacgcccaaggggagcatgcaatgcatactccgctattttgcccgtttttgaatttttttcaacatttaaaaatcatttttcaatgaaataaaattcaaattttggtagaattttgtgtagaatcttattttgaaataaaaagctaattatcggattaaaattattttttataagttttttaattaattaaaattagttttagatattagtgggctttgaatttgaaaaattgatatttacacaaacttgtatttattgttattttgaaattttattatttttattatgttttattaattttaattctacgattagatatttactcattttattaataaaatttgaaatgatcttatttcgaaattaaaatattaataaatcttaaaaataatctagctaaaatttaaaaattgcttaccatataagattttaaaaattttgctatttttaaaaagtattttattaatttgaataataaaattagaaaaatgttttttttttttgacaatttatcttggaaagtctatgtcgacggtgcgtccaatgagaaaggggcctgagctagagtaatcttaatctccctgctagggcaccaacttcaaagtaccataccctttttgttccatgcctcaaacaatgaaatagatcatgaaactatgttggtgttggaatttattttaccnnnnnnnnngatctactcataagtatgttgtttaaacacccta

SEQ ID NO: 123074 - DNA, 831 bp, Cannabis sativa
ctgggaaagcacatccaattaggtgatgccatgtggcacgcatggctgagaaaagagaaagccacacaggcgctgactgggacaagttggactaatagaagggcgccgtttggagctgacagggcaagcggacccactgggcggctgggcttgaaggggaagagattggtctgggccttgctttgggctcttttatcctttcctttgctttctcatttttcttttagacttgtttctttcaattttactacttttatttctcttccttaacaaaaatatactttaattcctacaaaataacaataaattaaatccaaataaaatattttcaacataaaaatatattttattaatttcatgaaaatattaatttaaatttaatttattttaaactttaagataaaaaatatgtatttttcaccattaatcaaacacacccttagtttttcaaatttatttaaggagagttgtaatgatggtaataaatttaagaaaaaaattatttttattacataaactatattagtcatatataataattattgttaaattatgggtatattattttttcctaacaaatttaaaattatgggtatgtctagttttgtaagtggtttgtttttatttattttttttttattttttttttaaaaaaacaaaccacttacaaaactagacatattgttaagcaaaaccaaaaatctcattagccataaaaccaattaaactctaatacaaaataatatttaagggtgtgattggtttaggatttgaaaactattttatgtttttgaaaattaaaatggtggggtccacttaagaattcttgat

SEQ ID NO: 123075 - DNA, 947 bp, Cannabis sativa
  modified_base (58)..(71): a, c, t, g, unknown or other
tcacaacaaaaagttacttgtgaccaaagcataatatttaaatacaagttgtcactannnnnnnnnnnnnnacaacaagtattgtgactaaaaatatatttgtcataaaaaattgtaatttttgcgaccaatacatttagctatagattttttcagtcacaacatagtcataatatttttattttaattataagttttagagtgactaaaaataagactttttttataattattgtatatttaatattaaaaaataaaataaaaataaataaaagtctaatgaaattacttcaaaaattaatgggagaagtattctcttttttatcccatatttaataaagttgtctattcttaattttaataaagtaagtaaatgttagaaaataactactttgtcaatgcaaattgtgaagaaaaaaaaaaagcacatactttttttcttaactaattaatacaatattgaaaatataaataaaataaaatttggagagggctacagccccctatagtctccaagtagctccgtcagagcctattctttctaccctttatttggagatgtccttagtttttgaattgatttgattgtatataattgtgcttcctttttttttaacaataaatatatttttattttttttgataattcaataaataatttattgaaaataataagagtatgatacattgaagatgaagaattatcattgccaaatgttagaatttgcgaataagataaatgagattctatctcaaaactaatgcaatgaagggaatagcttattcattttatatagggtaatttatttccacacattagcaatgtgggactaactctaatacacgctcctcacgtttgggcatagaaagtgtgggtataacgaacgacctttaagagaccacagggtcgaacgtgacatttgaaagaatcccacaatgccaaatat

SEQ ID NO: 123076 - DNA, 689 bp, Cannabis sativa
  modified_base (615)..(617): a, c, t, g, unknown or other
aatttacactgtgctaccaaattcaacatgattattttgcaatttttacaatttcaagttgttagtttgccaaatttcccccaattcaatacagtagagaaaacacaaatgtaacaacagaataaaaacgcaatctttaatgctaacaacacaaaatccctacctgaataaggggatcgagcttcagatgaaggctttgtttcttttcattagcttcattgagagcagaagaaagactccatagacgcgcaagctcttgctggaaatcttcccaatttattgctttcccattttcctgattcattttcttcgaatccgatgaaattttggatcgctctccttccattacaaatccaagggaaatctttgtatgatctcaaagacttgggagggttcgacctcatcgtctcgggacttacctgtttagagtttggggaatcactgaaccataattccgtttcgcgctttgttcaattttctcgggaaaatttttaattttctctcgcgaaaatcagttgggagtttattttatttggggaaaaatctttgaaagaaaatggcataagttaaagtaaaaatgttcattaaataaaagtaaatagcggcataagtacnnnaaattttaagtttgtaagcggcataaactcaatgtttatttttagcgttataagtacacaatatttgtaaaa

SEQ ID NO: 123077 - DNA, 583 bp, Cannabis sativa
gtctcaccactctcccatgtactcgcacagacgtctcactactcccccatatactcgcacacacgtctcaccactctcccatgtacttgcacacacgtctcaacactccccatgtactcgcacacgtctcaccactcccctatatacgcgcacacacgtctcactactctcccatatactcgcacacacgtctcaccactcccccatatactcgcacacacgtctcaccactcccccatacactcgcgcgcacacacacacacacacactccaaacttgcttcgcattggagcctccacgtgggctcgcacgctggtctccctataaggcatgcacacatgcatccttgtagggttcacggggttagtcttgggattgtatggacgtatcccgacatccgagaatattgtctttgagaaatatgcataaggtgaataggctgattgagtgtgctctcgctcgtctctttgtccttaggcgaataatctcgaagattagcggtgctaatttttagggttaacaacactatactaaccaaattatatattacaattaaaatatatataccatgacaacaaaatta

SEQ ID NO: 123078 - DNA, 931 bp, Cannabis sativa
tttttttttttaattttcttcttccatatttggtagtagttcattcctgcctcaaatctatttctcactggattcagttctatcaaaacataaactaaacacaaaaattcatcttttggttacaaaaatactttttaatcagaaaatatagtttccctaaaaaaaacattttttttttaaataaaaaagattaagcagatagtctcacacagtgtgaagttttcaactactacacttgcagtctctcaagttaatcaaacatttgaaaaaacacaaggtgatcataaagaaataatacatacatatatataaatatatatatataatcaatgatagaatagaaaagtgaaaaggttgtgagaaacccacctggggatagttgaaatgaagagttttggttggtttttctggtgtgagctctggctgaagatgcagatatcttcttgttattcactattattccattaccaataccattactactagtactactacccattttcacctaaccgataaaagctagctagctccaagaaatatgggagtcttaattaaattattagaggtgaaataagaagaaaggtttgagatttagatcggattggaaaactctaaatcactcatttaaatggtctaacgactctaacattctaacgtgagagtaactgccaaaggcctgcataatgcatatataaattaaaataaataaatacaaaatataggtgtcgtttgttaatatttttatttttaaattttttaatcacaaaataagagtaaaggtggcgtttaatactacttttttaatcagttttttgtttttaaaattggaaaagtaaaaatatttttcaaaaacatgttctgcaaaactgtttgcactcttcaattttttaattagaaatcaaaattttaaaaacaaaaaaaaaaatcactt

SEQ ID NO: 123079 - DNA, 1030 bp, Cannabis sativa
attaataatttaagagtcatgagtttgaatctataccctctcctttttttacatctttctctcacccctaagttaggcttagtagattttttttaagagatttggtaatatatatttgtcctttgaaaattaaaaaccaaaaacaattataattggctatgtgaatggtgagaatggttgtagtccacagatggacatgcattgttctcatgcttacaatataataataataagggtcaacttcaaatttcagtacttgaaaaaaaaactttgaatccattggtagtgatactattattaacttaatcaacctaatagaattagtcaaaggttacagaatattttgcattagtttatagtcatattaaatcatgttcatacatatgtaatcaaataagtgatgggatggtcgatttagaccaatgatacatattaaaataatcaaatggttggattttattacgtattatttacgtactaatttgattaactttcattcgatatgataatgactttattttatttactatatataatatattatatacaatgatcatgtcctttattccaatttgtagtttttaatgacataaatatatttagattactttacaacaactatatttgtcatatagtttacataattttattatcataatatcaactgttgatttcttgtactaaattatataattttcatgttactacatcatatcgtactgtttaattattttcttatatgtttttttatacgcttggatcttttctttgtagatacctattatcatcatccaaattaaggagaattttaataatctaaattccttaccttgaagaagtatgctaatattattaaaatttgaatattttacttttattacgtttttttaatgtaaaaattattattatataccgtcggagtcttctgcaaaaattgtgtacattaaaactataattttattattagttttttttattatatttttttaatttatgtatgtataataaaaaaagaaagaaaagaaattgg

SEQ ID NO: 123080 - DNA, 663 bp, Cannabis sativa
aaataaaaagtcatccatgaatttctcataaaccaagaattatgttatataggcacactttatatagaaaatagatatgaaaaaattacagtataagttttcaaaaacttcaacttgatacatataagtttctaacttcgaaaattgccgataatagtcccgaagctcattatttttgtaagtccgtcagtcttctttttcaacaaatccatttactaataaaaaaatatcacgtgttgataaattattagtccaaattgtatttttaatttaaaatttaaaataaaaaaaaaactaaataaaatgtttttatttatttttcatttttctttgttcttcttcttgtcgatgcctagaaatcaccacaaaaaggcaacccaaaacctagcacctgaccctcaccgagctcgaaacccaggttctccgttcaccccctcggtcagtcttctccatttactacacaagctccgatcgttcacattctttgtgcttcatcccaagtggtcatccctgagcttaacacccattgtacccacaagcatgcttgctccgttcaagaccccaaacacatcgccaccagggccagccctaggcataggcgggctaggcccgtgcctagggcccacacttttcgggggcccaaaataaaaaaatttaaaaaaa

SEQ ID NO: 123081 - DNA, 1468 bp, Cannabis sativa
ttttttttaaaaaaaatatttcatgtatttttttatagaaacatgtcatgtatctttgatttcttttcttctaataataattttttgctttgtatattttctaaagataaacatgcaaagtttgatagtatccaattaagtaaggagaacaaaaaggatcttcagtacaattttttttttctttttaataaaaaagttaaggtaagccaaagttaaaaaaaaaaaattaaactagtttagactgaggaataatttacaaacaataactaccctattagtcttggttataagattcttaatcctgaaggcgagatgatgaaatggtatgaacaaatatggagtaaatataatttctaaacacaaaattattttttggttagcaatacttgatggattacaaactaatagactctagaaatttaacacttgtcaagatattgttagcctgatttgtgattttaagtaatgaaaatgttaaatacttatttttgattatcactatatttgtttgtgtttagggactatatcatgaattaacttgattggtcagcccataaaaggaacattgatagattattgagatagatctcttgattgcatatcatttttttcttaagtctattcaatggctcttactacgattgtttaccatgtttgaaaaaaaacgaaattcaactttttgaatacaataagtttctttcaattagttggttgaaaagaaaattaaagagatagtgttttcgatattgtttaaaaattaaagtatcatgatagataatggtttgattgattgtgatcttgtatagatactaatgtatataggagcggatccacctagaggcgaagcgagaaagtcgctctcttttaaaaaaaaaaaattggaaaaaaaatatatacaatttaattagttacaacatatatttacaataaaaaaataatatatataaatataatattagttttagtgtaatgcttaagctaaattacatataggatagatgtcaatatttcaatttccattaagagaattttttttttttttaaattttatttttgtttttgctttatcaaataaattacccccttcactttgaattctaagtccatatgagaaatttttaggacagtattacttgtgtgatactattcaattgtaaagatatttgatttgaattaagactattgacttgttgatttatatataaaaaaaagtacttatgactattatattccagtttcaaattttctttggccttttataataattttttacacattttatatatttagtaggaaattaaatccttcgaaatggaaaatgtggaggatgcctatgaatctttatatattttaggactcatctgaaacgatgtattaaattgtattgtattgtattatattgaattagattatatattatacttttatataatactatgttaaactttaatttatactaaaatattat

SEQ ID NO: 123082 - DNA, 1747 bp, Cannabis sativa
tttataaaaacacagtattttaaaaaagatttttgtgtgaatatttttgtaaaaaataaccaaaatttcagtatttttgtaaatttcttatctttatctcaatgaataatattgctatttattttgaggaagtgaatttatgatcaatttttcacaactaaatatactgtgaagtctaaaaaataattatttcacaccaaattataactttcattaatttttttttaaaacaatatctaatttattaatatgtattttgaaattgaaaactattactaaaatttcaaaacagatttgtaaatttcgtaaccaactataatttgtaatatataatcagcttaaaaccctcaaatattacaaatttgaaaaatattttttcagaagttatagattttgacctctgattcattaaaattaaatacttaaaactggacaaaatattgaaatattatacattatttgaaagcaattatttttaaaattaattaaaaataatcaaatagattaaatattattttagattttttgttctacaaaaattatcgatcaactctttagtttattaatgacaaatcaaattctgtattttttaaaataatatacaaaataatattctaagttcaattttcattaaatttttttcaatataactaatctaaaaccaatttctaatacaaatagatgcaaaatatgtaactactctagttataacactttcagattattgttaagttttcatttgacatcaagattgagttatcaaattattatttaacaaaacagaaatactaatgggtaagggtgtttattctttatttaataataatattttattaaactaactaaaaaaattaatttttttttaatattaggagaagggaatttgaacttgaattaaaaattgttaaacgataataacgcttttatatagatatgaatacatgattagtcttatgtattttttttttcaaataataaaaaattatatatttcaaaacatgattagtcttatgtattttttttaattaattactagataggtccacaaagacttggacccagcagcaactgatatttcaaacatggcttttatgaataataatttatatatatacatatatcttccctatatatttgattcaaagaatatagaaccataataattcctgatatcatgattcatttcatgatggctgggcagtcgggtaagtttacagtatatttcattagtacattccctattttggaaaatttgttagtttaattttttttcattattattatgtttgtggtacttatttatgattatttataaattttttgaaaattcgaaataattgagtactaaaaataaaattaaaataattattgagaacacgtaaaaaaaataaaatacacatttgtcacgaaatatttaaattatatttttaatactatataagttatttaaagttatttaaaaactcacctattcaattataaaaataaaaaattaaaactctttcttaaataccaaacagtatttaaaatgagaaacatataaatgtctacgcgcattataattattttttagtataaattatataaaaagaaatattatcatagaagagtgcaagaaagtgaatttaagtgaaatgtaaaaggggctatttcaaaaaaaaaaaaaaaaaaaaaaccacaaataataataataaaaaaatataaaaatacagttgtatagaattttaaatattattactgtttttaa

SEQ ID NO: 123083 - DNA, 5600 bp, Cannabis sativa
  modified_base (3873)..(3873): a, c, t, g, unknown or other
  modified_base (5336)..(5336): a, c, t, g, unknown or other
aaacttaaagcacttaccacatccgaaaaactagtggattttttaacggactcttcaactatcgaaggactagggcccttcgaagcaacagatttaatgccaaacgtgttgtacgacgtaccggcggattgggaagatcagaatcagccactgcggcctgaaaaaaataggaaacaaaaaaagattacataagaaaaacaacattcacaaacattaacaaagaacaaaattataaacatataaacacctttttttttttccggccacgagtttccctaacagagggctgaaactctttctcaactggaactttagaattagtcccaaattaaacatgttgaacacaatcgtcatcagaaggatcaacattaaccttgaaacacaaaaaagaaaccggttaaaaaaacatacaaaaacaacacttttaaaaagctcaaaaaaaaaatttagaaactggttataataataaaaaaacaaatgaaacacaaaatatgttaaaaaaactaacaaaataaactggttaaaaaaaaatataaaaactcaattacataatataaacatttgaaaacccatttcttaaagaataaaaaccagttataaataatataaaaactaaattacatcaattaaacaattataaacacatttcttaaagaaaaaaaaccagttataaaaagtctaaacactaaattacatacattacacatttaaaaacacatttctataataaaaaaaaccagttaaaaaacaacaacaataagagaaccagttaataaactcaccttcttcttcttagcgcgagatttcttaacctctggtttcttaggtgcatcagcaccaacaaacgcaacattaccaggctcaatctgttaacaaaataaaaaatacaatattaaaactggttaaaaaccagttataaacacaacaagaataaaacgaaacaatccaaaacagaataaatgaacatgaattaacaccaataaacaaaagaaaccaggtatatacctggtcctttaaatttttgaaaaaaaaaacagattgatgagaatccttctgttgaactccaggatcaacataaggaataatgtcctgaaaacattgagtagcagataataaacaacacaaaaacattaaaacacagtaaaatacagaaaacaacaaacaaaataaaacatgaaaatataaaaacataccttacttcacccattttccttttcttaacatagacgactgtatcaggggacttatccattgtatataacctaaaactaaacaaagaatacagagaaaacaaaacaagttaataagtttacattacaaactaacaccaaatatatataaccaataaattgtaattgccaacccacataaaacacaaaaaataaaaaaaaaactgtcacatcgtggcaaaaagaggggtaaaacagttaccacccccactaaatactctaaccaatgaaaaaaaatattaaaaaaaacagaaaaaaaataaaaaaagcaaaaaatcaaaatacaaaaaaacataaaaatttaaatacaaataatagtattaacctaaaaattcaaatctattgcacaaaaataaacggttacattttataagtatcctcaaaaactgtattgcatgaaaatgtataaacccaaaacaaactctcaaaaccaaaaaacataatctggaaaatagatacaacacaaagaaaatagaaaaaaaaaattaaaaaaatcctagaaaattcatgaagatttaacagaaaataagagagagaacaacaaaatcaacacaaactcaaacttaaaataaaaataaactaaatagaacaatgatcaacaaccaaaataaggacacatttttaagaaattagaaagaacaaacaccaaaaaaataaaacacaaacctaaaaacccaaccgatcatcccaaaaacaacaataaacccaaaaaaccaagccgatcatggaaaaacatcacgaaaaaaaaaccaacaaacatcataatacagaaatatcatcactaaaactaaacacattacaacaaaaatcatgaagaattgatcacatacctcacttaactaagaagctgatctcgaaaatcactaaaaacagagcacacgaactcacggcaactgaaaaatcgaagctagcttcgaacaacaatggcttcccacacacaccggagaagaagaaaaagaagaaaaggaagaaaatgcaaaccctaagctcaaaaaatcaaacaaaatggagaatgagagagaaaaagcttgatagtctgattatatactatcaaatggcggtatgatgcaatgagtatagctactccatgcaaaaaggaagctataacagctatagcttcaaaaaaattaaaaaaaaaaacaaaatatgggaattgggcctggattaacacaaatatggcttttaaaaaaccgataaaagggaaaagaaaaactaaatcccatatacacaaagctttatttaaaaatgccataaaaaagtaaatggtaaaaaaaatcccataattgggtaatttttacttttaacaatgagtctatttacaaggtatgccaaaataatgaggaagaaatttaacagttttattttcattgtcattttgctaacttttttgtagataattttgaaaaggaaaatgtttaatattttgtaaaagactttggtggagtggtggcaatagtgatggattttattatgggattatttcaaaaatacataaaaataacaaaaaaattataaaaatacgatttcacggaattttaaacatttttacgatctttttaattttatttacagaaaatatagtttttttatattgttattaacgcagattttcgttaaccaaatatgagcctaatattgataatctcacacagaaaaataaatgcagtaaagtaaaaagtatgaacacaaaagattttttacgtggttttgcagttaaaattctgtatagtccacgagtcagtcttattagatttctgatagcttttcagggccttttttgtatgatttttttcgtccatttttgttctaacttgccactatttataatcacatagtggacagttaattacaaagttggctgtaatcttttcaatgttttcccctaaaatcgtggggtttgattacatatcactgagtatacatgcggttattatttgaatatcacacagctctgattttctcgcttttactgggtcaaaatgatcgtgtgtttaaacacgtctttaattgtagcgttcttggatgtctcaataggaacttgtttccaatgaccttgatagcgagcttgagctttctcccctatttttctgaggatgatgatgtacaccttgctgcttctttgtttgaaggcttaatgcttcattttgataatcgcagttcttatttacaaagagtacctcagcagtcatttgaatgtcagcttctgactcatcaagactataagtcttactgtaagatgtctgaagttaattggtgaaagtcataggagtgtgccttcctataacgatataagcgcctcgcttattaggtcttgagtctgcccaactattacagttagtttgtacattatacgctaagtgtcttctcaatcgttatgcatcgcttttgtcttcccaggtgtaacgaagttgatatctcgttttatgcatccaataacgtatggtttctcattaatacactaggcaacaatttgtatatctttacctcgcataagaccttatagtcagcgagttaccattatactctgttacttacgcaattaatgagttattccattaaaagtgatttcatcgatctatattccccttatcttgacacgtgtcctctattgacatggtagtcgaattttgggtataacaattgncccttaaaaagttctttttaataattacagaggacatttttgtcataatcccttttggaaaaacacgtcctttgattttggcaattgtgcggtttcaagggtcattatgaaccgtcttttcatcttccgcttcactcccaaccgttggatttcccaatctttggccttcttattactagactttgagtataaaatggtggcttgagcttgtcatatttcacaaacttctggttatttggtgagtttcatcttgagattggattgtcattctctcgctaagatatcccatctgagttcataaacttatccctccaaatttataacaccagaatgcaccaaccacttttcttctctatatgttcccaagaactttaaacctcaatttgaattggaaatgaaggattccaaggctgaggagcttccgatcaatccaacccaaggaaacatcattgattgttatgggcaatcctcacaagagattttcgagggtaagtatcatcccttgtgaatggtggtttgagctggattatacatattattatttctttttgtgttgctccattgatcttttatctctgtctccacaggaatggacatacattttgagagcgagtttagaggtcctccttaggctgacaaggaatccaggaaggaggtagtcctagttggcgtggtcttggattctactaaagaacccgaccagcccaagacccaagcttgcacaagaaggcctttgtaccagccactctctggtattgagaaatttcctgaggctgggaatgaggtctcagctgcaggaaatgggatcttctgatgtggagaatgaggtctatgcagaggtcgagaccttttacgtgtagacggtctttctccgagctatgtgtagacagtctttctcgagctatgtgtagacggtctttctcgagttgatcaacctcccatgaataaccttgtattttttcttaggaaaatggcttaatggtttgccccttgttgcatttttgtaaagacaagtttgtaaatcgacttgagttttctcttatcataaatgccttgtacttttttcatttgaacttaatataattgcatttgcttgcgtttttaataacaatgtaaacaactatattttgatcaaatgtaaagtactttttgggtttttctattgctcataattttcctgtttaagtagttagttatctaccaaacttttgattttcgagcaattgcaaattccgcctcgtgatgacagttattatctgtcttaagcaaacttgaatatacttttaatgattttatcactttgtatatctttgattgctcttatgaatagttagattatctatccattttctaggtttaagtactttatcaagacgtcttgatgtctcgtttagtactttcctagctcgcgcgaaccgttaatattcagctttatacacgagttatgagttatatctcatttntaacttttgattttcctttcctgttagataggtttttaataaaaaaaattatagttgtttgatcccttcttcgtcaaaaaggtttgatcaggatgctataacaattcgacccctttctcgtcaaaaaggtttggttaggaagttataacagttcgacccctctttcgtcaaaaaggtttagttgagaacctttaaaaaattcaatttttttttttaattttttaagtggtgggtttgcattatatcatgtatttctagatgaat

SEQ ID NO: 123084 - DNA, 514 bp, Cannabis sativa
tcaattagaatataatttgcttagtcccaagtgtattcttgaatagaggttttactgtatttgtgcataatatatgcataaattagtatatattatatatggttgtgatttggtatatagtatacatgtttgtgaattggtatatatctatgaagaaaagaactcgtagtagatgtagctagtgctataagttcgtgcgtgtcatgctggctcgatctgtatttttttatgacattcaaaaatgagtcgtgtcatgccgtgccacaaaaaaatatgagtcatgctatgttgtgccaatatttttaaagggtaccggcatgacctgtaggcctagtattttcgtgctgtgctttgctcgtgccgacccatatttttttaaatagatcagcctattttcatactcaagcttaaattcatgtttactttttcatattttttttaccgttattaaattttatatatttcaaagctttagttatattcatataaattttgaataatattttatagataa

SEQ ID NO: 123085 - DNA, 1152 bp, Cannabis sativa
gaggtaatgaaatggaatcgatcgaatgaaaaggaataatcattttattccattcctttgtttgattgcattttaaagtattagaatgtcattctaatggaatgacaagggaaagaccattccacttcaagttgagaaaaatttaataattatttttatgcattcctatttctattcccattctcatccctattcctatgttttcattccttccaaccaaacatcacctaattgtttcttttgataaagactacaaagaggttaagctaataaggtgtaaaggaaaacacatcaaagattaatgataattagagatacactactcaaaagattagacaaactaaacaaatgccataccttttacctgtcataattttgaaaaaaccttaaatgacaatgctctgagtaactatattgctcctaccaaaacttcaacaatatcacaatcccaaacccaaaatttgatcttttctcaaaatttccaaacacttccactgaccaaaaactctctgaaaaaagtgttctatttctgttcataaacttaataaagtgatcacttcacttcttaacccaattattagttttacaaatcaaaatccacgaaatgtacatctacattgcaaattgttcaactcaactcatactatcatcactcgagacaatttagtcctccaagtggcacaaacaaacaaaaaagatcaacaatgctttgactaactacaattgcttctaccaaaacttcaacaataaatttttccacaatcacaatcacaatcccaaaatttgatcttttctcaaaatttccaaacactaaaggtgctctattaataaagtgagatcccagcactgttatctaattgcaaattgttcacaactcaactcatactatcatcactcaagacaatttagtcctccaagtggcacaaacaaacaaaacaaaataaaaaaaatcaacaaaattacatataaaaaagcatatcaaatcaaactgtatctatcttacaagaccgtacaatgccaattcactttacttcatcatcatcagtaatcaaatttcccagaaaaataacacaaacaaacaaatcaggttaaaccccaaaaccctgttttgatcaatttctcatttgatcaaaaacaatcaaaacaaaacct

SEQ ID NO: 123086 - DNA, 859 bp, Cannabis sativa
acttagcctaaaatatccttctatttctatacggagggggatcacgtcatacatagctgaaactctgccaagttcactctcgtgttcttcacaagaaacttagagtacagagttagggtttctcgcaaaaatattgtaaacacatcaaaaacatcttaagaagctcatagactaactcgtggactaagttaattaatacctgaatcacgtaaaaaatctccatctctttatttatgcgttttattgtttcgttagtgttcttaaatatttagtttctaaaaatctcaataaacatgtaattttgccgacaaaaattaatttgtgagttaagtgtcacaaaacctattgttcagatagttcaccgctaatatcctaacaaaaataattaaataaaaattctaggccaacttggtatcttttaaaagatgaactgagacacgaatatggtacaccaagctatacattgaaaaatgtgtattatgttttttttttcttattttaacaagaaaatatggttagattgtaattttgttgatatcaatgtttgtgctattaataataatataatgtccgatttgactattctattttaatgaattttcccttcttattaaaaaaaaaaaaagaaaaaagaaaaaaaaaataggtatatgttacatgacaataattttattttagggtttttttcataaatataaaaaaatgaggtagagtttacttttatatagcataaataaataatgcaaaaaatatgagattaaaaaataattaaagtttaaaatatgaaaaaaaataataaataaatttaataaaatttgtaatagtaagtttgccagaaaagttaccggcaccggaaaag

SEQ ID NO: 123087 - DNA, 2020 bp, Cannabis sativa
aaactttgacttgcgatcccgagctaacggcggcgagaaaagcggcgccgcttggggggttaggtcgccggcacttgggcttccgatttgtccggcgcatggggctggtcggaggccagaggtgggtcgccagggagtggtggttatggaggtttgtggtttccttgtttgtgtttgaagagagagaaaaggatatatagatagagagagacgttgggggacgaagagatctgttgatctgctactttttacttttttttatacatacatatatatattattatttaattattatttatatatatatacatatttgactaggtcaaaaccgagtctttacacatattatcgatctgatacttgaaaggcacccagattgataaattgtcaacctaggcgctaaagtgctcggggccccaggtgcttaaaaataaacttgctctgattcaaattttgatacctaaaatatgtcggtggtatatctagttgatgtcccaatgcttgttttgacttatttgcactaagatggttccaaaaactcaaatcctagtttggaatgtcaactcgggcaccaggtgaaaccctaggtgcctaggttgggttccaagttgcaagtttgtgtaattttagctcccaaggcttggattaggtttttccatgtcttcatggtacataatactgaaagatagtggattggattcaagctattaaagtctgaacttccatcctagagctcccgaagtcaacttgggcacaatgctaggctcccctcataggttgactgctatgactcgggtctactaaactctgtgatgccatccctcatgccatgttagatgtccacatcaccaggaaaagttttcgagttaacatttgtcccccaagtcaactttacacttgtgtggagttgacttgatgacgtgaaccgagcccgttttacttgaaacgactagatggaaattaattttgacattcttatgtaattgtatctattcttcaagcatttccaattgagttgatactttgagctcttttgcgtagtccttgggaattttgaaaactaattaacaaagaaaaagagaaaaaccttagcttttatcttttacttatcttttacatttttctttaaaaatttgatttttttttttatttttttcatggcattaggattaattggattgaaatcataatcctagtagtaaacgccattcaaaatttgaagaaaaaagacttttgatattttacttatcatttatcttttcttttaattctttaatttttcattaatcttaatagcattaggatttcatgttaccttttaaatttaaattcctattcctctttgtataggaatttcaaattatactaaataagagaagggaaaatatataactatatctttttcttgtcatttaccttccttaaaagttttaaatttaaaagacttccattagctttaggattaggagattgaactcacctataaataaaagagttgtcaatcaaaatttccacactttctcatttcattccacatgcccaagcctttagagagtctcttgaaatttcatcttcatcaagccttcgagcgttcttcattccaaggtagaaagaaacatttgttttcttagaattggtgtcattttttttttttttttgagaaatttcttcttctcctcctttgttgatcttactccaaagatttttagactcccaaaaatctttgaattatttttttttttctaaaacctccaaaatcccaaaacactttcttagtgccttgaaaatttccttcaaaattgcttgaaccttctcaacccaattagaccttacttgggttgtaagcaacttgtattgttgagttgtcatggctaggatgaagagaagtagaaagttgtttgatgagtatgaccttcatttgtctaagttcattagagctaagctaactgtgcataagtctaagaacttagacaaggcacgtgatgggaaggtgatggcaactgagcttcttaaagctgcc

SEQ ID NO: 123088 - DNA, 735 bp, Cannabis sativa
  modified_base (674)..(688): a, c, t, g, unknown or other
aagtacaataacgggacaaaatcatatccctaattttatattcacttacatatagtatatataatttttagacctctaaaaaggaccccttatcttttaatttcgatttattttttttatgagtgcatatactttttagctatttaagatcattaataaatttttaaattttaaataatatacagtaccgaaaataagatttaaacagttatttaccttaaaaaaatagttgtgcttgcaataaaatatgtaaattttattttcagcattacaaattatttttaattttaaaaaaaaattataaatggtactaaataactataacgtacacggtcatttaaaaaaaataaattaaaaagttgtcttatataccaaaacagattaagaatctgccgaaacacttctttaaagaaagacattgtatacttaccctatagtataaggataatttttacactcattttatttagagatatatagacctagctagtaatctattgatgatatatagtttagttatatgaatatatatatttatacctcataattgggaagcttgaaaattttgtgctcaaagtatgcacgagcagctgaaaatctagagagccttaccttcaccacaaatttatctccactctaacacaaaacactaaattaattattattattattannnnnnnnnnnnnnnttattattattattattaatagtaattattattatattaattaggta

SEQ ID NO: 123089 - DNA, 3245 bp, Cannabis sativa
tacacaactctttccaagattccatacttcgacttctcgatccttggagcagaggcggctgagatggctgaggcttttcgagctatgtcacccatgcagactcaaggtggtgggggaaatctttttctcgaggacgctgatgttgcgaatactgaagaagtcacagacaagggtgctagtaaagtcgcggatgaatccactactccaactgcccatattgctcctaatgcctagcttacttactttatgaatattttgttttattttcaaacttttttaagcggtacgcgggtactcgcaatatgtatttaaacaaatttatctttattgtctttaacattttgaacagcatatatcccttcggggatatttatttatgttatcgtattcgcagtacatgagtactcgcgtcttttgctatttcaattgcggttttatttacagcttggtgtaaaaaaagctaaggtaaaatgaacttttgttttaagctcgagaaaaagtttcaacttttatatagaataagttaatcaatagtacaaagtgagtgggctatataccccctatacttagaacatttatatagataaattggctaagtataaatacataacgagtacatatgatacacttcgagtactattgataataaaacttcaagcttttgccattccaggctctttggattgcagtaccattgaggtctgcaagtcgataagttgcgttaccaatcttctcagcgataaggtatggtgcttcccaattatctccgaaaaccccatgcgctgggtttttcgtattcggcatgacccttcaaagaaccaaatcccttactcgcagaattctctccttgaccttagagttgaaatactgcgcagttcggtgctgataagccgcatttttcaagtgagcctggtcgcgtttttcttctaaaaggtcaaggtggagcaattgtttttctttgttctggacaatgttgaaaacatcccttcgtagggaacctgtcccaacctcgactggtaccatagcttcgcatccataggagagcgagaaaggagtttcaccagtcgtggatcgagggtggtgttatacaaccacaaaaattgcgagagttcttctggccatacccccttgcgctcttcaagttttcctttgattgtatgtttgattatcttgttgacggcttctgtctgcccattgctctgtggataggcgactgccgaaaatgccttttcaatccctagctcatcacacaactgtcgcatttccttacaatcgaattgcttttcgttgtccgatatgagtttgtaagggatgtcaaattgacagattatggagttataaacaaactcgcgtagtttggctgctgtaatagttgcaagtgcctttgcttcaacccacttggtgaagtagtcaactgtgaccacggcgtatttggctctgccttttcctttgggtaactctcctattaggttgatgccccagaccgcgaagggccaaggactcgtaatggagtgcaagtgactcggaggttggttgacatatgtagctatacgctgacacttgtcgcgttttctggcaaagttgaaagcatcttgtcgcagtgtcgactaataatacccttgccgcatgatttttaaggcaagagaattaccgccagtatggtttccgcagataccactgtgcacttcatggaggatataatcgcactcctccccgtcaatgcatttgagtagcggttggctgaagcttctgcgataaagtcttccatcataaatgacatatcgagcagctcgatatcccagttttcttgcttctattttgccttcaggcaagacctcattttccaagtaattcactaccgaagtcatccatgtgactcctctagccatgcctatctccatcacttcgtctcgaatcaccgttgggtaagttagcatattgacaggaattacatcgagcaattcagcttctcttgttgaggccaagcgagccaaagcgtctgcgtgtgagttatgagcacgtggtattcgggagacaaccacctttttgaatttctgcaacaactcgcatgttatggcgaggtacttagccaaacgccctcctctggccagatattctccgtttatctggcatacgacaatctgggagtcgctataagcctgtaagcactcgatcttcatttatagggcgagctttaatcctgcgaccaaagcctcatattcggcttcattgttagatgcagaaaattcaaatcgtaaagcagcgtgcatcttaaaattactgagactgatgagtatgatgccgccaccggagccttcgctgttagaggctccatcgacgtataaagtccatccttcgccatttggtacatcagtatccattttttcttctacgagtgccattttcgtactcgggaactcaaagaataaaatctgctaaggtctgacccttaatcgcagatcttggtttgtacttggtcgaactgacttagctctaccgaccatttcaacaaccttcccaatgcttttggtttggctaaaacttgtctcaaagggtaattcgtcaaaacttcaatgctatgggcctagaattaaggtcgcaactttcttgacgctactaccaaggcaaacgccagtttctccatttgagggtatcgagtctcagcatctagcaaacgtttactgacatagtacaccgggtattgcctaccttggtcctcgtggattagtactgagctaatcgcatatttggataccgccaagtaaatggataaaacttcatcaggcattggttttgacaggattgggggctgccccaaatgtgtttttaatgcttggaaagcttcttcgcattttttggtccattggaacttcttattgccttttaagatttgaaaaaattatttgcatttattagaggatcgtgatatgaaacgtattagagcgacgactttacctgtcacactttggacttcttttggcttagttggagatcgcatttctactaatgctttaatcttcacagggtttgccttaattcctcgctgattcaccataaactcgaggaacttccctgagccgaccccaaagacacacttaagagggttgagccgcattttgtatcgtcgcaatattttgaacatcgcttgtaaatggttgacatggtcttttgcatgttgagattttatgagcatatcatcaacatacacttccatggtgtccccaatcaaatctgcgaacatcata

SEQ ID NO: 123090 - DNA, 1686 bp, Cannabis sativa
catgggacaaaactactcccggaagtttagacaataaagctatgacattctcaagtagcacacctagctcattaaagaacactcttttttttgttaatatagctgtgactagagacaacaaatatgaaaaacctctttaattggaattccgcatgaaagagctcaattaagtccaatcaaaagtgccaacgtctctgcttgtaaaattgaatattacctaaaaacacaataaaaccaaaaaacaccacaataacaagatataagtaaaaactttaaacaaaactcaacaaagaaaaacgaaacccaaactaaaaatatgaaaacaagaaaacaaagaaaaaaacaaagaaaaaattagccaaaggatttggctagtgaaagaaaccataaaaactcaatacagaaaacattttcctcaagtgaaacacttaagaataaggaaaactcagtattttggttttcaagtaagttttataatttcaagttagaagtaaaaaatattaaaaagaaaaaaacatttgaagcttgtggtaaccattatcatcatcatcatcatcatcaataacatagaaagttttgttggtgagacgggtgatttcctgccgagcgttgttctattgtttaatcgcgacctcgcattgggctagtgacttttgaacctcgccctccaggtatttgagccgctccaggagtcgccaatcggaagaaaaagagagggaagaagtctgaagaattacaagcaaatcaatataagaaacatggagaaaaaaaaaagaaagaaaaaataatatagattaatacaacaaatttaccatgagggcataatgcaagttccacgaaagcgtctcttcttgatccccaagattgattagatcccaatcgtggggaaggagagccttgagttggcgccagcaggcagtcctaaacacctgagcaaattcagaaccagccttccccgcggcggcagacaaagttttaatggcctagctcgaggaggcaaaggcgtgagttgtatcaagaggaggtgctttggtgttgctcggagacctcaaggtcaatgggctcggacactaccttctttttatgggcagtggttttctttcgcctttcagaaggctccacctcggtatctgtaggaactcctgaatcagttcccctttccttccctttccggtccataacatcttcaaaacgcatgtctgtgaggcaaaataaagtgttaaattatttaaagacaagtgaaagggaagcgttgagtgtaattttccacctaagaaatttaccaaaaccactagaaaggcgagctatcactagaatagggggtagaagggccgtagtatccactaaaatccctacaacttgtgatcttgaatatatcaaatggctcaattggttctaaatcccagcttgcatctatatggcttaccctatctgtcatggtgccatattgctcggctataccataatatgactcgttacagttaatctggacgtggaatctagggtaccagctgtcacacctatgagcaattcggtctacgagaagggatttccaaatatgaaaattaaggcagctatcttaaaaagtaactaatgtgttacgttcatccctaagtattgtgggtgaccaaccacattgattacctcgggatgctccttcaccgacttcccgagggactgtgtttt

SEQ ID NO: 123091 - DNA, 1559 bp, Cannabis sativa
caaaacaaggtccacgaaacgagtagcaaagcccattctctccatcatagctttaagaaaaccccattcaactctgtcataggctttgcttaggtccaatgtcaaagctttaatataaaaaataatttattattttatattaaatgtgattattatataatataaattatttttttaacattacatttcaaatttaaattaattatacatatctaaaatatatttttttattatttttttttatctaattcacatatcttagaaaaaatatctttctattattatttttttttaaaaaaaaaacaataaaattgaaaaagtgtttatgtttcttgaaaagtcaccattataacgtcgttacattttgtaattacaaaaaaacaattattattttttctaaaatgtttctataataatgaaattaaaaagtattgcagttaaactaaaattataattaataacaaattttgaatactattattttttttataaatatcacttaaaatacattttttaataaaaatattattaatttattaaataatatcttaaaaaactaattatataactaaaaatatacataaccaaactaattaataatataactaaatatatatgtgcattttacgtaatattaatctagtatatgtattatattaaatgtaaatatttaacaaaagtatatatcatgtttttttttaaaacattacaattcaaatttcaacccactacacattttttttttatcttttatcttatattaaatgtgtttatataacataatttttttaatattgcaattcaaatttaaataaacacatatttaaaagaatatatatatatctttctattatcatttttttcaccaaataattatatttctggtattattttaaaaaaaataatatatatatatataatattttaaaaacattaaaagtattataaaattgaaaatattacaataattaaactaaaattataattaacataaattttgaatattatatttttttttatataaataatacttaaattaaataatttttaataaataaatttatctattaaataatataataaaaaaaaaaactaatcgtataactaaaaatatttgctaataatatttactatatttatacacgatgtgcttgacacatcttaaggtggcctctctaacatttatgtaattcctatatatacgtgtttgtttatatatagaaatcaatatattatatacccacccagacatgatcccctaatcataataaggttacatgagatagtgatgggtactgtggatcgatcgcataataactttttgtcattgtaaagtagaaacattgaattgtactttcatgggctacgatcaagtaaggatgatcgtatcactccagccgagataaagatcaaaataaaagtaaaatgtgatcattctaaatggaaaatttgaaacttttgccaacttttctaattttcctaaactacccctcacatttcaaacaatcatcctctctcttcctcttgctcagccaaaccgtcccccacgatacccatct

SEQ ID NO: 123092 - DNA, 3914 bp, Cannabis sativa
  modified_base (1219)..(1224): a, c, t, g, unknown or other
  modified_base (1366)..(1381): a, c, t, g, unknown or other
agagtgacttcccctcttgttgggatcacaccaggcgtacaagagactggaaacaccaattcaccaaccgatcaatccactcccaacattgaggtcccgtctaccactaatgattagaggccagttggagatgacactgaaatccagaacctccgagcagcccttgggcttatgcaaggtcataataacactttgcaccatgatcacgagaatctcaatgcagacataaaccttgcatttaacaaacagagacgtcaatttatagaatggatgattagtagatggaaaccctgagggcgaagcaggcggccattgatgatcgcactaggtaggccatcgtactaataagaaggtcctaccgagtcatcaatcaacaaccggctactgcatccagtattcccttaggcgggtcaaaaggatatgcagctgggcataccgcacaaacccacaccaattcaagccttttaccttcaaaattgtgtttgaactgaaacatagagagagggagagaaagagggcggttgggaatgaaagaatccaaaaaaatgggtttatttggctgaaacattttgttgaaaaaaaataattaattagtcaaaaagactaaaatgcccataaggcccataggttaccatacacatataaaaaaagtaattttgacattatgctcaaacacacatatcacattaatcacgttttctcatttattaaaaaattaccataaataaatcctagaaatgtattttaggccccgacccggttcgacccaaaatattcagttgtgactataccgcaccgacttgctagaaaatacctacagacagacagaataaatatactatataataatatagtccataagcatggtgtatcacgaaattacgattttacccttctcaggtcaaaattacgaaaatacacctgacacaccaacaggatcttaaaatgcaatatatcataatagtttcacatattaaattatataataaaataatttctattaatacataattaacctagttatggttgctaatctggttattaaaccttagggtattacaagataattcttacaaacttatattttggaagcttaataacatgagtggtcgggaacatgctatacaatagtggaatttaacctttcctaacaaattgagtattagttcctttatagtattaattctgagagtgctaatagttggatccaaatctatannnnnntatagattaattgttcatattgaattaatggtacataaggagtaaagagataattagaatggtaaaatagtaattttgatcaactctaattatgaactaataattggagggagagccgcttatattgattatatcaatggannnnnnnnnnnnnnnntgtaaatataattctatattgtcaaagagtgcaattccatatttatattagagtaataatggaattaataaatcagattattctattgatgagatcgataataatcaagtatttattggagcttcgaaatataagtccatggtccccggattacctctatacaacactgtacaagggaaggttttatttgataagtaaattttgagtgagaatcaatttgtatgggaaataaattcctaaaggtaaaatagtaatttgtgaaatgtattgttttgattaattatgacaattatgaattatataattaatagtatttaggggttttctcatttataattttataattattttttttattcatttataaaaatggaatgaacataacatcgaaatagaaacaacttttataaaattgaaacagtataacctcgaaatgaaaacaacataaccttaaaataaaaatagcttttataaaaatgaaaaaaaaaatggtgctctttattttaatttatgcatttaacaattattgttatatatatttttattattttttattttatcttttttatctttatatataaactggagttatttagtagacatagttggattaacagttcttatttaaaaaaaaaatataattaaaaaaaagataatttcattaatattaacttaaaaataataattgtaatttattaaatttttgtaatcatatttattttgttcttttcttaaataaaattatataccatattgattttatacaaaattgaagcactaataaaatttagggggaattactccatatactatatttttaactttttttttttcaaatttacggtttgagtttttaaagtggtttctctggtggtttctatgtgggttgctatacgattttttgttgcgatttaggttgcaataggggtttctaagtagaattccgtaaaaatgcaaaaaaaaaaaaactgttttaaagtgtaaatataaaaaaataaaaaaaaaaccctaaaatttatcaattaataaatatattttgaaataaatataaatatatattcaataaattattttgttaagtattataaaagtagaatgaatattatacgtttctataaattataatattaccatgtatattgcattttttttaattttttcttttacttttacatttttttttatttttataaaagtataaaaatttgtttctattttaagtgcaggaattttattcccaatttgccctatacacaacaatagattgatcaatataccaatgtcaatttggacctttttaccctagtcaaactcactgttgaccccagaaatgaaagcccaaacgacaaccccattaaagttatactacaggtcgtttattcacactagaaaccctaaaatttaatcagacatatatatatatatttcttttgtctcttttatcatcaacaaccccaactaataaaccctagcagaggttgttcttcgtagttcttcactgaagaacacgaatacagcagccacaaaagcacaacaaatcaaactcaaaaaatcaagacaacctgattaatcacccttccctgatcataaacaaaacccagaaaacaatcccttaaaccgagcctttcccaagacgattcaacaacccagaaatcacataaacatacacgaataaacaaaatatagaaaattgcagaaaaataaaaggaagagataacatcgattttatagaggttccccaaaatcgtgttgggtacgtcttcttcgagctcccctcgttcactatggatcttcaatgatcaaatgattacaatgggtttggattccaaaacacacaggtatttattttggtaatgcaaatattttacagtgattttctcctctttttctctcttttttttctctctaaatcagcactaacaatgttgtgtttcttctcttcttttgcatgaacaacatcctctggccatggatatccgaaccaccaccttggttccaaagcttactccattgtaagcctcctccaagaacccctaaatcactcagtttctcctctttgaaaactgatatgatttttgtggtgtattttcccgcctttgatttttttttttatgttgttactgtactgatctggtatttatgttcagtctccttgttttttttcctattggtttatatatgttgttgtattagagcacaaagagaggagaattagttacaaagtattactaaactttttttgtaactaactttaactgcttgttgtctaggtggtaaatagaggctgaaggccacataagtctttttactgcttgtaatttctgtgtatttgtaatctgagcagtgtacaataatatggggatttatttcaaaaatttctacctaaatccccatatgaactatacactgttgtatttgttgttgtctgaatctatctgagggtcttagctcgaacccattaagggttttaccaacctgtgtcaatccccaataagcttaagcaaagcttaaacttattgagggacacaacctt

SEQ ID NO: 123093 - DNA, 1662 bp, Cannabis sativa
  modified_base (258)..(273): a, c, t, g, unknown or other
aaagagtacatgcccacacatagcaaatcatgtactcaatcatagtgtgtaagactgtgaagaatccaaacacctgaaggagaatcgggcctagatcttgataataatctacgacagaaaggaacaagagttagagatctgagtggaaagagacatttaattcggctgcagtcaatgtaaggtttcttgaactttatacgtgtttaaattctattattttagaagattcatatctaggatgttaaacaacatacatgnnnnnnnnnnnnnnnnctggtaaaataatccccaacagattgtacatgtcaagacaacgcgacctcgagtgttcagtctcaagacaacttgggttgtattttgtagtcgttgtgcgacatgttgtaaaagtaatttgataaagattgtaaaagtttaaatatgggatcccggtttatgtaaatatatatgtttataaagtttaatattttaaatcaaaaatttaatttggcacaatgtttaaggaaaatcctttggttagcaaaggtggtacgttaattagaaaatcactatagcgtgcctaagtatctaggcgttacattggccaacatacatgaaccaaaacttgaggtaagaaaagtatatatgtatcacataaaatgttaaggtacgattatcatcattacgactcaattatgatcgtggtgatgaaatggtgattactattaaagtgggttaaagttatgattgtcttattagacaatgactgagaaatgtaggcttgcctaattaggcaatgcaatatatggatgccaagctataacataggcttgcctaattaggcaatgcgatatatggatgctaggctatggcatgagctttcctgattaggcaataggatatatgaatactagggagtggtattcgggttgttcctgtgagacaaccgtgataagtcatgactataaactgaaactgtagttaggttttttacttgtcgattatcttgtttaggtagcaatagtgacatatgggtgccaggctatggcatgggctcacttgattaggtgatgcgatatgttggtgacaagatagggcacaggctagtctgaccagacaatgcaacacatgggtgccaggctatgacacgggctcacctgattaggtaatgcaatatattggtgccaggatagggcacatgctcgtctgattaggtgatgcgatacatgggtgccaggtttttgcatgggcttgcctaattaggtgatgcgatatattggtgccaagatagggcatgggctcgtctgattaggcgatgcgacacatgggtgccagactatgacacaggctcacctgattaggtgatgcaatatattggtgccaagataaggcacatgcttatctgattaggcgatgcgatacatgggtgccaagttttggcatgggctcacctgattaggtgatgcgatgatgcgatatatgggtgtcaaattatgacacgggcttgcttgatgaggcaatgcaatatatggttcttttttacttccatgtatacggttggttatattatacactcttttgaatgttattatttaattaaattatattagtgaaatggataactaattattacatgtattctcctttattacttttcttgctgagtccttgtgactcactggtgct

SEQ ID NO: 123094 - DNA, 1271 bp, Cannabis sativa
tctcactctaacttcactctccattgtgttgtgtctctcttgttattcttctttctattcccctttgaaatgagataagtagttctctttatatataggccaaaagacccaatttacaattgctgtcatatttgacaattaagttagttaataaataactaactaactgaatattgattggggatttaaggaataataccacaaaatttatagaggttcccggaaatttaggtacttcctcttttgagcccgcctgagaagtatggttcaattccactatgaatcttcaagattaacaagttacaattattgattccaagtcacacgtaaatggctggtaatcctctttattacaataacatttctctgtgtttatctctctttttctctttaattgttttcttttcttgtgtgtatgtcttcttctcccttaggtctccgagccctaaattccaggctccaccacatagctaagtctctcttctacgatctaattctgtttttgttgtagatttaggtatatatagctttggtaaggtgttaggtgagctggagttagttgcaacaatctttaatcttgcaactaacttcagccttgtgagtgagagagttaaatcccacgtgccatgtaatttttatttttgtaatttattttacccttattgtaattttgtatatgttgatttggacagtacatatggagatttactccaatagtacatctaacaacgcatcagaatgatagatattcctcctaagtaagtacaatttttttaaacctgctaataggaattactattaagcatgcaaggaatttttcttctattgtatcttcctttgttctttcgtgctacatgctgttctttgagagatgaatggaactttgtgaatcacaatataatacaacttgtctttgtaataattaaggttgtgtttggtttacttgaatggacaatagaatggacttgtcattccttaagagggcccaataaagtatttggtttctttattaaagcttgaaagtctattccaatggaattacaaatcacttaaactagggatttaattttccattataaaatcagtagaaagctaattccttactaacaaaagtccattttgctctatcaattcttctccaagaagttactttctcatcctttttttttttcgagcatttcttcttcttccttcttcttgacacgtgattgtgattgttgttctaataatcataggcggacccacattgtagcgagggggggcagtcgccc

SEQ ID NO: 123095 - DNA, 3586 bp, Cannabis sativa
  modified_base (3150)..(3154): a, c, t, g, unknown or other
  modified_base (3514)..(3527): a, c, t, g, unknown or other
gagagagagagagagagaagacttgaagatgattttttggagatctttttattgcaatattaagtgtaatatgggtgtatagaatagctcatccaaagcttattcgtagccaaagagtgaaacaagaaataggaaagtagattattttccttataattagtgaatcaaatgaattagaaaataaaagaatttggattttgctcttcacttgtttgaagcacgttggactcaaaaagcttttcctttttatttttaccataatgaattcacttcttgtatttaaatactaattttaatttaataatcaccaaattaataaataaaaacataattcaagtttttttaatatcttgaaaataaaatatcactactaataaaatttccctgtatttatttctcttcttttacttctctattttctctaagtttgaaaattctcataattaataaagtcaataatgtgaatcctaattgattaataataaatcaattattgagacttaatacatgatatttatcccagatactgcaggaaccatagactcataaactctaagctcccaataagatagatttgaaatttaacaaataaatttctaaacttattaactcctcatgactgcactataaactcaaaattacactcttaattttacggaacgctctatatacctaatatgtatgttattagttattcattgtttcttcaatgattctctatagatggtttacaccaagtagggactaaaattaccattttacccttttaatatattttattcttacaacacttaattaatataagggtaatttacagttaaactccctgaactttaaagtttgcacagtcaaatccctagactggaaaaattatggctaaactccccaacctccacaattattttggtcagcactccttccgttagtttttggctattaagtgtcaaatagacctactattatgtacataagtgtacccatgacgaaatattattggaccacttaataataatattaataattaaaaaataaattaaaaaaaaataaaaaaattaagaaaaaattaaaaataatatttttttttctcttttttcttttcttctttctttccttttttctcttttttctttttcttcgttttgcttcttcttcttcacactacccagaaaaccacccccaaaaaaacccaccacccaccaacccccaccctaaaatccacaccactctagaaagatcgagaaaacatcaccattgcctcaagcccccacccaaaccaccaccaccaccacctcaacctatatttcatatccaagtcataccaaaaaaataaaaaccacatcaaagaataaaccatatacaaaactaaataaaaaaaaaaaaaaagaaaaaaacacaccaaagaataaaccatcaacaaaaaccacagcataaatctcaaatctaggttgtgagttgcgagtttatagagaaaggcttgagggtggttcaaatttgattgttgtcgacaatgagagcgagagagactgagatgatgagaccaactgtggtctcagatcctttcgacggtgaacggaaagagagtcgtgcaagagggagagggccagacgagtttcggggctatcagcattttggggttctcggggcttttggggctcttggactagagaatcgtgcaggtgggttttttttaggtgtagcgtgaagaagaagaagaagaagcataaagaagaaaaagaaaaggacaaaaaagttattttttaaaatttttaattattttttttattttttaattttttaattattaatattaggtggactaataaaaatttatcacgtgtaacttttgtataccgtggcaatccactttggtatttaacagaccaaaatggacggaaggagtgctaaccaaaatgattgtggaagttggggagtttagctataatttttccaatttaggggttttgaccgtgccaaacttcaaaatttagggagtttggccacaaattacccttaatataaatgatagttcattaaactaattatactgaaataggcactacatcatttatcaattaataaactaaaaagaaactaccatttcacttctaacaataaaaagctatagatgttcaaatctataattaacactcccactcaattataatgtcgagttttgaaaatgcaagtattagctacaccatatggtaatcttgtaacgaactaattaaagaactcaaaataacagaactagcttaaagtttaatcatgtcaggattcagatctaataaatctatgataaatcaagtaatattgtcttagaatagttactacagtaaattatgataattattctatttgtcaagatcggtcccgtctcgatgtaaaccctatacatccaattacaaatttatttgttgaatgcctttgaaaagacacaccacttaccaaaagtgtaaataaaccttattgctgattatcacgtcagtgtaaatccagtgcacaaatgaatcatgactttaaatattcgagacatagaattatacttattttttagtgatggcaaaactataattatgaataactatatgttctgaatttaatagaatttaattattaagaataattagtaattttttcccctaaattttcgacaatactgatttggccccctaaaatatacagcttgttaagaataccccctgaacttttacatttacaaaaatttagtcattctgttaggttccgtcctagtattctgtttaaatgctgacgtgtctttgtaaattagcaactttaccccctaaactttgacaattatcaaatcataccccttcaaaataaaaataagaaagatttaatatttttttagtaaaacttaaaaaattaatttagatcttaaaaaaatcattttgaatgattaagaaaattaaaaaagaaattaaatttttaaatctaattaagcgatttaaaaattatttattttttattaaaaaaatcatctagatattaaaattttaatttttgtaaaaattaaattttacgggaacaaatttgagtctattttattttttttcaaaaaatataaatttatttaagtaaacataacctttttttagtttaatttctaacttttttttcaaaataattttnnnnntttattaaatgtttaattatttttctttatttgttaagatatgagtttataaatataaataagtttgattttttctttaaaaaatcttaatttatttaaattattcattagattctcaataattttagtttaattttttaagatgtgtttataaataaaataaaatttaaaaatatttttttaagaataatttaaattttttaagtaaaattaatatttttatcaagttttttaattttttattatttttttagaattaatagaatattataattttaaaattaatttttttaataaaaaagaacaaaattttgtaatggtcaaagttcagaaaataaaaagggaaattatagtaaatgnnnnnnnnnnnnnngagtatgttagtttatgtcctcttttcaaaaaaaatatagcaaatggccctaaatcata

SEQ ID NO: 123096 - DNA, 2388 bp, Cannabis sativa
cttgtccattttgagattatgaaccaacaaaaacctgtgatatcaaaaattttaaataagagtctaaaatttgactgaaccaacctaaaagagagcagcctcaaacaaaagaaagtttcaacaaggataacaaatacaaaataaaaaatcatcatagacaaagtaaaaaggttaataatcaatagccaaactaacaaaaacataaaatagtttatattaaaacaaaaactctttctatttggccaaaatcttaccaatggaaactttgcaaaagccttagtagaactattaatccaaaagtacttttctaagattattagcataaaatctcaaaccatatatcaaaatgcaaaacgagttggtttttgaaaacaattgccaataaatcctttaaatttagtaagagttgatatagcctgaaaaaattaaaaaaaaaatacaataaatattatcatattgtctaaccttataaaaagtttgtgtttgtttcagttttgaaacacgtagaaaccagttacaatttttatctacacaagtaaccatgtattcttttggttatgatcttttagttctaatttggatgtgtaccatagcataaaaacttattgcaatttttaaaatatttttatcactgtatatttttccttattcgatgtcaaataccatataatttgtgataatttctatttcttcatccttttttctttttttgttttgcttcatttgttttctctataacaaaattagcaacttctccagctatttagaacatgtttggagagctttgtacctaattgttctcagtggaatcttctccttcataatgatattgattattgaattgcttgttatgtatctgtaacccattcttcaacaatcttgtttgtatttgtattagttgtgcaacaacatagttgtctcttgtattgttgtgatataaagtggagaattagttactcttacctgtatctttttgagctcaatgtagaacttgagggagttgtcacttagtagcttcatcggtgttgtttctagctagtgatatctggtagcatacactacaaactgaattttctcgactttttaaacagtcaagtaaagtattctcgtcggtttctaagaccgacgtctattcgattgtcagtaaaactaggtagaataggccatggcaaaaaaccgtcaagaaaattttttcccaactatgcaaaaccgttggatatactaagtactatagctgactatttaaaaccataaggtatgcctttatatatatatataaaaaaaaaaaaagataattaaacaaatacatatatagctactacccaacagtggttttaatagctcaaaacaagcctgaaaccttgacaatagttactgtcaaagctcgtcgaagctccactgcgcaagttggttgtcaaccatatcaatgaccattcatgtaatgtcgacgttaggttctgaaagatctctcatagtagatctcgtttctgaaaattatttagcaaaacgagacttgaagcaaataaaatggggccatggagcttcaactctgaagagtggctcgtgactggaggacagcagcgcacaggctcaagatcacagggttggaggttttgagtcactctgagttcaactgcggcctccatttttgccaacggtggccagaaatatctcattagcttagggctgggtttcatcgcgaagtagtggttgagttctgtggtggtatgtcatgctgtgagtgagattgagaatgagaaaacaaatttgagagagctcaggactgtgattgggttccatggtggtggtggtggatttctgttttagggtttgaagatgaaagggagagagagatttgaaatatgtttgaacaaaatgattttttttttggatttttatatatttaacttgttattttcgacggtttaaaatctttggggatactattttaactcagttttgaattttaaaattatgactgttttgtacaatcggagattctaaacggctgtttaaaacgattgggatagtggagtatttttgacggttttaaacagtcacgtagctttattaacgacggtcctcaaaaaaattcgttttgaggaccgacgagaataagcctttttgtagtactgatatctcaatattgttttcgttgtattttatctcagtttttatcaactcaactaggttatttagtgaagaattggttgagattagtatttgagttgttgcatgtgtagtcctcataactattattgtgtgtccattggctattcatactttaatattggtttccattcctgcattttacattgaaaagtaaggttagcattttatcttattgcggatgaaagaaaaacaaactaaaagtcttattgattgaat

SEQ ID NO: 123097 - DNA, 777 bp, Cannabis sativa
  modified_base (654)..(658): a, c, t, g, unknown or other
tttcgtgtttattttttagaaaactgtaaaaatatatataaaaaaaacattctttaaacgtaaaaatgtaattattttataaaaaatagtgcattatgtaattattcttttcttttataattacacaaaatattattcttttgaaaaaaaaaattacgttgaattttttttttgtttgtaaattttcttaaggtatttcataaaaataataaaaaaattacataaaaataaagtagataaatgatgaagttaataccctagtttatatccatcaaataaataatatagtcttcttcttcgtgaagcttcctacaaacccgttctgttgctttctaggtgtatacattttaccttctacttgccacttgttatttgctctttcattcaaatctttctgacaaaccgtgttgttttctcttaatcgttcgttttttgtctttctcatttatggctcccaaccatcctataataaatgccctaatcagggtcgggcctgacttttagtgggccacagaaaaaaaaaaatagtttgggcccttatttagaaaaaaatatggtatttttcaaaattagtaaaaaaaatagtataattttaaaaggtaaatatttttttttgggcccctgagataggtgggccctaggcacaggcctagnnnnnctatgcccagggccgggcctggccctaatgtcatccaaaattcccatgattaccaccctaatctttcaatctcagatgttattcaatacactctctttctctctctctctctctatctc

SEQ ID NO: 123098 - DNA, 1620 bp, Cannabis sativa
ataactaatcagattgtaaagaattttatttagggcataaaacccaacagtcttaggcagacactttgtgaggctctccgcccaagcattgatgtcatgatacgtgtcacccaaaaaaatataccacgtcattcgaacaaaattcaggatgacactaaataaatataataactagtaactacttacaatgatgttcttgaagtctcttagaaatcaaaactaaagtcactcaatatatccacaattaagtataaacaaacacaaattaaattaattacataattattaaaatatagttactaagactttctcaatattaatatattagaacatttttaaaaactaattaatcactcttctaaataaaaatgtgtgtaaaatttctcaatatcaatatttatctacatgtttcaagctaaaaaatacaccaacacatgacatagtactcaaatattactattaattttggtataaataaaaaaaacaaaaaaaaaaaattaacaaaatttcaattaacaaattttattaaaaaaaaaattagcaaaaaatatgcagctacctatttcaagattaaaactaacttttaaaatccacaacaatacccatagaactctaatgttactatttaactcacattaaataaaaaaacccatatatatatttatatcacaatcaacaaattttattaaaaaaaatttaacaaacaatatttatctacctatttcaagtttaatacctaacaaaataatcatagtatagtaaaaaataaacttacctttattatttcatatagaaagttttttttttcatcctaataaaaaaaaaaaaaaactatttttattgatgtatttaagtttttaatatgaaaaatagaagaaaaataaagagtttgagcacaaaaaaaaaaaaaaacacacaaaaataaagagcacaaatcagagagcatacctgaaaaatgagttctgctgtaggataaggagataaacactagtgtcttttgcgtttagggttcgcaagcaggctaggtaatttatttgcttactgaagaatttttatcctaatttgtatgaaaaaagtgggataaaatgattgttactaagtctcgtttggtgcaaagaagaggtaaatgattgaaattgtatttttttagaaccaaccaaacaaggcccttgttctaaagtgggataaaatgtcaatatttggttggtcattaaaaaactcatcttgaactcattttttgttgtataattttttaaggctgaaccaaacataacccttgtccttaaaatgtatctattttcatctcttaagtgctaataaaaaagtgtttattccaatatatttttcatcccatttttttatttttctcaaatataaaaagtgggataaaaatctatttcttgtagtgattcaaaacacactattcaattgcatcattaataattatttcaaagattcttagttgtatttatatgaatacaatattattaataaatataaaatatttacttcacgaaatatttgcacaaatctataacgatattatattattttttattatcatcaaagaatatcttgatatattaaaagtgcatatctaacggcatttcttggtttaac

SEQ ID NO: 123099 - DNA, 612 bp, Cannabis sativa
ttaattgtatcactttcaaataatatagaaaaaaactaacataaaatttagtatacgtgcctcgcacataatttttgctagtatatatatatatatacacgtaaactataaaatgaaagagaagagaaaaaattcatattaaattagctcttatataatattaatattattattattatacctatacataaaagagaagctcatataagctctatacttattagctaataagccacactgattgagctaaaacatatttagagaagctcatgtaatgtgatgtgcatatgtagattttttttttttatttttttattttagagattttagctaaatttacgaagattcaggagctgtaggagtgctcttattactcgatctatcgacactaaatacgtatagagcttacatgatcaagttcagagcaaaaaaaaatttaatctaatttaatctaatccaactcgcaaagtgtggatatccgcccatgtgtaaattgaatattaaaatagaaaatctaaaatttacacttatatgaattgaatatcgtaactaatctaatcaaatctacacatttatatatatactaggtgattgttacgtgccaagccacgt

SEQ ID NO: 123100 - DNA, 588 bp, Cannabis sativa
actgtagcgtgccttagcattagggcgttacaagaaacatctattctcctggcaagatggaatgatacatgtataaattctacaaagaagtgtgaatcattattcttattattattattaccgtaaatgaggccatgattttgtagatattcattttattgttttgtttatgtgatcttttgattatttttatagtttgggtagtttggatttatgaataatatgttacgtatcatcaacatcatattttagtgtataaagtgattaattaattttacagatttgatgctatcatcaattggcgtagagtattgatacaaattttagacacatctttgttgagatacagggcaattcttgatgtttgcttagtgtttgacatcagcctataaatgaagatcatcttaatttaaaggttggattgtgtgacaatcagtagtcccgtgatccgtaagggaaaatatcgagtaatttgtgtaatgtcacaccgcctaggaaaggtcaagtaggatgattctgagactgtgtagctatgagactacacagttgaagatggcttaaatagattgattggtactgcctatatca

SEQ ID NO: 123101 - DNA, 1086 bp, Cannabis sativa
  modified_base (460)..(471): a, c, t, g, unknown or other
attaagacttaattcaatataaaatatgatcaattaaagaaaaatagtatgaattaatttgtgtgtgaatagtaagaaaatacaaaaatgaaaaaaaagaaatagaataagtgtctttattttttaagaaaataataaaataaaattttataagagagtgaaaaaatgtaaaaataaatataaaaatgcacacttatcaatatatatatataaaggaaaataataagacggtgacatgccacttcaaagataaaaaaagttagtgtgagaagagagagaaagagagttagaaaaaaagatgaaaaagaaaaatagagagagaagagaaaaaaaaagtcactcatccctatctgaaaaaaaaaaaaataacaaaaaaagaagtcaacgtaaaggaaaaaaaagtcatcaacaaaaaatcagttcatggtcctatttgtaccattttagaaaatatagggtnnnnnnnnnnnnttaacaaaatagatggtccaattagtaagttttacaaaacacaaagtctaaaatggtatttacccaagaaaaaaagattaaaaaagttttttcagtaaaaaaagataaataaaagttgagtttgacttaaatattttgtatatgaatatattttcgatataatgtaaaaagatatatattttttttaactaagtgcctattttttttttttgaaataaaatgccattatattaaaacagaaagtcaaaatacaataagcataagtggatgaggcatttcctccaactatgaacatttagtttccacggaaagagcgaatctagccaacaaatgagcagcatgattaaattaaacataaaagtttgaatattttttttattattcatcattaaccaaaatttaataatttaatatttttaaaattaatgtttatagttaaatttattcattaacctactatataaaaaaaaaattcatatatataattggtaaattataatcgaaaaagaattaatccaaatacactagaacctctatccaagaatacacttgggaccaagtaaattatattttaattgagaagttataacaaaatagagttacataagaaaaaaa

SEQ ID NO: 123102 - DNA, 514 bp, Cannabis sativa
aagaacattaggagtgcaattattgtgtatgacgtcgttgcgcattctccatatattgtccactacaagcgaggcataaagaaagacatcctccactcggataccccgtctattgaggctccaattgaacttcacccaatcccaaacccgaacaccagtgtcacgcactgggaagatcccccacggagaaaaacgccataagcgcatcgccacatcgcaggtaagaaacaaatgttccattgtttcctcacccacaccacacaacggaccactggtatcatcaatctgaagtcttcttttaatcactgctctaactgggagagcttgggaaaggatgcaccaccatagaaccttatggcgctccatgattttactattccaaagcttattccaaagagcaggggcaacagtgcactggggagctctccccaaagcctgggacagataagccaatttactagagaaccgcccattactttccaaggtccacatccaactatcttgacccgaaccg

SEQ ID NO: 123103 - DNA, 1155 bp, Cannabis sativa
aaaaaatcattgggtttatgccgcttacaaacccaaaactttgggtacttatgctgctatttaccctaatatatatgttgcattgtatatggaacgtactatttaaattaaactatttaatgatttacaataaacttattatgggatatttaatgattaggagttcattagcaatttattgtgattgttagagaaaccaattaaattgtgcaattgcttctcttacggtataaaataaaacaattatattattgtacaaattaggttattatgttattgattcaagttagtaattatatagttctgaaaaaaaaattactaataacataggtatttcatgggttaactatacttaattataaaattctttacattaattgaaaggatataagattagaagtaattttatgtataggtttgataagagtttttgccaggctttttaagggtttattcttgctcaaaaacactttacgtattacttggatcgttgagtgagcaactttattgtataacgttaaaaatgatgttgtttgatgcagacgatttttctcgtttattatttcacgtattatttacagtacctattctttatcctgagaacccctccaaatttgatattcctgaacacaatactatcaaaagatagtactattactgtaaaaaattataaaagttctataattttaggtgacatttggtaacacttttgtttttaaattttttaatgacaaaaataaaagtatttttttttttaaaaaatgtgttttataacattttttttttcaatttaaaaaacaaaacaaaagtatgttctgtaaattttatttttattttcatttgttgattttatctaaatcgtgcgaggccgggatcaggatccgggtccgggtccgagttataaggtctaggttggagtgggcattcaaagtattaataaaaaaaactgtttaaaaagattttaaaagtgttttttttttattattttcaaaaatttgaaaagggtaaataccattttagaccctgtgttttgcaagagttaccaattgagccctctattttgttaaatgacaaaatggaccctatatttttcaaaatggtaaaaataggatcctgagcttaatttttgacaacttttttttaatataaccaact

SEQ ID NO: 123104 - DNA, 1000 bp, Cannabis sativa
ataggggtggagaaatatttggtggatatgcagttcaaagatcattaagttgaacttcaaattgtatataaacttacctccccagaaattcaggttgcatattgataaaagtaataggtctattattagttactagcagctgcctaagtccttctagggaaaaaccctagtgatggaaaaatttcagaatgatggaatggttgtgtacttagtgtacaccattactagattcatggatgtcttgatcttgaacttaaggaaagctaaaaatgttaacttagttttacatgtttgatagctattctaaagtgattaagggtggaccatcctatggtttttgcatcaactgtttccaatcataagacaaaattttctcctagagcacgcagttgtgtctttttaggattcccccaaggtgtgaaagggtgtcgactttatgacatcaacaccaaacaattttttatctctagaaatgttttttttcatgaaaatatcttttcatttcacaaaattaatgaaagcactgctaatattgatcctttcaccactaatgttctaccttccaacaccatttttaacactcccattgatgattatccacatactactactaattctactagttctagttcttctatgcatagtatagatgagattgctacagacacagtgaccacactagctgcaacagaaggttcacaggaaatttccaatgaacaaccaaagccattcctagaagaacaactagacctactagaccacaagcttaccttcgaaactttgagtgttattcttccatacacgataattcgtctacccctcatgctctaaataaatatctttcttattcaagactaacagaatcttacaaagcttttattcttccagtcacttctttaaaggagccttaaatatacaaacaggccattcaattctaggcatgtcaaaaagatccacttagttggagcgggttagagctccgacccgacggatcacctct

SEQ ID NO: 123105 - DNA, 915 bp, Cannabis sativa
  modified_base (27)..(59): a, c, t, g, unknown or other
ttaactcttaataataataataataannnnnnnnnnnnnnnnnnnnnnnnnnnnnnnnntaataataataataattattattcttctaaaatgactaatatttatatttaaaaggataattttataattttactaatattttttttcatctttcaattttttggcttattatgcttaaatgtaaaacaagggtttttatatattccacccaattagaaataatatatttatacttttaattttttttctcttaaaaatatccttacatttcaaaaaaactttatctctctaactctctcacttcttgcattgaacctaactcagaactactgccatcgaacacacaaaccttaacctcggttgtaagctcctactgtcgtcttctctcgcagtctctctcgttttttgtatttttctttcttttggttttctagttttttgcaatatttagcgttgtatttgcaataataaatcatacgtgaggttaggaatgaagtttagcaatatttggtgatattttgcgtgtttagcaatgatattagcgatgtatttgtaacatgagacttataaatgcacaatacatcgctaatcattgtgaaaacttgagtgtaatttcacgacatttagtgatgtgtttagcgatattttgcgttatagcgacatttagcgatgttttatgacattgtcaaaaacttgaaaaaaaaaaacacaaaaaacgagcgagaagagaactccaacaatgggtaggtatttcggggatttctgggtggttgagctcatggatcttggggcttcggggtggagacaataagacttagagttagagagatgattttttttaaaatgtaaggatattttttgaaggaaaacatattaaaagtataagtattttatttctaattgggtggtataaac

SEQ ID NO: 123106 - DNA, 1153 bp, Cannabis sativa
gattttattaataagaagacatttaactatataatgtactgatcaatacatatcgttaataaacaaaatatttaaaccctactccacataattataacaagttaacaaaattaattaacataattaatactatacataaattgaatatttcaaagataaatatagtatgtattatggcaattagtttgcacctaattaataacttaatatccataacaactctataaatacacaaacatatatatatatataaaccctaattaataataagacaaagaaattaaaaaaaaaatatgagaaaactccatctagcactgtttgagttttttttcttcttcatagaagtgagaggggattggtcatttcgtccaaaaacacatgtatcgataactaacaatttaagaccagatctaactgatttggctgttcattgtaggtcaaagaacgatgatctgggaatccatatgatcccttttaatatgacatacgagatagtattttatccgagtttttttggtaatactctttatttttgtggtatgagatggcgcggtagtaaggatcattttttcaacatatatgaaagcgaaagagatgaacaaaattgtgacaagtgcaagcattatgattggaaaataaaccacatcgcgccttgtatgtatgatgaattaaccaaggattttgatatttgttatccatggaagcaaaaattaggtaggaagaaaaagaagaaattagaaggagaattattggtatattaactaaaatggttattattaattattaattagtcttgatgatgataattatcaagaatgatatcactaaaactttcttaataatagaaacaatgtagccagatatgatgatgatatcattttaatttgtgtatttttaatcatcaaaaattttgtataataatattaattaataccacccccattaatttcttctcttattctctctgatttttcgttctcatataattatttataatatttatatatatcttctataaatatatattctatatatggtttttggtaaatgtattgttggaactttttgaaaatgatcaattgttaaaaaagttattaaaaaatgtattaggtctaagatagaaattttgtatataatataaaatataataata

SEQ ID NO: 123107 - DNA, 2089 bp, Cannabis sativa
  modified_base (205)..(212): a, c, t, g, unknown or other
  modified_base (2036)..(2044): a, c, t, g, unknown or other
ccatcttcctctcggtccaggagataccagtcttaggtgatggaaccttgctgcaattgtgtcatattgcagagcgttcttaactcagtgaatgcttcaaaaaaacaaatgtgctgacttgttagatgaggcttgaaagaggattatcaagcttgcttcgaccatttaccaacaaaacaagctccagggtcaaggaagtgaccannnnnnnncggtggaagcatttctggaagctgtcaatgactacttcagaggtgaagcgagagtccctcgggtgattcatctcgattgaggtattgggaactcacaaagaaaataatcctcatgaagaaaccactcatcgtcctggaaaagagccaatgagtccccagggatctttcaatttatcatttgaacaaccacaagtttgaggaaaacccagaatctggggaccagacttgaagggcctagaatgaacagtggcagatttttcctaatttagttgatgaggatggtgcctataatccaacaaagtacataccaatcatcgaattagaaaatcgccatctcaggcgtcgattggaggaggcaaattggcataatgctgagttagagcatgaggcaactgcagccagggcagcacaagggaataacacctaaaatcaacctaactctggagagagagaattgtgaggcagactttgagactcccgaaccagggggcaggaggcagcccaaaggaatccccaaaacgctcagaaaagacaacctggagaaactaggggataccttgaaggcaggatgccaaatgatcaaccaggaaccagggaaccagaaattccttgtagaaacaagggaaatattgggacacaacctggggtgcatgggtcatcggtgaggaatcgtcaatgtcctccccaagctcataaggaaagagctcgcacaaatctcgatagggggaatgaaacgaaccatacctaagggagaagaacgaggcgggaagaggcgagtgtcgccacgacgcacacaataagccacagttgatcaatgcgacgaggagagaatactcgctgcaaccatgattaagaaggcataatacaatctatgagtagaatgagatccgccagccgtcatagccattcggacctacgagaacactttaactggaaaaaacctgatctttgccaacaactagttccaaagcaaggggattcaatccatttgcaaatagacaagttggagaataagctcaggaggcatcaagtcagagagcaaggaaaataattgggatttgattttgctacagaattcgagttaggagcgtctggatcaaagaggaaagacgattctaaggggtcgcccaaagataagaagcacatgaaacacgacaaatatgtacccgtttatgctatttataccgagcttaatgaaactcgggagagaatctacctcgcgtgtgaacacaaggtcacttttagcaaaccaaaagccccatgaggcacgcgagacgcaaaagggacccaacaagatactgtgaataccatggagatattgggcatacgacagaagaatgtcgtcagttgaaagatgagatagaaggcttcattgcgcgaggacacttccagcaatgtgtaaaggggcaggacaatgtccataaccagcctgatctacccgataacccaagcaaccaggaaccacaacctcccccggttggaggaagagataccccagttatctcgggaggataacatattgcaagaaaagaacaataacgcccaaaaggaggatactaaagaagttcgcccaacattaattaaactaggggcaattagtctggtcaagcaattatgtagaagtagtgcaaggtaattagatgccggctcgtgatggctgtcgtgtagagttatggcacagaaagccagtcgtcaaccaatggcagttcgagcagcaagacaaataaccaggaccagttcacctggagccgtggggatatggcagggattgaccttgaatatcaaaacccctatgggaattgttaggaattattttaccaggannnnnnnnnactaacaagtatgttggattaaaaacctaatatgaattctaaaac

SEQ ID NO: 123108 - DNA, 1642 bp, Cannabis sativa
atagaggtgatcattgtgaagggataattttagtgttgtggctgaagtcatttgtttaggtgcaagttttgagagatcacaagcaactagtgcactgccttgttaagtttgtcagttctcaacttgttgtctttgttacttttgtatatggtttaaataccatagaggagagagttgaattatggaaggaactctctaatatcacttgtcatggggctccttggctaatagtttgtgactttaatggggttttctgttatgatgataaaactggcaacagagcagtgagtgctaatgatttgatggattctacgacttggcttgctcagaccaaggtggaagcacttaagtgtattggctcgaagtttacctggtcgaataaacaagatgggaaggatagagtttattcgaagattgatcacgcattcactaatgaggattggatagataaaattcccaactcgatggctgtctttcaatgggaaatatcctctgatcactgttattgtgttgttaaaactcagcaacagggatctttagggattaaaccgtttcagttttacaatttatggacttctcacaacaagtttcaagaagtggtgaccactagttggaataaacctatggctgggtttggtcttcagcgagtgtatattaagttgatgagacttaaacatgttctcaaaagcttcaacaaggaggaaattgatgatgtggaacaaaattatcatcaagccaaagttgattaccaatgtgctttgaccaatgcccaagaggctccaacagaagaaatggcccagttgaaggaaaaagttgttgttgctacgtttcaacaacagactgctatgtatcaaagctttcttgttcagcggagtaagattacttggctttccaaaggcgatgataacaatttgatgccaggtgtatggagatgggtccttgtcttagtgttgaacttcagttgagcttaataaagaagtttacaaaagaggatgttaagaaagcattatttagcataacaagtactaaaagccttatagctgatggtcataattttgaattctataaagtcatgtggagtttaattagtgatgagatagctgaggcaattctcaatttctttgatactgggagaatgcctgaagagttcaataaagcggttattgcccttatgcctgaagtggaaatgccttgtaaagcagtggattacagaccaattcgtgctgtaatatactttataaaagcatttccgaaatgatctacactcgcttatttgaagcgcttcctctgttgatcagccaaaactagggagcttttgttaaaggtagatctctcggtcataatattcttatctttcaagatttgattaagaattatagtaggaaaaatgtttctccaagatgtgccctgaaaattaggggtgttcgcggtgcgggtggtgcgggttttgactattttttcaaaccaacccgcacatgcaatttttttaattttccaaatcgcacctgcaccgcgaaactaaaaaaccgcaaaaaccgcaccgtaaaggtgcgatctatgcggttttacggtttggactatcactaaataattaaactatcataaatacaacaaagtttgagcaacacttgtcaaaaatacc

SEQ ID NO: 123109 - DNA, 983 bp, Cannabis sativa
attttaattttaatttgtgactaaaagtattttttgtaatgacaaaatatacttattaaaatgttaattttaacagaataatattacttttaatagttgtatccttctacataattaaagaagcaaccatcatgaaaaccccatacccattaagccaagcatttattatgaaaaccacatattatttaaccaatacaatactacaaaatatagactatactatactccatcaaattctcttgagtcccaaatcattaagagataataggaatggaaaaatcagaggaattctttataagatggtgtatggggaacaacatgcccaatagctccaagcacaaatttcacttacattctctaagtgaatgatcaattgggagtttttactatttttcttcccttgcatttcacaaagctgctggtagctttggagttattagaaataaaaaatctattaacatagagatattgtataagaaagtgaaggagaaagaattgggtaatgaagagaatgtgtaaatgaatagaatagttgtataagaaaggagaataaggattgaataaattacatgaaagattagtgaccaaattctaaaaatataaattttgaattgtgtttattgtgataattgcgcttataatattagccttaatctagcaatacaacgaattgcctcactactttaatattagcacttttattgataattttatacatatgaaattgttaataatttatgatttctatataattttaaatttgtattatacacaattatattttatcgaggcaataattgcttttggaacaatgatacttacaattaattttaacttatattttattttttaaaacaataatttattttacattataaaagaaaagatgttttgagtaaaatactaaaatatatacaggaggaggtttgaatggttacattaaatatgtaactatcatggttacatttttttagccattagat

SEQ ID NO: 123110 - DNA, 1161 bp, Cannabis sativa
tcatgatatttaaaaatgttattgcatgtgataaagtaattattaattttatggtaatgtttagcaataattatacaattaaaaaaaaaaagctataattatgttcattgtgaaccaataactctcaactaagccttttagagacgaataaaattataattaccaaaatgttattaaagcaaataaaagaaaaaaaactttgaaaccctctctttctctcgtaaggaagcaaactatatttaaaaatgcatttacaagaaagaaaaaaaaaagcaatagggctattagaatagggctattagagaagtagtttcgtttctcatcttctttgctcaataaagatacctatattttggtgtcttaagcgtagaaaaattacactaatctatcccgaacttagtgattaaactttactacgatgacaatacagtaggggcctcgaggtcttgtaaaaaagccaaaatataactcgacacaagaatgataaaaatggtaaaattatttatttatttatttattttgaatggaaaatgcatttttattaaccatcaaagtccgctaccaaagacggtagcaaatcgaatggaacagactccatatcgaaagtacaaccaggaaaaaatatagaagctctacagttatgagctaccatatttgttgattgtttaacaaataaaacaataacagttttcaactcagacaacaaagttttacactcctgaataacttgaccataccaattcaatcgcacttcttaatgcttgaaccaccgtgagacagtccgtttcgagtataacatgttgccatttttgtctcttaatccagctttaggcctctcggacgctaatagcttcagccgcttctgcttgaaccacaccagtaaaaagaagcgtctttccctctatgagcataccataatgatttctagcaattagactacatccatatctagtgccactgtcaaataaagcggcgtcgacatttaccttgatgttattcacatttggtgccaaccaatgctcggtttcgtcatccggtagcagaaactatcgatttacgatttaagtatgatgatggcttggttttcatcactaagagcctcattttcccctgaatttgcaagctcaatgtgcatcctcaagaactcatcaagattttgat

SEQ ID NO: 123111 - DNA, 1822 bp, Cannabis sativa
tagaattttgtcaagttatgtcggtttgtattttttttcggttttgtcggtttggtttagtcgggttattcgggttgggcggtttacgaaaatttctgtacagccctacttaaagtattttggatcatactcttttctcagcttctttgaagagtcgttatagttattgcccttgtcccttcttttgttccgagagtggctcacagttgattttggagcctctattttcacctatccaggagccacactacacttggtatgtgttgccccatacttaaaaaaatgggtctatgtaggtgcgagaccgaaggtagtgggtaggggtgttcatcaaaccgctcaaactgtccgcatcgcaccactccgtaaaaaaatacagttaaaaattctttgtagtgcattcgcggtttgaatttttcctaaatccatccgtatttttgttaaaaaaaaatctaactcctaaaaatattttaaaaaactgtgcattcgcatttttatattatttttttggttaattataaaaaaaaatctttttttttacattggaagagaaggatttgaagaagaaaaatttaaaaccactaaattatataactatataaaaattaaaaaaaaaaaaatcgttaattgtcttacacttctcaataacaacataaaataagtagagaacatgttggtgtggagtcatgtcttttgacatgttttttctctctgctgtagagtgttgatttgatcagtaaaagttttgttattttcgtttcctgagatggcgtcaagtagtcgagtgatggaagaactagaacatagatgggatacaatatgtcttgaagaagaagaagagagtgaagagatactggaagatgagggagatggcaatcctgagtttgatgtaagatggagtcttgtagggaaattgttaacaggcagaatatcagattacaaggtcttccaaaatatgatagcagatttatggaagccatgcaaaggaatgactgttaagattctagagcagaactgattcttgtttcaattctatcacgagattgacattcagcgtgtgatcaatggtagcccatggacatttgatcggaagcatttgatcttgaagagactgaaggcaggggacaatccgagaatggtggaattggatacgattgacatgtgggttcagatccatgatttacaatctggattcaaaacagagcaagcagttcagaaagctgggaactacattggcacatttcttggttcggatcctaataattttcatggtatttggcgtgactaccttcgggtacgggtttctatctctttacacaaacctctgaagaggataatgaagttccggaaacgtgatggtgaaacattttgggataatttcaaatatgagaaagtccccacattttgctttatatgtggtattatgggacgttctgagaccttttgtgctaagttatatgatacccttgtagcaaaccttacgaagccatacaaactctttatgaaagctccacctagaaggaacaattttttgactgcttctccatggcttcggcaacatgaagcaactcagatggatactggcggcaagaattctgatgaagatattaaagttaatgctccccatgatactcggcttgatgatagggaggataatattcaaaggaacaaatatggaaacttgcatggttatgggaaggatattgcctacaattcgggagctgctaatgtaaagtcgaatatggctttaaatgagccagttgtcttggtcaaagagaatcaagttttattctcatctgatatggaattatcaatatctgag

SEQ ID NO: 123112 - DNA, 539 bp, Cannabis sativa
tttaacatagtattatataaaaatatgatatataatccaatacaatacaatacgacctaatacggcattccaaacgaactattaatgtactaaattaattagaccaagtcttatggtcttaaatattctaacattattattctaaaatacagacagttccaggttttatcattaaaatattatcaatataaaaaaatgcatgaactttttaattgcagtaaattagccatggattagtattacactagaatattgtttgcaaaaattaataaaatacaagtgaaggataaaagttataattattttcatagctcctctgaaaattttacaaaaaaaataataatttatagggcaaaacattatatgtgtcataggtcacgataaaaatctatttcttttctgtctaaaactatgacaaatatattcaatcaaataaaagaccaattagtaatttttctccccgaattttgacatgtaccaaatcattcttcatgaacttttttggtcgttaaaaattccccttgaactattgagattat

SEQ ID NO: 123113 - DNA, 2321 bp, Cannabis sativa
actcttgaaaatcaattggccaatatgttatcccaagccaaatgcacacctgagatagaacttgctgagaaagacagcaagcaaagaaaaagtggttgtttgactcatcttcagccccacaaaccgggcacataacactgtcaaggacaattttgaatcgagcaaatttatcccgggttaacagttggtcattagccgcttgccagaaaaaaaaaacctgtgtttgggcatgttgtagcttccatatgctgctgctgatctcgaagactgtttgttgcagcttgctattgtatagcatctttgtgttgaactggcccttagcatcatttgtaagttcatttggagtaaacttatctcttaaatgacaaagttttctccaataccaactagcatcatttttaaggtcataggtccaaatggaattgttcttgagatatatattattgacccatttcacccaaagaatgtcactcttagttgaaatggcccaaatatatttagctaggatagcttgattccatttgaccccatctttgaatcctaatccaccataattcttaggaagataaactttctcccacgatgccacatgaagcttgctcttgttaccattctaaccccaaagaaaccgtctacaaagtttctcaatctcctttgtgatactatgaggcaaaatgaatatactcatccagtagttgcgaagcccaagcaaaactgaatgaatgagaagagccctacatgcaaacgaaagatgtcttgttgcccatgtgtgaagtctctatttgattttcttgataatcaccccacagtcttccgttttccatttgataggccttagaggcacccctaggtacttgaggggaaaaacaccctctaacagattcatttccctcaacattgcccgtttttcctctgcttttacccctccaaaatagagttgggatttgttagcattgatagctagacccgaagcggcctcaaactcattcaaaacacttttcaccacctgcatggagcttaaggtccccttactaaatagcatcagatcgtccgcaaaacagagactaattatcttgagactcttacacatagggtggtacttaaacttcgattgatcaacagccataatcaaacgtctagtcaaatattccataatcaaaacaaacaaaagaggggaaagtgggtcaccttgccttaaacccttcttgcctttgaaactcccttgaactcttccattcatcatgattgagtaagtgggagctctcagacaagacgttatccacgttataaacctggatggcattttgtacgcattcaaaagagcttctaaaaactcccagctcaccatatcataagctttacttatatccaccttaagagtacaccttggagatatgttctttcttttgtagttctttaaaatgtcttgaagaatcataacattatgcgcgattgatcttccttgcacaaacgcaccttggttctggttggcaatcataggaagcacttgagaaagtctcatacaaatcagctttgaaacacatttataaacggtagtacagcaagctataggcctgtaatccactgctttagttggattttcagtcttagggattagggtgagcattctagcatgaaattcacggggcatagatcctgtattaaagaaactctctacagcttgagtaaagtcagctcccagatccgaccacattttcttaaaaaaaccagctccataaccatctggccctggcgattttacatccaaaatgctaaagaaagctttcctaatttctttctttgtgaacgatctgattaaactcagttgttgctcaagatttaaacaattccccatctccatacaaccttttttgagactagctataggcctagattcggttcccatgtatccctagaagtgaccaatataatggttgaccacctcagtaaagttgtctataaccaccccttgttcattagtcaaagacataatgctattctccatccttcttttttccaaactagcatgaaagtaagcattattctcatctcctttgctaagccaagtcaccttgcttcattgtctcaagaaactatggtacaacttttcttggttggtgtagtttgtggctgcctctttctctacttgctgaaacttcgggtttcgagcatgagtttgagcttgcattctagctgtcaagcttcatgataactcctccctatatcccctataacatctctattgaacttctttatgacatgcttcttcatgagttttatcctatattttaataatgaaaataatctctctctctctctct

SEQ ID NO: 123114 - DNA, 1975 bp, Cannabis sativa
  modified_base (674)..(685): a, c, t, g, unknown or other
cattcaactataatagactcaccaataagtttcatatagagtttctaagggaaccacatatgagactaatgttgtatatgcctacaaggccatgataggattctttcgaggtcaaaagcggacagaaaaatggccacccacttggaaccaaggcctagaccgaccagggttctcaagctttgagagggttggccagggtcccatgacccatctaagaactagttagggtcaccaaacacaggcatgaactgcctaatttctagtgtgaaaccctaaccgatcaagtcccatggaaaaaccctagagttggccaagtcccaaacaaaacccctagggcctgccaaggttagtttcgaatcaaaatgtctgttttgtaaaactcaaacatgttcttcgtgttcttgatgactcaaagagtcaagaatctaagcgaaggaaaaaattgaatcttttccatcaagaaatcacgcattatgcattcaaaaactatcatgcagatcaaaataccaaaaatattacaatctaatgtgagaatcaaaaagtttctagaagcttaaaaagcttgaaacttatcaataatagcagattcaaagaagagatgttaaagaaaagaagttaaggcaaatatggagagagaagatcaaagatctaaagcatgccatgcaaaaagccannnnnnnnnnnnacaaggatgcttgatagaggctactacaagcaagatgagagctagaaagtcctaatccaactagatgttcaaatagcgacttcggggaaaatgttattcaaaatttggtccatcagaggtgggatgtccacgtaagccaagactaaggacacgtggaaacaaaccttctcagtagcaggacaaagtctccttacaaggcatggaaaaacaatcaagcaacaagcaaaaggagtaaagcaagctatcaagaagctgcacaaagatcggccaggaggagcttgttgttgggttttgtgccctaagtaaaacctatttcaatataatcagattaactaattaatgaaacatcataaatttatttcatgattatctttaatgtataaattctattaagtccagatcatataattattcatgattatagtgttgtcactactagaaaattgggttttagtgacacacattgagtaactctaaaagtgtatagtgacacttcaacgggcgtcactaatgagggtgactggaaagactatttttagtgacactttacacgtgtcactgaaaacttttacattcattttctttgcgtcactataggcatatagtgtcaggttttgtcagactgaaaaggtaacagccacacacattaagtgtcactatatcctatttattttttttatttttcattaatatttttagagatatagtgacacacaaaaggtgccactgtattacatatttttctttttattaatattgttaatttttatttatttatttattttgttttgatactaaaaagtaaaataaaagtccaattaaacctgatttattgttagtttagtgaattgtacccaaaaaaataaaaaagattataatttatatttttacaggctaatctatttaattcagattagtaaaattaaataaaattattaagtgtaagtaaatataaaataatttacaaagtaatacatgaccaaaatgtacagatattttttcagatctatatcaatataaaataatttacaatgtaattacatgactaaaatgcacaaacatttttccaaatctatacagaaaaccaaacaaaaatacaaatctagaaactaattgagtaaatgaaaaacacaacattaaccaaaaaattaaaaccaaactcaagtccaattaatcctaacctccccacccaccacctctgcaacccggactccagccaactgcacaacctcaaagcaagactctttgtcaatgatctacagagaagagaaacaaagagagagagagaga

SEQ ID NO: 123115 - DNA, 926 bp, Cannabis sativa
agcaaagaactatccaatcaacccaagttttaataaaaccaataaaatttaatgtaagcccaaataaaagtctaacattattggcatatagcaagtttggctatgattctagttgatgtagggtcatttggggactggtttcttcatttattttcacaactggacgaggaacaaagttttcaagtagtgatgttggttttggcaatttattttgcacgaaatcaactcttgtggaagggtaggaattccattgtcaatttagctcgtatcactcttgatcagtagagaaaagctcaagaaagaagtttgtttcttgcgtttgatacttggtatctttcgaatgggcctgagttgtggtctaaaccaggttatgaaaaactcaaggtgaatattgatgttgcattgtttgacgaggagggaaggtatggttttggtggggttgttcgggatcacaagggtcgggttgtggctgggattatgggactacggattgggcaagttcttctagaaattgttgaggtcatgactctcaaagaagtattatcataattgaagcgcaattctttaggtattagtattatcaaatctgattgtctggtaatcaggctgttcattttatggctaaagcatcttgtttatatgatgatcgtctttttttcgaagtataatctctcttttgatgttgctaatattgttgaggccgagtttatctaattgaatgaaagttacagttcaaaagaaataattttcaaccattattatttttaaaaaatcattaataatagagtaatttatggcataaatacttaagtttaactcttagttgcaaataaatagcaagtttaatttttggcggtaatcatacctaagttatatttttagaactctgtaagtacctaaacgttaaaatattatgtcattatcca

SEQ ID NO: 123116 - DNA, 2039 bp, Cannabis sativa
gggaacgtctgagagagagggaaagtttaatttaggggtattttaggaatcttttaaaattagaggaatcaatttgtacaaattataaaagggtataaattttgataggggttatattattaagggtaaataatgaaatttccctttaataatggtgaataaccatctagctatttagttgtttgtgttttatcaaaatataaattttatacttttggtttaataattaatgatcatttgttatccatatttattaataaataattaataattttttcttttcagtttttgataatattaattttgcctctttaaaatatacggtttgttaaaattttttataaacttttacatttagagaagttttatccttttggtaagttccgtcccatttaaatattgacatatattgacataactttgttaattagcaacaattagcaactttgtcccataaactttgacaactatcaaatcgtacacattgtaagtgggtggcgccttaaatgctattgttggcagtacatgcacatgggggcgtgtttcttgggaggagtgacaatgacgtcaaatcgattgagatgaccccttctttaatatgcacatcatatgaggcgtgtaatgatgaatgttaaatgtttgggctgaatattgaatgcaatctttttagctccccatttgttggattcagagatgtttttggtagaagcgatatgggccatttatttcaaatcgcaaagacttccactgtcgtaaaaataagtttcaagagcttattttatcctttttttatcaccttcaacattcagaaacccctctatattttttgaaccatgatccctatttctctcaatgctttctacaccgtcgtgcattccattttctaaacgttgaacccataaatcctaattacttgctccaccccatgttagacaagaactctaacattcaggttggctacaactgtgtcattaactgggtaaaacactcctaagccaattcacacgacaaccatcccttttccgtccaaacaccaagtaagtaccttaatactctgttgactttgtgctatttcgtatctaagatagaaatgctaagttcaagctgggcttaggatatactgcatgtttgaactatagggtgttgtttgtagaaacatattttaggactgagcagtgggtaaaattttttatcccaaaggtgctggtcttatccgaatggattgagtagggctacttgtgcttctgtagatgtttgcatgcttgcatggttctagaacctcgctggtttggaaggcatgacccttcttgctcattgagaaccttataactgcttgttcaatggctggaaccatatgtgcacttttacatgtttttcctaactttgtagtttcgaattgtttcactgatcatgtgttggcggtgtttgcatgtgttgaaaaatattttaccaggatctagatttactatcaagtatgttgattaacaccctaaatatgaattctctaaaacaatgtaattaaacacataaaaagttttaagtaaccttacattggttgcagcgaaatagtatgtctcctcctactcagatctctaacccttgttcttttctgtcgcagagtattatcaagatctgagtccgattctccttcaagtgttggattcttcattgtcttacacactatgattaagtacttgacttgctatgggtgtgcatgtactctttcactataggctcgaaaaatatgaagagggagagaggattttgaaattttttgaaggaaaagaggctctcaaaaactctagttatctaaccgaatgaaaactataggttaaatgcattggatgggaatgagaatattccttttatactatttcacctaggattaggattgaaattatatggaataaaaataataaaagaatggcaaaataaacacatagtggccgaccatagagatgggccccagtagttataattttgccattttttcaaccatttatcttttatttcattaatgtcatattttttaattttaa

SEQ ID NO: 123117 - DNA, 1090 bp, Cannabis sativa
aacccaacactcctttcctttgggctttgtcttgaatcaccttcttctgctcctctgactcccagagactcttcatcacctcctccgtgccaccaaactcaaacatggtaaacccgtggtatcaaagtctttgaaagacgaccaacctctgcaacaatctagcatccaatagggaaaagttagagccttgtataaaaaaaagcttagagaagtaaagagaaaagaggcataagaaatttgaaaggtgataacttactacagtaagcgccacgctcatgtcctgaatttgatacatggggtttgtagaagagcatgccgcatatctcttaatgggaagttaggttagtggacggcaaaatgacttatcatttatgaagcaaaaggagctaggctaggccccatgaagcgcttaaaccagtctgtcaaaggatccaaattcaaatcccagacgtctccggcatactcacctctaaaagactcatcctagaaatcccttagcaatttcctcatggcctgcgccttcgtatttccgttggtatattccccaaggcgtacttgtattgggcgattcagagctgaaccctttcctcgtcaaaatgaacgggagtgaagataatacatggaggtgcatgatactcatcaacctctgaaggaatccctgagtcagtgctgggaggtaggagtgtccaccctcctcggtttcttaaaaggctctgtcgccaccatcttccctttatgcttacggttaaggggagggatgatttctccttcttcttcttcttcctcgtaaatcaagacaccttagttctcaagaagttcagtagaaggtcatcccagagtcaccaccacattacgtggctcgggcaagccagcttcaaggttgtgtgtaggcgagggcatctaggaggtcatccattggttttgctgttcaaaaattaacaaaggaatcagaatattgtcagaaaaccatgcaagcaagagtaacatagtgaaactagtcctaccctaatgatttaattttgcactagcaaaggtatatattaaaagactggtgtcatcatcccctagaatgctatctgaggggaggaac

SEQ ID NO: 123118 - DNA, 1183 bp, Cannabis sativa
aacatcagaattgagttcttcttctccaattctttcaatctttgtctctttctttctctctctttttaacttttcttgtctttttttcttttctagcttcaaatttgtcgaagaattttaacatggtatcagagtaggactttctgccattaatggctaatgttgctctagtgtccggccatggaaaagcaccaaactcaaggaacaattcaagtcacctttgaacagattgaagaacttcgattcttcaacaatcatgtacttcaacaacaatttctcgatcaagcttaatgatcacaactatcttttacggaaacaacaggtcgtaactacaattcatgaaaatcgattaggagaagacttgacgactattcgcgttcaccagagccactagagatgacattttcaacgcaattatttgcgactatgatatatacgttagttttttaaaccgacataaactctttaaatgacacttaaaaaccggtgtgaattatactttttgtagtaccacggtgatagaaagactcgtggatgagcttttggagaaaggaattacgaatattgctttgtgttctgaacctcgaattctagggttttataaacccatgggtttcgttgcaaatccgaatgaggaatagtgtattggagaaaaaacaataagaagtaagaaagaagaagtgtatctggcaagaagaagatcacccaataaagtaataagtttgaagagtaaacactattactttcaatcaatatcgaagtccaaatagaaagaaagtcgaaagtgttacttctgtggaaggtctagacacttgtaaagattttacaagaagtacaaggagtagaaagaaagttgaaagtgttacttttgatgtctaactctgaagactttctaagaacaacgacagttccaacaattttttagtatttgtaaaatagtctcaaaaattaatgatgacaaattatctatattatagagttaacactaatttatgaaaaaataataacatatataaaatatatagactacttctttcattatcaaattaattttaaaatagaactacattgacaacactacagtagaacctatatgttggaaacaagcaggttagatcaacactcataccagaattccataagggacattcgaacaatacacacagtcacaaaacagtaaaag

SEQ ID NO: 123119 - DNA, 1154 bp, Cannabis sativa
tttaattttttaatcacaaaaatataaatgtaaaatttgtgtttttaaaattttatttttagaaaataaaaatgtgttctataacaattttattaaaaaacagaaaatataagtgtgttctataactttcatttttatatttattttttaattttatttaagtcgggtccaggtctgaatttgggataggggtcgtgatctgagttcgagactcgagctggggctggagtttgggtcctaaggtccagattggggtcggagtctaaaatattaattaaaaaaaatctgtttaaagaaattgtgaaagtaattttttaaaattttaattcttaattaaacaattgaaaagtgaaaacaatattattgaacatgtttctggaaaatattttcaaattttttaatcacaaaggttttttagttcaatactattgactcgtggactagagttcagtaacactcgaacacgtaaaaatcttgatttcttcttctctaatttacttctttcttaagcttatttattttagataaattacccattatacgacctatttacaattatttttcgttttttcgtttttttttttaaattttcaattctataaaattttatttacataaatattacttttttaacttttcaaattcattttgactttttgttgctaaatcaaaacactggttttactggatacaaccccaacaccagagaccttcaccccgacccacacaaagcctccaccagcaacctccaatagccacctgagcatcgtcaccaccttagacctgggaacaaagcccagtctgtaagatttttgaaccaagccaatgatcaaagccggtgcctgtggtgccagtggaggtcctttctggcgatctcgcgacggagtatggtggttagaccaattgggggagaggccggtgtagtggtcgaagctgggtcttgagtggaagccatcggcgactggggctgcgtctgaggccgagggaggcgtgattgtcgtgagaagggaaaagtagaagcccaacccaagtatttttgtaaaacaaaatataattttgcttagtttttaacagggaaatttacatggtatactgataactctaggaattagagttattttcacatttttttaaactaaaattggtttagttct

SEQ ID NO: 123120 - DNA, 2083 bp, Cannabis sativa
  modified_base (154)..(154): a, c, t, g, unknown or other
  modified_base (1883)..(1892): a, c, t, g, unknown or other
aaactacgttgtagattatcatataaattaaaccctgtgtactgataaatctaggaatacatttaatcacacaatcttgattactttccaatgtgttgactacccaataaacaagaatatcaatgtgataaggtttggatgaatttattaatcnaataagtaaataaatgatcacatgaaccaaataacacattaaacaagaaatgaaattaaatctgtttctttattaataattgaatagaaaagattacattaaaaaagagttttatttagggcagaaagcccaatagaggcatcataataaataacaaacttttccttatctgaaggaagagttaatactggagcggtaatcaagcactgctttaactcctaaaaaacttttctcacaccgatcagtccaaacaaactctaaattctttcaagtcagtttcgttaggggtaccacaatctttgagaaaccctcaacgaaccgacgataataaccagctaaacccaaaaaccttcgaacttcagtagccgattttggtgttgccaatctcgagcagcttcgatgttggccggatcaaccatgatcccatctttatccacaatgtgccctaagaaaagagagatgtgataaccagcactcacacttcttcaacttagcatatagcttgtgatctcataaccgttgtaatactaatctgagatgtagttcatgttcctcttctgactcagaataaacctaaatattgttaataaacatgatcacacatttttcctggtaatccttgaatacctgattcataaggtccataaatgccgctagggcattagtgagtccaaaagacatcaccggaaactcataatgtccatatcgagtacagaatgcagtcttcaggatatcttcctctcgcattctcagttgatggtaacctgagcgaaggtcgatcttagaaaagactgtcttacccttcaattgattaaattggtcgtcaatttggggtagatgatacttgttcttgatagcaagctttttaattcccgatagtcaatacacatccgtagtgacccatttttcttcttcatgtacaacactggagcaccccaatgagagtaactcggtctaataaaccccacgttaagtaactattcgagttggatctttaattctttcaattccgctagagccattcggtatgatgcctttgatactggttccgctcttggaactaactcaatcacaaattcaatttctcgaggaggtggtaatcccggtatgacttcataaaatacatcaaggaatttgcacaccaatctcatattctcaggtccagatgagacaggttcgctagtatccactgcagtgactaggaatcccaaagaacctctgcacataagatctttagctcttaaaagtgttattctaggtatgcgcgtcccttgaactttatacccacaaacactgctgggttagcacagtcaggctcaaacacaaccatctttcgcttgtagtcgattgttgccccatacatagacaagaaatccattgctaggattaagtcaaataggggtgagcatcggtcgatttggtcagttttttctatataaaaatccaaaatttggtttttaatctggattggtacaatcaaaaaaccgaccaaccaatccaaatcctatcttaaaaccgaccgttttgaacctcggtttagttggtttaaaccgtccaaaccgaacttttttttaaaaaaaacaggatccaaattattctataaatacattattctacattttacaactatgaacatacaaattatttgttcaaaaactaattatcttattcttttaaatttaatattttattagtaactataatacatgcaaaaaaacttaataaattnnnnnnnnnntatatgtataacggtcggtttcggtttttttggtcagtttattaccaaaaaataaaaaccgaccattcaatggtagttttaaccgttagaagtttttttagtattcagtttcatcagttttggctccaacggtgttcgataggtcgatttgaacgggtttttcggttctctggattttatgctcaccccta

SEQ ID NO: 123121 - DNA, 1094 bp, Cannabis sativa
  modified_base (1063)..(1068): a, c, t, g, unknown or other
taagggaaaccattcttcatgtaataagctcctataaatagtggtataatctcactattgaggggacgaaaaatttagttcagaagaacactcaagagagaaaagcgatctaagaaagcattactcggagatcaattataagagcttttcattctttttctcaggtcaatacagccaaatggggagtaggctattaccattctcacggggcgaaacctctagaaaatatggtgattttttaccttattatttctgcttttggttatttattttatctagtcactttatcttgactcactatcgttggatagaagcgaggtcaatattttgatacttttattgagagcaaaaacacaatcttttgtcttaaagtcttgacatgttaacaagatggttgtaaaaacttgaaggggagacctggctgatcaaggcaatccgatgctgacagatctgaacatgcaaagtcctggaaacgtgagatgaccactagggaggaaccccgaacaaaccaatacacaaccaccaacagtaggccacagagtgacttcccctctagcttggttcacacaaggccgacatcaaattgggcacaccaatacgacacccgacaaaaaaagtcctggcaccgagatcccatccaccaatagcactcaaaggcctgttaaagatgacactgaacttaaaaatctacagaatgtgcttggacttatgcaaggccataataacaccttgtaccatgatcaagaagatctctgtgcaaccattaaccttgcctttgataagcaaagatgtcaattcatagaatggagggatcgggaaaaagaagtcatgagagcttaggaagcaaccattgacaacaattctaggcaggccgtcgtgctgatcagaagagcctaccaggttaccagccaacaacaaataactgaatctagtatccccatgagcgggttagaagggtatgtagctgatcatacggcataggctcgtaacagtcagcagtccaatccaaggccacatgcccatactatgggcaaatggtagatgtgttaggttttatgccctnnnnnnaactccatttcaatgtaatctatttt

SEQ ID NO: 123122 - DNA, 1163 bp, Cannabis sativa
  modified_base (1121)..(1121): a, c, t, g, unknown or other
gttataacttctcaattagaatatattagaatataatttacttggtatataatttacttggtcctaagatttacttggtcctaagtgtattggtcctaagtgtattcttggatagaggttctactgtatattaaagtggtgcgtgttattaatatattgcaattgtggaatggtttataatattttgattataatttggatgagtgcaatatgtcaattaatttattttcttggtaataattggaaagattagataagagttttggaattgatgaaataataagtcaaacaaaagtggcgcatgcatgcatgcagcgtcgtttgatttattatagatcatcaatgcatgcatgcatgcatgcagtacgtactagctgatctctttttccaatcaatttatctatgatatatatatatatatatggatattattattgggtaccaaaccatatggatcacaatctgtgttggtctaatttagaggttgacacaattattccctaacaaggaccccatgaggatgatgatgatgagaagttgaagcaattaattcgtggttaattatttggatcatattaatatgtactcgcagagccaacacattggaattcaaccaaggataattaaaagaattaatgtcaagaatttaactttgtgctcgaatccttaattagcttttaaccgtatgcaaattaatgtcattagccaaggtaagtaacaatgttggaaagcatttcattacttgcttttacttaaggattcagttctcccttctcaatcatggataatgactatgcaagtctattaattcatttgaacctcgttacttgattattaagtatagtggtataattattggtgtcccaaaatctcaatttcattgggatttaattactaatactgaggctccaaccaaatggttctcagaattatatttaagtaataatgtaatcaatgattttcttgtttaattagtgaaagttgagcgtttatgattaaattattccactcttcatgaccaaatttaaaaacatatataatttatatgatcttatttcaattctatgtgttgtaatttcagcggaaataaccttgaggattcaatcataaaatctgcaatnaactcacaactttgacagtaaaatgaacataaaccaattaat

SEQ ID NO: 123123 - DNA, 1071 bp, Cannabis sativa
tcctcaaacacaaattctactctgggcattcttcataagatggtcaaaaatgaggtgggagaccacgtttgcaatcttgaatgttatagaagtatcaaaaagaaccatgggaagcacccagtgcccaagttgacacctggcctggtgcgcttggttccaattatcagaatctgattctatttcgagcattcaactatttttttgtagtaaacgagagctacaatttgtgacaggtcaaattcacacttttatatttcacccattcaacagggagtttcgagtctttccaatttcacaaaacaatgacatctccgagaattggtgaacaacttcaccagaacattgaatctgactaagtggtgtcaacacatcacttaggcatcaaaaaataaaagtttgagacgttttggcactcacctagcgagttgacatcagaatgtcaacctgggcattgggtgtcaacctgggcgctgggtattaacctgggcgttgagttgtcaacctagccgcaggcgcagggtgctaaacaaccttcagtaaaatagccataactcactcaattttgatccgattgacacgattcaactttagtttcgaaactatttcaaagatctatcaagtcatgtcttatacccacattgcaattctgaagattttggatccaaaattcgtcctcaacaaagttgtaatttttctagataactcgaaaatgatctaacgaacgagattcaaagtcttaaaattaacgatttttaccaagaatcaattttcactatcaggtcatcataaatcatcattaatggccaagatcagcgcaaaataatttttcatatttttcatattttttgtatttttaatttttattttaatagaatctcattccctataaaaggagagctcttctagctcatttttcacattcttcgaagtcccttaaggtcagagcttctctctctcctttctctctctagaatttcgagccccacgcttagccaattctttgtaattctcacaaggagtgaactattataaatttattgtgtctctcttatatatccttaactctcaata

SEQ ID NO: 123124 - DNA, 1828 bp, Cannabis sativa
ttaccatgtgacttctctatatagatgcccccattttttgtaacatggtaaaaattttctttctctctctctctctatttgaaaaaagttggccaggtgcataatataaggtaataaattctgaagaaaaagaaagagagaaaatgatagcccttcttaaaggaaagcacatggctgcatgtgagaaaatatggtgttattatgtgggaatgcatagaaatcagtagaatcagcacaaaaataatgtgactttgtgtgtatgtttttgttttttcagagagaaataataaggctaataaataagctaccaaaaattaaaaaaaaaaagccacaataatgagagaaatattatataatattagtagtgcttaacacctttttatgtattatatcataattaattaaatatcaaattttatataatttaatataataattattaaaaaatattactaattaatggcaagacgctatttttaaatgatagttgtgaggacccaatatcaatccactcataatatttacaaataaatacatgtctttatgtggtccttggttggttgattcaagtatgatgaccaattaacctccaaaaataaagccaaaaaaccccctcctgatagggatgccactcagtaccctctatactctatgtctccatccaaaaacaagtgacagctgggtgatttctgtcagcacacgtgttacaatttaattaggacaattaaaatttttcagcccataaaattttaaaaaagaataaaagaaaaaacccaaaatttccctttctcttcttcttctctccctaacatttttcttaaaataaggaattatataataagatgagttgagttgggtgggcaaggtagggttggtccccaaattaaagtttaatttgtctcagttaaaaacacacataacataatgttactactttctcttcttcttagaacactgaaatgcaaaaaatatgtacttgtggtgaatatattatcacttttatttttattataaggatattttttccaagtatttgaaatttatcgaaaataaataatatacaacgtggtataaaaataattaatatatttttttttatatgagcaaaaataatgttatttatatatataataaattaatatttttttttttgagaaaatactaaattagtatttcgttagttatattattatttttattttaattatgtatattttttttattgtataattaagtttttttaatgttattcaataaataacatcatatattattaaaaaatatttaatttatgtattatttataaaaaaaaaattataataatatttaaaatttattgttaattaccgttttaatttaaccgtaatatttttaattatatatattttttaaaatatcacaatttttctattttctttttttttttaataaaaaaaaatatttttttagatatgtaaattgagcaaaaaatgataatagaaaaatatttaaaataaaatatatgagatatgtgtagtaagtttaaatttaaattgtaatatttttttaaataaataacattattatataacacatttaatataacatagatatatttaaaataggataaatactattttgtatcctatatttctactttctactttccagcacataaatgcgaaaattgtaatcaatttggtcataccaccttcgtattgagttattactaaattttaatccaacaaaaattaagttcatgatctattttgtataattttaaaaaatacagtgtctaaattatcatttaacaaaacagatactctcattaataatttttgcaaaaata

SEQ ID NO: 123125 - DNA, 808 bp, Cannabis sativa
tttacacaaaatttgctctatatgcacctctgctcaataacacaatctcctaccataaatagtaaatacttgttgggttggggcaacttttgcactaaattattgcagattgtacccatttcgatactgcatctccaactataacttagtactacatacgggttggtgcaatctaaataattttattcatttttatttaaatgggaataattttattcatatctacaaatttattacaataaaataatattttaattaattaaatactaactataatataaaatggcacaagatataattattataaccttgatcaactaagtaaagctcctttgattaagtaattgactagatttacatcttttctaaattagagtgtgcaaatagagttttaaaagagtgcaaatggggtgtttttagaatcctctcagccaattcttagcagaacacagtggtgactttaaccttatcccatgttcctcaatctgaattgagaatatcagtgtcaccttagagtagttggtgtttggtggtttgtttgatttgttccatattatatcatgtatgttattgttgataatagtttttattaacgggtaattaaactggattattataatttaaaaatactaatataaacacataaagatatttcaacataattctttaagttcaaaggtatacttttttagaagataactgttcaaaatgataagaaaatttgattttctatactacatatacctaatatttttttcctaaactaatacttttctacattaaaaatatagagatttttacacctcat

SEQ ID NO: 123126 - DNA, 1297 bp, Cannabis sativa
tcaggaggttctcaaaaatccacacatgccccataaatattaggcatgaagaccaaaggcaagcaacatcgaaactgattggagaatgcataaaactgaagtttatgaacataatgacaaaggcaacaccgatggacataaaaggagagttgaaatacaggtatgggatcaaagcttctgcaacaacaactcctcgttctgcttctgcagccaaagcttcagccataaaaaaggggaaataacctatgaagggctcttcctctggtaacctctcttcctctcaaactatcaattctagatttttttttataatgaaaatcaacgtgattggaaattatatgctactcgtaagtataaaaatgagaggaattttgatctaagtgctcatcgagtttatggcattgtgaagtatgttcattatagaaattgggaggacacattaactggttttgatggttatattgatggcatagttaagaaattttatgctaattgattgatgaattgcttgataaaaatttgagttctttggcaaagtctatgtcacacgaattagttttcttcctctgaagatgatattgtcgaagccttgaaattgccaaaaggtgttaagagtgctaaagtttctatggatcgtgattgaattctctctgaaatcactggtgaacaagttgaatggcctaatattcatagtttccacattactcatctcacttatggccatgcttctctaatgcggtttgctcttaccaattgatttccaaactccaacaagataaaagtgtcttaagatttgacctttcttctttattgaatcactacaagagcaaccattaacttggcttcttttatcgtggagaaaattgtttccttctgtcgaggtaaaatgaaaccataagcttatttttcctaatctaatctataaggttctttcctctcagaagaatatggtctttttgaatgagacacttgagcatccccttactggaataattttcaaccctcaaagtattttgatggggccttccccaagtgccccaaggcatctatttgtgcaactccctctttagttgctgcaggttcctgcagatgtccaagaagtcaaggaggaagtgactttgatgaacaatcgcttgactgcaatggaggagtttcaacaagaaatttctaaataattatccaccttgatcaagctttattaggcttaagttttgtgttcactttcctttgcttttactttttcggtgatattttgttggacttattttaatttctttttgtctttggcccttataga

SEQ ID NO: 123127 - DNA, 1346 bp, Cannabis sativa
aaaaaattaaaattttgaaattttggattgctaggaaaagacctgataaaaatctgcatatgaaagaataggaaacttttccttaatgggttccaatagcttgatagcaatatcaaggccattgttggcctcatgagctagctcagcagggtgccttatcgtcccaaatggtcctccagtcttcgtcttcacgtcgaaagttccagccgagtgccatctacataaccaaagaaccaattagccataaaacacgacatactaattttaagaatatagaagagctagaaaagattcttacgcgagtcgaagaatgataggagcacatttcttctcagcgattaaacctcgaagcttcttcttgcatttctctactgccttttggtattcctcgcttactttcggatatgatttccccatttcctcgatttcttccggttttttttctctaacaaattaaattagctaacgatcagattttaccacaatcagagcgagtttggaaatggagtcaaatcacgtatatataagggaaagggaaaagaaggttctagttcgatcccgtacgttcaatgataatgttaatggccagaagaagcagactttgatatcgattggtaacgtacagagattatgatagcccaaacccaaaaaatataaaaatgaaataaaagcgggaaaaagtagtgacgtggaaatgtgatccaatcatgtgatggttgtagaagagatgtggcttctggaaaacccgcttattgttcaattgttcaattgattttttttttcttttttgcttggaagatcaatcaaattattgatttgatatctctaattccaccttcttctttcttttctcttgggtggacaatacatgaattttctagaatgatactttgatattaggcattttaaaatgtctaacaagattttaatggcggattgtgattgattaacaattttttatattatttaagatttaggggatctaatggtgaaattaattttggaagtcggtcatcaagttttggagctctaatcacgttcacgagactttttttttggataagttgtagttaaaattcgtaactctcttgagaacgaaatttggaccagatatctttagaattacaatttgggtgtgatatactatttaatagagtattcaaatagcttcaaaatgcaagtcgaatcacatcgattggattaatattaagtgagtcatgactattttactgaaggttgctctgatactaacacccaggttgacagcctagcgccgaggttgacatatgacgtcaataaggacgctgggtgagtgagaaaacatgctagggatgtattttttgatg

SEQ ID NO: 123128 - DNA, 1303 bp, Cannabis sativa
ctgttggacagggcgttacatgtgtgttcattgtgaaatacagtgacctcaaagatgtcatcttttaattctaactctataaatgtcaattctatctatttaataattataatgaaattatcaaataaaactttcatttaacttatttattaattagaccttacaaagtgtcttgattaataaataaatcctaaaatctcttttcttctcaaataagtcaatgtttagtgaaaattcacaaacaagacattcttattcagaattccaattgattaattaaaatcaattaattgagactagaaaaaaaaaatattgttccagttagtgcggagcccatgggcctatgttaccaagctcccaataagtagatccaaaatttaccaaataaatttcctaacttgttaattcatcctgacgctactatagattcaaaattgcacttctgattacataatatatatggttgcacatgggtcagatttttgggttttcggatggtcgggttcgggttttcggatttcggatgtttaaaatatgtaaccgaacccagttttcaggtggccaggtttggcgggtttcgggtcaggtatggcgagttttgtggccgggtttggattaacccccgaatcaatatttgcattaaaaaatctgtactgtacagtttaaatttatggagcagtgtaaacaaaaataaaataaaagttgggctatgggatgaaaagtacaaataatactatttttatttttattttgataaaaattaaaataaaaaaaaaataaaaatacaacaaactgaagtttgtttcccatttgaataaacatatctaataaaaaatacttacgtggatgagagatatagcctacttttgtaggtgacagaggtaaagacaggtgcatgagagattcttacacttttttattttataataaataaaaactctgtaccttctgactttgtagcacgaaaatgtgtacctaatttttgggtttcgggttaacacctgaattaatatttgtctaactttaaaacccgaacccgacacccgtgtggagtattttcgggctggacccgacccgaacacacgggttttcaaagtttcagtttttttttagcagcgggtcggggcgggtggccgggtttttaggtttgtaggtctaaatgttcagccctaatagaatactctacaaaccaaatatagatacactataaattatttgttgtttcaatttaaataatcaaagatcctctatagatgatctacatcgagtagggacaaaattaccattctacccttcaatgtat

SEQ ID NO: 123129 - DNA, 1355 bp, Cannabis sativa
ccggagcttatcgtaatgttaccttaattttttgacgaaaaaacttcaaatctttcgtattgttgtgtccctgctctgattgccactaatcttgaggtgtaagattaccatcgatcggtggtcgtgcatatgcgacacgtgtgattggatagtgaccggaggtgggtcgtgggtgctccataggttgtggttatgggggtttatcttttgtgttttgaagatagagaaagaaagagaaaagatagagagagatggctggtgggggttaaataaattaaaaaaagaatgtgggtcccacccatttcttttattaattttcttttttttagactcaatgtgaccgagtcttcacattcttccttccttatagaaattttgtccaaaaattttaaagtgcaaccttatgttaaaaattaaacaagtgaggatacttcatgtacatctctaaatctaattcctaagtagcattgtcttctctgttgttctgccataagatcttgactattggaatctctctgttccttaacgattttagctttctcgccgagatcctgacaggttgttcttcatatgtcacatcttcttaaaaagagatcgattgcatcatactcaatgacatgtgacgaaattagagtttacttcccaacaaagacacatggaacacattataaacatgcgttaaccgcagtggtaacttcaattggtaagcgacctcccaaccatctcgaaaacctcgaaaggtcaaacataccccagggctaggttacctttcacttcaaatctcgttacaacacgaataggagtaactttcaagaagacataatcactaacatcaagctcaacttctcgttgatggagttcaacataggttttctgacgactctgaataaccttaagttgctcttggattcccttaatcttctcatcagtacttgtaataatcttgggaccaatagtgacatgctgatctagtttttcccaacgcaatggcaatctgcatggcctcccatataatgcatcataaggagccatgcctatacttgcttggtagctattattataagtaaatcccaccaacgacaagtgttctctctagctacctccaaaacctaaaatacaagattaaagcatgtaacaccctaataattggaacgccacgaaaagtgactaaacataacctgatcccgctaaactaggattaataaatctaagagtagaaattttttaaattttaaatcaattgcagaataaaaacataacttgtaattatttaactttacaaacattccaaaagattacatttattttgggatcccgtaaaaacttttgcaaaatgttacaagttatttttacac

SEQ ID NO: 123130 - DNA, 644 bp, Cannabis sativa
agttacaagttactctaatattctattcttcaatatgacttttttctctaatgaaaaatgttcactttgattgaaatttttgcaggaagaagaaaaaattaatataaaaaagagtatatataatacagaatatattctcattaaaaagcaatttttattctaaaagactaaagactaaagaaagttctgccttattaccatccaaagacaaggataaaattctaattaacaagaaaagagaaaaaaaattatttctaatttgacttaattccattctatttttatttctatgcctattctcattttcattctcatttttatatttttattcctcctaactaaatgccacatagttttcactttttttcttgggattatttttgtttattgtttcttgtacaatatataaattagaataaattctcacaaatgtttgaaatttttttgagtaatttatagtgtaaataattatatttaatttttttttaaaaaaaattaaatttaactttcaattataaatattttaagtttaattttcaatacttcaattatatttgtggaacttttataactgtgaagtcaataactatttgataatttatgattgatcaatgttattaaatttttattttttatttaaaatt

SEQ ID NO: 123131 - DNA, 2412 bp, Cannabis sativa
  modified_base (2361)..(2375): a, c, t, g, unknown or other
tatatatatataaatatataaatagtattttaatgtaaagaaaataatattttaaaagtctaatgcatataatacaattatatttcaaaacttaataaatctcttatatattttttttttcaaatacaatttaaaaaaaaaaaagtatacatttctttatacatacatttttttttcttcttttgaaattgttaatgtgttgttcgagacataaaataattataatttattttattttgttgctagttatataaaaaaaaatatttttttcataaattttaaataatgtaatattaaaaagtaatcaatccaaaataaccaatccaatccgcacttttgcagattggattgattggatttaagctattgtgcggattggattggatccaaaaaatgaaatccgtacttagtatggatcggatgaaatgtgagcaaaatagtgcatattgaattagatgaacacccctatacatatatgtgcaatgtttaagacaataaaagagtctatcaccgtctcatactttagctttatatatacatatatatatatatatcttatttttagctaatagtgttatttagagagactttaaaatatcacatcatcatctcatatctctcatttataaatatatagtatatatatatatatatttaggttcagagtagtatctaagtactaaatgtacacacctaaaattaattatatatcatccgtaaaagtagaaatttttattatttttttaattattttatttatagatagatattagtttattattaatgataagatatttatatatgtttttaaaagtagttaaaagtaatacttaagattttttttttaaaaaaaataatattatccttaattatgatttttgtatacaaatgaaaactaattaaacaagtaataaataagtgttgagtttttaaattataatttttctatatatttattattattatatttattatttaattaaaataaaaaaaattaaaaaataaaatttaaattacatatattgttacgatatttttttagatcttattatgtttaaaaaaaattaaaaaaaaaaacataaattcaaatatattattatctgttatgtttataaataatataataaattattaagatatatatatttttttgtaaatttttgaaaagctactgaaattaattttatttaacataacattaccaatattctatatcaattgataacatcatatatggtaccaagacttctatttatggtataccaattacaataataataattcacagttatatatagaaaatatatgtttcacgctataattctttaaaacttgtatatctaaccattcacttctattaaccttgtaaaaaaaaaaaatctagaaaagtaaagaaataaaccaaaatttttttcaagttcataacagaaaaagtgcaacaaagtgacataaatattacaatataatttaaacaatcacatgaaaattaatacttcttgttatttttgttatgaattgcaaactcggtatttaacatggctcctaaaagaatataaatcactaattagtaaagaaaacaattataacataactcaaaataccaaattaattatgacatatataactcaatatcaatattcactaagccattatataatgaaaaaattaaaattatacaataacttcttacaaaattatcccaattaaacatgctaaaattgatcaaaataactcaaattatagatcataacacaacaacaacaaaaaaaaaaaaattgatcttataagttataacaatgtagtatccataatagactaaaaataataatgaaaaaaacatagagttcgataataagctttggctttcataataaatgaaaaggaagctttagcaaattatttttttaaaatggaaagaaaaaatatttagcacatgattttttaattatataagtgcaaatatattatcacataataattttgagcctcaaaggttagaaattaattatgaattaccctctatttgtgtaaagcctgtcattgagagactacacggaccttaggtggaacaacaaggttggtctttgatgggtgcacccctttggacagccatggctacctcgagcctatcttaaaaacttaagtcatctccaattctaaattgtttagcccattatttcaaaatcgcttgtcgacaacttccatggtaacaatggcataaatcaagaagatttaaaaaaggttatatcattaaggaattgcattgtttagaaatttataaatttaagagtttaatatagtttgatacgaaacaaatatcttagcatctttatatacactagatgagagttacgtggcgannnnnnnnnnnnnnngttttatttaagttctaatggtttttgtttaagaatt

SEQ ID NO: 123132 - DNA, 2039 bp, Cannabis sativa
atgcgcttcgacgacgtggatgaagagccggacgagccgaggttgttagcttttctcttctgagctccgccccggcgccgcgaagaggtgggctccgcaggcggagaaaattcaccggcgggagacattagggttccggtgtcccggcgtttctcctccatggaagggttttctagactatgggggtgtgaatgccagtctccggagtcgcacacagttgttttgtgttttgtttcctaattgttatgtttcctctcaacttgaaattctttcattggccaaacagagagagagctgggattaagacgaagaaaagacgttagccacgccaaccatatattatttttatttgatcagttttacttttaccgcaagtatattttaatatgggatgtttgataatttattcttaaaaattgttcatattctttagtatctcatattaaaatacatagcaatttaatactctaaaattaattaaattttaaaatactctcctcatacttttttttttctctcggctctctctctaactcttacaaaacccaaccgatacccacgaccacagaacaagactgaaccagacccaaaccaaatccacgatcaccacactagctccggcgaaactcacttcgaaaacgaaacataagacaaaatcaaagaggatgtcgcaaaatcacaaagagaaattgtaaaacccaaagccccaaaatctatgactttaaccaccccgaaacccccgaaatccctaaccatcgttggaattctcaattcacttgtttcttgcattttttttttctgatttttgatgatgtcgtgaaacatcgctaaatgtcgcgaaacatcgcgaaatcgtagaacatcgctaaatgtctctaattcacaacatcgctacacatcgcttaatgtcgcaaaatcatacccaagttttcacgatgattagcgatgtttagcaatgtgatatgtattttttagtctcatatcacaaatacatcgctaaatacgcaaaacatcaccaaatattgcaaatcatgttaaacttcatccctaacctcaaatttgttctatcattgcaaatacatcgctaaaaatcgcaaaaatctggtaaactagaaaaaagaaacacaaagaatgggagaggtcgttagagaagacgacgtcgaggccttgcgaccgggattttgagtctgtgtgttcgacattatgcgttttgggtcaaggttgacgccaaagagtgagacaattagagagaagtttgttctatcatagcaaatacatcgctaaaaatcgcaaaaatctggtaaactagaaaaaagaaacacaaagaatgggagagatcgttagagaagatgacgtcgaggccttgcgaccggggttttgagtctgtgtgttcgacagtatgcgttttgggtcggggttgacgccaaagagtgagacaattagagagaagtttttctttaaaatctaagggtatttttgggaggaaaatatattaaaagtacatatatagtatttttaatttaagcatgcaaagcaaaatttccctttaatttaaaaaaatataagcttaaaataatttttaaaatttatctttaacattattttaagaaaagagttctgacattattttttgttaatttcaacacttattttaattttatttttataattttttaaaacatatatattttttattttttttagtgtaattttttgctatactatttcagatataatttatttttgtttgataaatattatgtatattttcaaaaagaaacacgtgtaatccaatattgtttagttcagccactacaggcccaaacataggcctaaccaagctaatggactggctcgattagtaaagtcaagtaatctggatgacggacagatgactcatatccagcacagcaagtctctagatagcacgaagtagtgcttctagaagtgtaattaatgagccctcaaatgttgagtatcgtatctcgcacattaattattatatcccaaattttacactctgacgtggcatcacgaga

SEQ ID NO: 123133 - DNA, 2103 bp, Cannabis sativa
aaaatttggagtcgatactttagaattgtgatttgagtgtgagacatgacttgatcataaaggattaaaatagcttcgaaacgcaagttgaatcgcatcaattagatcaatattgagtgagttatgatcattatactgggcccaacacttaggtagacatctagggctcaggttgacatgtgacgtcaacttggatgctaggtgagtaggaaaacgtatcgggatgtattttttgatgcctaagtgatatttagacatcacttaacttgattttgtgttcagacaaagttggtcaccagttcttggagatgctgttattctatagaaacgggagactcgaaactacccaattttcgagtaagttactttcccgaaaaagtgaaaatataaaattgtgaaattgactcttctaactttatgcctttcaattattatgaaaaactaaaccaacgatcaagagggaatcaaaattggataagcataacccagcacatcaagttatatgtcaacctgggcactggtgttagttttttatggtccatatcagagttagaaaagtggaagcaaattttattaaaaaataatttaatccaatataaactataatctcaaggatctcaacataatatatataaattaaatctaaacaacatgaaaaggaatcaataccttttttagactatcaagagatcctcgattcttctcataataaatatcaatcatcaaattctttgctatgaacagtggtgaagacttcacaccagagtcttccagaccaaccacaatacttaagataagagtgggcttataaatatgatcagaagaagaatttctatcatggtgtgtctcaactcatgagacactgtgattatgagatgaagataaaaatctctcacaaggaagagagagagtgtatgttttcaaaaatggtagagagagaaactctttatattttttcaccgtatattatataataagttctattgttatttttattttattgttatgcattactaatatatcatacatatatatacagtattttataattaggattaatagaatatattatatttaatttaaaattcaaattcaataatatcattaattgaataactaaattcaactaattattttatattatctttactcataaatattttatccaataaaatatttaattcaaataattaaaagataatttttattttattttgatttatttaattaataaaataatcaaaataacatctattgggtcttatatgtaaccatacacttgtgggcctatagccccatacatgtgggtcatattttagagtccaaaattgaattattaattttgtcttttaaataagatttattatttacaataaataataattaattaattctcattaatctcctatttagcttggattaaataactattattttccactaaaataataagcttctctctcataatatgatttaacaataatattatatttaactaattaatatagttttatccaataaaactaaatagctaacttctattttaattattcaattcacaattgacatatttatacaaaattactattttgtcctcaataattatttctcttaaaaattaattatttctcaattcatcttacaaattatatcttctcatgtacagtgttatatggaggtgattactgggaccatggatcttgttatcccaaattttgtccacatgacctggcgtttttacatattcaggactgaggacacatggaatacaactttttaataataggacaaagtctccttacacaacatgtcaactgttaagggctttaaagcaatcaagcaaaattgtcaagcaataagcgaaaggagtaaagcgggccgtcatgatcctgaccaaccatgtctagtcggccaaggaaagtgtgaaggccgaccagaggaagcttgtaggccagccagggtttgagcacaagctggccgaccaaagagttactgtcacgactcgagccctaggctgtggcagatatgtaatatccataacttgggtggtcaaaggtcacactttgacccttgtaggaacataaagcttataaatgatccttt

SEQ ID NO: 123134 - DNA, 584 bp, Cannabis sativa
tctcacacacatgatcgtttggttcagcagttgatatatttgttttgatcaaaattttctattatgaatctcatacatataataaacttaaaataacggattgattgtttataaaattgtgtttatatgtgcatttatcatatcaagtacaatattcatattatttttctttcactccaatacatattttaattaaatgttttattactatattattattattattatttaacaaatgaatccaaagtattattagtacaagttagtaagatatgagaaaaacaaacaaaattggttgaatcaagtctatacattgattctcaacttggaattgggttgatctataatctattccatgcgaagcttccgttgcggtatgcttctcaactctcaagagattttaaaggaataattcaagaggataattcactcaatggtagatagttatggatttgattagttaaataagaaatcacttattcgtatgatcttattgtagaacataggttggtgtcatttaccatttattaaggagaaatgctaaaggacgtcagcggtgcctagcaccccttatgtgtcaatat

SEQ ID NO: 123135 - DNA, 1297 bp, Cannabis sativa
tgattatttggattgaaacaatgaataattaatagtgtatttatatttggaacatatatagcgttctatataattaggagtgcaattttaaatctatagcaaagtcaggaagaattaataagatagagaatttactcggtaaattcaagaactacttattaggagcttgattatataggctcatggtctccgcactagttgagataatattgacttgtagactcatttaattgattttaattaatcaattagaattctaaattagactatattttatttatgaatttttactaagaaatgtcttaattgagaagaaagagaggttctgggatttatttggtaattgagagactttgtaaagtctaattaataaataagttaaatgagaattttatttgataattagttataattcttaaatatatagatttgatatttataggattagaattaaaatatgacatttgtgaaaaaaaaaaaaaaaagataagttgataaagaaaatgacaaaatcgaaacctatagggcaacatataggttcgaccaattaaggttcagttaagccattatttttttaaatttcatataatttatatctaaccctagatgaaatacaagaaaatataaaaagcctctctagaatttgatatactctctttttcttcttctaattttcaaaccctatagtgagttgagtgcttgtctacacatttcaagtcaatactcaaatatagtgtggaagattgtgaagaatttcatcacctgaaggagatccaggttcaaatattggtaatactctgcgacggaaaggaacaagagttagaaatctgaacgaaatgagctattatatttcaatgtcaccaatgtaaggttttaataattttatatgtatttattttattgttttaggaaattcatatttaagatgttagattataatcctataatcaacatacgcaaatctagatcatgttaaaataatttccaacagtgtcacccagatagatgtcatgtcattgtgctgaaattcaaataagaatattatattttattacaaatatatatatcataactaattaaaatgtatatatattttttttgtgatttttttaaggtgaaacgactatgccctcacttctatgtgagtccatcgtgtaaagaatgtaccaatagtttagtggataagttggcttttttaattttttatgtaaaaagaaatagtaaaataaaaaagggaattacctcatatactaattttttttaacttttttttttaatttacggtttgggtttctaa

SEQ ID NO: 123136 - DNA, 1506 bp, Cannabis sativa
aattatatgattatttattaaatctttctcaattaaattatagagcacctaacataaaactaagtatacgtgctttgcacgtaactttcttctagtatttatatagatatagatatatacatataccctaataatctataatcatcaatatatcaatgtatcaatctatatatttatatatctatatatctatataaaggagaaatatgagacggtgatgtcactctacaatggctttaaaactatttttctctactctccttaattctctcattttttttaatttttttattaactttataaatattaattgattaattaattaagaaacatatttagtaccctaaatatcttctaattaccatcactaaatctatacattcaacatttgtttttttaaaaaaatatacgtataaaattataaacaatagaccatttaaagattataaatttcaagtgatagtatacaatactttttcctttcattgtcttgccaaattttgtaatttaagatatgtgattttatttgtttatctcatgattttttcaagcttattcataaattttcaatattttttttattaaatctcttaattttggttgagttttcaataattttttaaactcatagcatttaacaattacttttttatatatgattattcttgatctaattatattatatggtgaattttttttgtagattttttatttttaatcttttctttcttaattagtttgaccataagtggggttgatctctttatttttgtaaatttcccattttttttctaataaagatttattcattgaaattaaaaattaaaactcatactataaaatctattctacacattctacgttactttatatatatagtttaatcatttatggttattgattatgaacgtgtttattaattttttaaatatatatatttaaaattttattttagtgactataataaattttaataatggtgattatatgattttaaaatataaataaaaaatataagattaaaatacacgatttattaataatagtttattttttgctaacaaaaaattagtcgagagctaaaaaaaatacaatacaattgcacacatatatgtcatatgtaataatttaagtgagtttgacttaagaaaaaaagggcaggcctttcaaagaactatacttcttgactcttcttgattcagtctatataaattatattttttattcttttgggtaatttatataaattactttaatatttaatatatatgataataaattaattaaaaaaaatatttttttttctgatcacactttcgtttttttaagttagcattgagttaaattattttattttagtaaatacgatacttattattattatgaaaattatttcatttaatttcatattttaagtatttgtgtcacaaattttttaatagtaaagttaaaattttaatataattttactaagtaattattattaatcaaaatacacaatttatt

SEQ ID NO: 123137 - DNA, 4131 bp, Cannabis sativa
ccttggttggtgatcggtgattttaatgaaattctttcaaaccaaaacaaacttgggggtgctctacgaagtgagtctcaaatggataagtttcggggtgtattggatttgtgtcacttacatgagcaacctttcgaaggagatccttacacttggatcaaaggacgtcacaatgtaaatgctattaaggaacgacttgattggtgctttgttaacgatcaatggcaaggttgttttgagccaaatacaacacaacaccttgactattacaggtctgaccatagagctatttcagtcacggttaggcctttggttagtcaagctcaaagcgttcaaagacattcaaggttcaggtttgaaaagatgtggctaagtgaagcagcagctactgatattatacaccagaattggaaaaaaaaacctgccaggatcatcaattgagaacttctgcagcaacattgaagcctgcaccaactctctccaacaatggcataaccaaaagtatgggaatatgaaaaagaagatcaaaaaagctcaaaaggaagtggaggatctcaataatgaggcagtaagaacagcggactctatgtcaaatctgaaaaaaaaaatggaggacacattggaggaattgttgacaaaagaagaggaatattggcaacaaaggtcaagggtcgattggttacaatgtggtgatgagaatacgaagtttttccatgcctatgcctcctcaagaaaaacaaataacacgattaaatcgctgcaaaattctgcaggagtggcagtaggatcaaagcaggaattgacagatataatttgttctttttttgaggagcttttcacagcatcaggtactgatgtacctgctttggatcaggttattgaatcaattcctactactgctacggcagatatgaatcgtttcttgctgataccttttacagagaaagaggtattcgatgctctccgaactatgagcccagataagagtccaggaagtgatggtatgtcggcaatgttttaccaacactactgggatcatgttggttctgatgtgactggtcttgtgcttggagttttgaatgaaggccatgacatgagtagagtgaacaagtcaatcataactctaatcccaaaaattaagaagccaaaagctatgggagattatagaccaatcaacctttgtaatgtaatttacaaactgatatctaaagtcttggtgttgcggtttaaagacgtgctgccctctgtaatatctgaaaatcaaagctcttttctcccaaaccgacttatcacagacaacatactggtggcttttgaacttgtgcatcatctcaaacacaagacacaaggtaacaaaggctactcggcacttaaattagacatgagcaaggcttttgatagagttgaatgggactatttatctgctatcatgggcaaaatggggtttgaccaacaatggatatgtctaatcatgcgatgtctctcctccaatagcttctcttttcaattgaatggagaaattgtaggaaatgtttggccaacaagagatcttcgccaagggggtcctttgtcaccttatctcttcttaatatgttccgaaggactctcacgactactgaaccgagaagaacatatgggtaacttgttaggattgaagcttactaggcatgctccgtcagtttctcacttactatttgctgatgacagtctcttattttgtcatgcaaagaagttcttgatgtttgctccgtcagtaattcagccgtggccatcaaagaagttcttgatgtttaccatcgtgcatctggacaatttcttaatactcataaatcaatcatgtccttttctcccaacactacagatgatgcgaagaatttctttagtcaaacgttgggaatgccgatttgtgagtgtcatgaaacgtaccttggtctccctgcttattcaagccacaacaaaaaaagaattgtttagcaatgttaaggaaaaatttggaagctgcttcatgcttggaatgaaaactcttctctgtaggaggtaaagaagttctcttaaaggctgtggtccaatctattcctacatacgctatgagttgtttcaaactaccaagtgggttctgtaatcaaattgaatcaatgatagccaatttttggtggggtactaacaaggatggttcaaagatccattggaaaaggtgaaaattgttatgcaaatcaaagtttgaaggtggtatgggctttcgttcgtttgttgatttcaatcaagctatgctagcaaagcaggcttggagattatttctcaagaaactccttcctcgaggcgcatcttggacactctccttccttgacatggcaaggaatacactgggggtagggaattgctcctaaaggggctacgatacaagatcggtaacagatttcaagtgagaagtggtttagatccttggatcccaggacatgatgaattcagaccaataggctttactggtaatccatctttgcctgtatccacttttatacttgacactatgaaatggaacatggatctcttacatgccaactttgctcaaatcgatattgatcgtattgtaactattcccttgagcttttaccaatcacaagatagggttatttggcaccataacacatctggggtatattcggttaaatcaagcttccacctggcaaactcaatctcggagaaacttcaagaatcatcctctgatgatttcaaaagttggtggaaatttttttgggctctacagttacctccaaaaataaaaaattttgcgtggaaagtcattcagcaagccttacctgtggcctcagctttgcacaagagaaaagtcattgattcagcttcatgctcaaggtgtaacaatgcatgggaatcaattggccatgctctattcacttgtaaatatgccaaatctgtttggaagaaaacaaattttacaattgattttcatcatgcacatggtatgtttaatggggattatctaatccacttggcaaaattgatggagaaagctgactttgagctcttaatatgtgtaatgtggtgtgtttggaatgatcggaataaagttcttcatggtggtacatcccgacagccgtctgctatgccagcttatgcaaatacctacatggaaaactacagaacagccaaacttacctgctgcaataaaaaacagcaggtccattcaaactctgatctacaccatcaatactctccacatttgcctggcactacccacgatcagatatcaagatcagacattgatgctgaaaccatgaattcatcttctcagcatgtgcaaccacgaccatacttaggcagaaaccaacagttagcacagcccatagttcgactatataccatgatccacatatcatggatgcccaaaataatgttaaccatgttgcatcaaatcacaatctctattcaggtcaccaagcaaacaagcagtaaaagaatcaaatagcatgggtgccacctgaagggaatttgctcaagatgaatatagatgctgcttccaatttcgatgacaaaaaattgggaattggagctgtggtacgcaataacaaaggagttgtaattgctgccttttcaaagcgagtccaaggttgtttcagaagtgatgaaatggaagcaaaggcactcttccacagtctgaattgggctacacaactacaattgcaaatatctatgtggaaacagacgccctaagagtttcctttgctttaaattctccacgtggagatttatcttgttttgctgatttaattgatgatgttcgttgtcttttatcctctttccctggagttactgttactcatgctcgtaggcaagctaaccaagctgcccacgacttagcaaaatacgctctagagttggatgaagatgtatcttggataggcgaaataccttatcctattttctctattattgtaaatgattgttaatttataataatatggaaaatttctcaaaaaaaaaaaaaatagtattatacaaaaatatgatacataattcaattcaatataatacaatacaatatgacctaatatgacgttccaaatgagctcatatattcaatttttttagttaagtaatgtatttttatttttt

SEQ ID NO: 123138 - DNA, 1757 bp, Cannabis sativa
atgtctaaaaaaaatatatatatacaataatagaaaattagctaataaggaattctttctttttaattttaacatgtgctaaattgtaattcagaccctaaaattattaaaagacctgtaatttaagaaaaaaatttaatggcctaaaaaaattggtgggtactattttggtcaatgtcaaagtttagagtgataaattctaattagctttaaaaatacttttgacaaatcttaattagcttaaaaaatagttataaaaatatagtatttgtaataaatttttgtttctttgattaattgaatttactaagattttatgactgtgtatttatatattttgttgtgtttttgtacggaaaaattatttaattttgacatgtactttattttacaattttttccctaaatttttgttatttcctcttttttgtcccctttaaattttcaagtattgattaactaattgacgataataatttgtactgaatagtatgtatgcatttttttttttcttttcctacgctagagtatattgccacaacatcattacaatacatctaattgtctaaatgtcatcattgttaactattacaactaacttattatcgcaaaaaattattgttgtgacaacattatcatcgcaataggtcatatataatgaaaatacataactataatttgtacattcaaatattttttttatgtagtgattagaatcacccatgaatttacgatacaaatattcacaaattgcgtagaaaactcctcgaactaggatagctcaccgtctaaccgaaggacaagcttgtcattcgaatattattttgatttcattagtaatgagaattcaaagtatcacacattaaatcagaaacatatatattcaacaactaaaagaagataattttttgggatcccctatttttcgtgtaattggtttcactgtttcaacgtgtacaatataatttcacgatgctactattcaaattttcttttacaataacaggattgttgttcttttttatgttgtatttcacaacaattattttcatattattctgtatttgtattatatggtttttacaatattattatatcgcttacatgacgttacggaaaaatgactagaaaaaaattcttttaaaaataaaacgtagcgtgaaaatgtattaaaaaaataatgtcatttttaggtactttgtataaaaatccatttacaaacaacattaattaaagaacctatttggacgacgttgggcactatctatctatacatcgatatgatattgcccaccttagtatgcaatttttttttcctttccaacactactggaaaaagaataattatatataaatataatttttttaggtcttaaatgttgtcattatagaatattaccacaatttatcgtcgcaataaattaatttattgttattgttactttttattttaaatatttttgttatatccctcatattttctcaaaaatgtaatagaaattttacgaaaatttaaaagtcattttgatggcataatcttcattcaaaaagacaattaatatactataagtcatacaatcaaatgcagctatccatgaggaacaacatcaatgaagatcataaaaacaataatatagggtaagagattcaaacaaaccatggtaattatagatttattttgtgatatactatttaaattgagatatataatttttatatgttaatacatataaaatgtatatgagttatatatatat

SEQ ID NO: 123139 - DNA, 675 bp, Cannabis sativa
ctttagtgttgtgaagttgtggtagtgtctaactaattcaaaagtaatcttgttgaattggcatcatctcattggctgcataagaaattgactacataggtcgattgtgcaaaatcacacgattgtcctaatttttgatgttgtagttgttgtttttgccttttcatttcaacttccaatatcatattatatgaggttttcaaagcttctattaattcaatgttttgactcacttaacagttaacatatggatcaacattcgtgacttaaaacaacttcaattggtaaaatttataaatgggtgactattaacaattacattaaaaatatgtaattatagtggttatattttttcttagaagataatctccaataagagaggtaagaattgtgctatacttagtataaaaaataattttgtggtaaatttatatcaaattttaactttgtgcttcaatatacaattgcaaaattttaatgtaaaatttaatatctaattaattttttattaaaaaataaaatctaataactttataatcaatttaattattattttaatgtgtaagagaataaaaaaataatataattgtttcataatttaatgtaatagttaaatatattaataaaataataaaaatgacataaatgtaaataaaaaagggaaatttgacaata

SEQ ID NO: 123140 - DNA, 1071 bp, Cannabis sativa
  modified_base (1032)..(1035): a, c, t, g, unknown or other
taatatccttaattttattgaaataatatttgtctcaattatatataaaccaaataattaatatactatttaatacaaaatacttattaataatttttgtttattattattttttaacagctatacttctattatagattaataataattgttaaagatagaccataggagcaacaatttaatcacccatatttaattttttttattgatgattattatgattaaatcctccaaaatatcttcgtatcttagacttttaaattacaccatctatttttttcaattttctgaaaagaataatccaataattatgttttgtacattttagggaataatcttatccatgaaataaaaatagacctaacttattgagttgggtaataacccaagacaaatagcactattttcttttgttgcaacttgcttattggctttatgactttttcaatttgcccttttttctttctaataaacttaaattatacccaaaataataaatcaaataatataaaataaagaatttttatcgtccattctctaaaataagtgtatcgatacaccattttatattttcgacatcaaaatatttttttgtatagtagacccagaattaatttagtacatatgtaaaataacttaaccattatataccaaacttgatactatatatgtatcacttttaattataaatatatgttgtaattaatcaaaatacatacacattttttctcgatttttttaggttttgaatgtttccttgcctctatgtgagtacacccgcctatatgtgtgtgtgacactgaaaatcataattttctaagacatcaacatattttcgaaaaaaaaataaaataagtcaactcgtcaaatataatgtttaaaattataataagttgagaggtgtgaaataattaatttaaactcatattataaattaattcgaatttttcaaaatttaacaaaatagtttaaatatactattatattattatgaaaaaagaaataaaagagattttatttatttatttattnnnnttattattattattttgaaatgaagagatttttaga

SEQ ID NO: 123141 - DNA, 798 bp, Cannabis sativa
aacaatctcaatagtttgggggaaatttctaacggccaaaaaaagtttagggggcacgatttagtacatgttaaagttcgggggaaaattactaattagcctaattgattaattatagtctacgtgaaaaattaaaatagaggacaacccaattaattatccttctttcattttttttttgtaaggaaattaataatctttcttattaagcttaataattataataatatgtgattttggacaacaaatacaaaccgatcgaagctgccacagtacatgatgtcggtgtattaattaatattaatatatacatttggttcttctgtattccctgattttatttaaatcataaaatatttttgtgaacctacgtttttcgagttatcttagttttgctttggtcaagaaaaattgaagtttctccttctcaaaagaaaaaaaaaaaagaaaagaaatattgaagttttaaaaaatatacatatggtagatattattttgtactgtgttttctaaaagttttcattaaataatgactgtgttttgttatttttttttaatgagtatttttattggacatcaatagaacttgatattttttacaggtggtactacaaaattggttagtaatattctttaaaataattttttataaaattatatgagatctaatacaattaattacactaataataatgagggccggccctgaaaatatatgggtctaagacgaattaaattttgaggcctcaaaaatatatattaaaaaaatatcataaaaagagtgttatgagatttgaa

SEQ ID NO: 123142 - DNA, 925 bp, Cannabis sativa
cctatctctgactacttctctttaattgagataaattctttagtctttctaccattatatttaaacctcaatagaaagtatacattcatagtactcacaactcaaatccatactttatctacataatcaaatcataaatatgcgttagcttaatagaacattccaaatacaaactcccactaaaaccagcacaatcttaaataataccacgtcgatatatgatctataaacactttattagtttgaacttcattttaccttgtagaattcaaagtcaatgtgccttttaccttgtagagctcatgttgttactataatgcaacctgattgatttattgtcacaacatacatatatatatatctttaatagttttcaataacatttttaattttgaagccttgtgacaaaaatctcactactgaaatctttataagatcagaatcaaaaatcttaatgatctttatctgatttttgataagtgaacatataatattgtattcttcataaattcttatagcctatttggttgcatactaaaagtttttttatcgaattatttaaatatctattcaatatttttgatatgtatgttaaatgtaaattcacatacatacttgagcatatattagattctaaatataaatgaagaatctttcatatttcttgcatttgaaggttgctttcaggacaatgacataacttattttttttagctacaagcatatcacctagtatagtatctttcatgccaaaagctttgaataatttattgatatatctattttgttataattcaaaaatatccccatgacaatctcacataccttcaattcttaatccaaaatgagtacatcattagtggcaggcaagtttttactaatatataataccacgatgtaggggtgttcatcaaaccgcttaaac

SEQ ID NO: 123143 - DNA, 1410 bp, Cannabis sativa
gatgctacttgggagcaaaatgcataatagtagacaagtgctacagtcggttataagacaagggaacactgtttcggccttacaagcagaaatgcttcttcagagattttcttttgataaagtgaagcaagcaattattgcaaatcttggaaataaagctccttgcccttatggttgctctagctttttcttttaggataattgggacctgataggtgctgaagtttgcgtaactataacatcctttttgcactcaggcaatcttcttagggagataaactcgattgtgttgattcttattcctaaaagtaagtgtcctaacacagtcgctgattatagacctattgcctgctgcaatgtgctttataaagcagctaccaaactgacatgcaaaaggctgaaatctgtcttgcctttccttgtatctcaaaatcaaagtggttttgtgcaaggaaggttcttggacataatatcatgatctgtcaggatctcataagatattatgggaggaaaagtgggaagcccaattgcatgatcaagctacacctacaaaaagcatatgatacaccagaatgggatttcattgaggagaagtgtagtgccttcaagtttccagaaagattcattaagctcattatgttttgtgtcagaacaccaaggttttatttgatgttcaatggatcaatgcatggattctttgaggcaaaaagggaattgagacaaggtgatcccatggcacccttattgtgtcttgggtaaggaatatatggccaggataatgaagaagataagttcaaagcaagatttcaagttccatgagagatgtgtggatctgaagttaaatcatcttagttttgctgatgatgttctgcttttctgtaatggagactacaaaagcatttattttatgctgcaggggcttaatctattctctcaaacatcaggtctattccatatcccttcaaagacttctgtttattgcaataagatgagtgacacagacatccaatgaatccttgatgcttctggactcaagagatatgaggtgccgtttaggtatctgggagtaccaatttgcctaaagaaaatatcttcattagaatgttcattgctagtggagaaaatggtagctggaatccgaacatggagtactaaacatctaacttttgcaggaagagtggtgctcactaactttgttttgatggccattcactcgtattggagtcaaataatggtgttgccaaagaaaattgttgctgaaatagaggctatttgctggacttttttgtggagtggtagccaccaactcaagggggttgctgccgtagcttggaagactgtttgcaaggagaaatcagcagagggtttgggcctcaaacaggtaactgaatggaatattgctgctatgtt

SEQ ID NO: 123144 - DNA, 1619 bp, Cannabis sativa
ttaaagatttaaattaaaccacacttttctaaaatttatagattaataataataagtttataaaagcacacacgtggcgttcctgagggtcagggcgttacaggtcgcggcaaacgatgaccttaaaattctggttagtgaaactcaattcaatcatgttccttataaaattcaacagggatatgctttctttgaacctgatgttgacaaactacattggaccaaagaggtttggggtagattcaacatccccaaacattgttttattttgtggttggctgttcaaaattgccttaacacaagagacaagttgaatcatataaccttagtgcaggattactcgtgtgtcctttgtggcttggcatcaacatttgtcttgcatctcttttttgagtgcattgttagaaagaaagtgttaaaagaagttaaaaattggctgaattggaatgcaatgaccacttctcttcatcaattgattaggtgtattgaaagatcaaaaggtagtaaagttaaaaaaaattatttctgttagcttgcattgcagctttggtctattatcttggcaagctaggaatgaggccttttgctctttgaaagttacttggatagaagttcttgtaaggagaatagttgaaagtattaaaaatagatttttttttgtgtttggccaatgtttattggaaaacaagatatataatggtttgaaaagttatagattcacacttgtatagatatttcaggcctattttgctaaagatgttaagttgtaaatggttttgttatcaatgatttaactttctgagcttccaaaaaaattaccaattaaagcacatgttgatagttaccaaaagacaaacaattgataaattttcttagtccataagtcaagtcacatgactccctctttttattaatattaattttttttcgaaataaaaaaaaaagacaaagaaactaaaatattttatacaaaaatcaagtaattcttaagcatgcatctttccatgtatcatgaaaaggacaaataatcatgttatgcttttaaagatgataaaaatttagtgtctcaaatacaaaccatacttaccaaatattgtgaaaaactaaacaagttacatgacatatcatgtgaatacgaattttttttatttgaaaagaggagacttacaaacttgtatacacttgttaggcattagtgtgtgtatgaaaaatataatcattgtccttttcataattttcatgtttcacctttttaaatttgatcccgcaactggaagttgtcacaccatactgaaagtagcccttttctatggaagtacatcctcttcataactcctaattacaaagttccagcttactcaaaagatgacttttacacttcagtataggtagctcttttaaagtaagggacctaacaagaaactgaaacaaaaatagctcaactttgtattaatactttaatttatcccaatcacacatatgtaagtaacttaaatcttttaacccaccttcaaaagtatgaagattacaaaatactaagctaattatcacccaaaagcataaacattgtaacaccctaactaacataggcgtgttaacgtgattttaaacatactgtg

SEQ ID NO: 123145 - DNA, 3538 bp, Cannabis sativa
  modified_base (2860)..(2862): a, c, t, g, unknown or other
ttagggtataaaacccaacattatattcctatccactccatctagacaagctactacgggcaagaaaatcattaattgtccaaagaagagttgtgcgcatgttgaacattgagttccttgtagcatctctagtttctacaccaatagtccacaattcattcagctcgtccaccaatggccttaaaaatacatccatgtccttaccaggtgacttcaatccgagaataaggagtgtcaacatgaaattattatccttcatacacatcaaaggtggaaaattataattcaccaacactacagccacatactatacgaaaggctcatgttgtcgaaaggattaaatccatcaacagctaagcctaagcgaacattccgaggaactcttgcaaagtcaagatgtctgctatcaaagtctttccacacggcaggatcaacaggatgatgcataacaccattttctctcacacaaccagtatgatgccataccatctctttggctgtatgtctcaaactgtataatattttcaattgaggagtcaacagaaagtagcgcatcaccttatgtgctactttttttccgcttgtgttctcattaatccatctactttttttcctagtttcttcttagcctcatgctgtgttggaggaattttattctccttcagaaatgcaaacttcagcaacttgaacaattcatcaaagatataatttggtactttttccaaatttttcgtgtgcatcaactttgctataaagttgagggaggatatccaatcgcaacaaaggtacaactctgcctcaatctcctcaaatatatcatcataatattgacccctctgaatgccatcatcaatagctctttcctcatcatcatttataagagggaaaaaatcttcaacgacatcaaccatttcatccgcatcgacattgatgttagcctcgacaggttcattcggctctccatggtaaatctacctctcataaatgttttcaaaaccctttgtaaagatatgtgcctccacagtattcaaaggatacaatctggtattcttgcatttaacacaaggacaaaaaattcttctgtcacaatctttgtgtttagacgtaagcgccataaagacttggagaccttcccactaagctggatcctcacgatttctgatggtcacccaagtcttatctattgtcatctaccaaaaaatttacattgaataaattataatcaaattgactagtgtgacaagaattttataattttatgtactagttgaactaaaggtaatcttatgtcattttatgaaacttttttaatttttatttgaaatattaacttaataatatttatatcgtaaggatattaaattatttaaattagttttatttaattaaatattaaattatttatctaattatttattaattctttttattataaggatttattaatttttaaattaattacttattcaattatttattatttattttcaactaattaattttatttattaattatttaataatttattattattattattcaaaaaatatacaaaaaaattagttaaattacttaattttcgaataactttcattaaattttttaaataatcattcatttaaataattgtccattttaaatataatttgttaatattttttaaaaaattactaacttattattaattgttaaattaacataatttttttaattatctcaaaattttaacaaaattatttatttaaatttttaaattattttattttaattaaatattaaattatttattaattctttttattgtaaggatttattatttattaaattaattacttattcaattattaattacatattttcaactaattaaatttattcattaatcatttaattatttattattattttttaaaaaatatacaaaaaaaaatagttaaattacttaatttaaacttaatttcattaaattttttaaataattattaatttaaataatttctcattttaaatataacttgtttattttaaaagaaaaaattactaacttattgtaaattattaaattaacataattttttattatctcaaaattttaacaaaatttcagcagcataacatttatattttaagctaaccaaaaaatttaaaacctgttctaaacactccaaaatttttcaaatacatcacagatttttaaaaattacatattttcataataaatcaaacaatttatacatttaaaaaataaaaaatcacatataatcacacagaacattttcaaaatattaatatttatattataaacattatatattttacaaattaattttttttacatataatgaataagtataagaaaaaaaactaacagtgtgacgactcctatatatgagcagatcgtgtgagttgcttgtggtggctccaatataaatacacacactatgtatagatacaagaatttaaataaaatatatatacaaaataatatatattaaagagaagagtatgagagataaaataatattacctaaaggatggcgacgggtggtggtctggcgacgtctcaggcggaggagaggaggcggcagtactagtggtctgaccttaaagaggatcggacgatgaatattagagaatgaagaagatgatatggtgatatgaagatgaagagggtttgatttttttagatgtagaagatgaagatgatttgaatattgacaagatcattctatgcaaagagaaaatatacctaaatccacttgaaagtaagatcatttatatttgaacaatggatgtacgttcaggggtggatatgagttatcgttaaattctttggacgatcactctagattttacctnnngcaaagaaatttgaaatatttgagaatttcatgaatttcaagcaatgttaaaaaaaacattaaggtaagtggttaaagatcttccctagaaattcaatttgcatattgatgatagtataaggtttatgattagttactagtagttgcttaagtccttctacggaaatatcctagtgatagaaaaatttcagaatgataggatggttatgtacttagtgtaaaccattactagacttatggatgacctgatcgtaaacttaagaaaagctagaactgttaactttggtttgcatgtttgatcgctattgtaagtgattaggggtggaccatcctatggtcattaagataaaaaagtatttgtttcaatagatactattttctaagaatatgactatatctgaaaatacagtggcaaagtagaggagatattatttgattccatggtgttatggtccggtcccactgcctctgttgtattgacacaattaatgaggacaataacacttatgttcttagacaacaagtcacgataccttgtcgtagtgggaggattttaaggaaatcaacctgttatgtgttgcgatatttagcacacacaagtgtacgtatcgtttcaagtagtagactcacgaggagtgaggtcgatcccacagggagtgtaggtaagtacgttaaa

SEQ ID NO: 123146 - DNA, 1181 bp, Cannabis sativa
tctctctctctctctctaaagatcacatctcaaaactcatatgatctcattttcctccaaaatgataagtgttggtagtactcgtaggttcaagatatagaccataaaagtcagtagatgcaagtgttaagttagttacgacttaattaagaaactcattgtaataatatctctacatcaacacaagataaagtgcttccagatgaaaggtacgcttcaaggaccaagaaccaaagcacacgttgaagagttttcccagataaatatagagacaattggagtagactatccgggacttccttccaggagggaatagctaaccatccataactcttttctggaggaagactagctttcctgaagactccttccaggtgaacatgatagacatctgggaatactcttccaactgacatcaatcattccacaagactttttttggatgttcaaattagactttcgggaacgcccttctagaaaacatctaacttttcataacaagaacaactattggatatatttttatttagagaaactataccacaccttttgcttacgttgtaaacttttttatttttttaatgtgctttataatggaatggttcactagtcatcacaaaattaatcgttctggtaaattctctatttgttttattattcaagagagctttttagtctttttttttttttctttttttttttttttatgatagcatgcattgtagctatttaagattacttataaattttttagaaaattctaattataaattttttttataatttttttttataaattttttagaaaattttgaatagtttatagtaccgagaataaggtttaaatagtaccacacatatataaaaaaaaaaaaaaagcagtcatgtatacaacaaaatatatgcatcttattttcaacatcttaatttacctagaattttttaaaattttagagataatcctaaataactataacgtacactatcatcaaaaaaaaaaaaaaaaaactaaatcctttattgttgaaatatataagtccaccgaaaatacccatttaagagtgcactataaacttacctaaaaatatatatatttatatatatatatatctaaatctaaagtaacatgcaactacatatagtatgatctcggatcattttttggttagtttaatggattt

SEQ ID NO: 123147 - DNA, 1292 bp, Cannabis sativa
ggtagttagggtgttacacttttcacatagctgcctttctcattaatcaactacccaccccagttttacaaaatcaatctccttctgagtatctgtttggtcaacctcctgattacaacattttgaagccgtttggctgttcttgttatccccatttaaggtcctacaataaccacaaaatggagtttagatctcaggagtgtatctttctagggtattcttcagtgcacaaaggatatctttgtgaaaatccctcaggcagactgtttattagtcggcatgtggtctttgatgagaattcatttcctgcaacaacacttcagcaagcatctcaataggtaaattctcatgttatatctcatttacctactgctaatttctctacgggtgcatataagcatgctgaaactaattttggtgcatttcctattgtggccattggttctggtgtcaatgagcatacgtctcctataaccaaccataatactgatactacttcaccaaccatcaacattgtgtctcctacacatatcttaccatctcatcctcctgaatgtaacctagttgccacaaatatacatcctgcaccaacaaaatctcctttaccaccatctgaaccttccagtttactcaaccctgatctcaccaactctcatccacaacaattaaataccactcaacttaataaccctcagattatacctagttctctaccccctgctccttctattgacacagaaccagtgccccttgtcacaggtcaaaggactcacagcatgcgcactaggtctcaatcaggcattagaaagccaaagtcatatatggcagctaagcacccattgcctgagtctatcttgccaactgaacctaagtcactaaaggctgcacttactgatccaaaatggaatggggcaatgaattcagagattggggctctacataaggcttagacatggacacttgtaccacttaaatccaacatgcatgtcataagatgcaaatgggttcatcatgtcaaactaaacaaagatggctctctaaacagatacaaatcctgacttgtagcaaagggatatcttcaagaagctggcatagattttgaaaaaacctttagtccggttgttaagccaacaacagttcggactgttctgtcattggttgtctcgaataactggaacgtctcacaatttgatgtaacaaattcataaataggacataatctaattttaaaattataattgattaattaaaatcaattaactggatctagaagcagtattatctcaactagt

SEQ ID NO: 123148 - DNA, 778 bp, Cannabis sativa
atactatgtttatagttttaatccgaaaaaagaggtatttttgaaagagtgtttactttcaattgtgcgctaatttttatatatctctctaaaatatgatatatcatatgatatttgatgatgctccaattcaaataaaagataaaatttgaatctaaaattcaaccgaattggagatattatagattgataaaaaaaaaattatccctcctaaattgtggaatgattaattagaatatcagtcaatgatttttttattttatttattatttttttaaaataataataaaggaatttcaagatacaaattcatcacaaaaaatggtaaaattctaaatccatacaaaatggtacaaaattccaaatgagctcatcaaaatttatcttaaattaaagaggtcattcacccccacaaaatttcaaagaggttattaacctcacaaaaatcttaaaaaaattataataatattacctcaaaattcaaaagtggactaaaattcaagtccataaaaaatggcatcccaaaatagaggtcattcacctcttaattatcaaagcatcacaaaatatgctatgaactacgtttgatttgatcccatcttgagtacgtaggcaacctaattgctaagattaggtacaatcacaaatcctcaaaatcttaaatgattcagtcaccgcatcaaatccaaaatgaggtcattcacctcaaaaattctaaatgaggtcatttacctcaaaatctcaaagtgatttaattcacctcataattatcaaaaca

SEQ ID NO: 123149 - DNA, 3235 bp, Cannabis sativa
  modified_base (3192)..(3207): a, c, t, g, unknown or other
tacacagcacagctacagtgtttttttcccacaacacagctgtgccaaacaggccctttgtttgctgcttctccaagtcattaagttttcccaaaaaaacgtgcaacaccctaaagttgacttcctatctgtgattgaacctgcccaatcaacatcagtaaatgcttctacaattatgttattactcttcttgaagagaagacctttaccagggctaccttttaaagaccttaggatacgataagcaacttcacgatgttccttgtaagggcgatgcatgaactaatttatcatagtcatagtaaaagcaatatcgggtcgagtatgagacatatagataagcctccctataagtctttgatagtgttccacatctactaatcttccttgatgaatctcaccaagcttcttgttcggatcaataggattatctattggacaacactcgctcactcctaaatctttcaacaagtcaagaacatattttcattgagaaataacaatcccctgtttcgatcgtgccacttccataacccaaaaatacttcatctcttctagatctttgatttcaaataccttagagtatctgtttctcatgccttctaattcttcaaattcgtctcccgtaagaagaatatcatcaacatagataattaaaattgtaattttccactatttgagtgacgagtgaacaaggtatgatcagattgtgcttgtgaataaccttggtttttttaccacttgagtaatcctttcaaaccacactcttggtgactgtttcaacccataaagagctttttctaacttacaaacttttgtgccaaactatttttcaaaacctggtggtggaagcatatacgcaacctcttccaaccttctgttcaaaaaagcattcttcacatcaaatggttgtaaaggccattccaaattggcagcaatagacaacaaaattcgaatagtatttagcttgacaataggagcaaccgtctcagtatagtcaataccataagtttgtgtaaattccttggccacaagccaagctttgagtcattctagagtccaatcactgttaaattttggtgtaaagagccacttacaccccacgattggagttcttttacgtagatttttgtgcttccatgtttgattcttctccagagcactcatctcctcattaacagcttccttccatttgagaacaagtaaagcttcttgtatattatttggaatctgaacactggaaacattattggtgaacgtaacaaaagatgatgagagtttagaagttgacacaaactgagacataggatatttgacacaagatcactttccttttcttatagctattgggagatctattccgagaatagaatgagaagagatttgatcaaaaaaataggattagagttattacttggctcaagatctgatctcagttcagatggttgacagggtgttggtaatgttgtgactttagcttttcgataagggaattttcgtgcataaacctgaccatatttacctctgatttggtcgttgcacccttgtttatcaagctgatgagaattatcatatgacacaatatattcaacatttttattttcagtatttatgagattttcttgctgatttttctgcctattttcttgctaattttctctcacatgaacctctccaacatgaattatatttttgtttcctaagtcatatcctagaaaatctaagtctaatgtaggatcacaaaaattattggcaatattcctaagattatgatgtggattaaatctattcttggtaactttaaaatccaaatcttatttttcccttgattctccccctgaagatcgagattataatataaaatattttcaaaaagcttgacatccatggtgataaatatttttttttggattaggatcaaagcactcgtatccttttttatttggagcaataccaataaaaatatatttttttgctcttgggtcaagtttactagtagccctacttagatttcgaataaaaatagtgcaaccaaatatttttatagatatttcataaagtaaacagagtttggaaaacacttctaaagaacagaaataggcgttttaaactataaaagttcagaaggaattctattgattaagtaggtagcatgtaagataaaatccccccaaagatatttaggtacattatttgaaaaaattaaagtacgacttaaatggaggtgcctattttttcttttagcaacgccattctgttgaggagtgttgttacatggactttgctgaacaattcctttttcagtaaaaaaagtacctaaaacttttgaaaaatattctcacccattatcacttcttaaaatctctatgctcgtttaaaattgattttgaatcatgttattaaattttttaaaaataccttctacttctgatttttcttttagcaaataaacccaactcaccctagtatgatcatttataaaagtaataaaccagcatttaccagtacatgtagagacccttgatggcctctgcaggtcactatgaacaagagaaaaaggttgtgatggtctatacacacgtggaagatatgtgctcttatgatacttggataagatgcaaatttcacattgaaaagaagagggatttttatttcgaaacaaaaaaaggaaataaatgttttaaataatgaaaatttaacatgtcccaaactaaaatgccacaaataaatctcatcctcattgaaattagatgcaacttgaaggcaagagcttcgtcaggtctctttattcactaacattccctcatctagatcataaagtccaccacactccctagcactgccaatcatcgtctccaagacctgattctgaaagacacaatgagaagaaaaaaatgttgtagtgcattttaatgtagatgttagtttactaatcgagatgaggttacaagacaatttatgaacgtgcaaaacattagtgaaagttagtgtatcagagagttttacatctcttacaccaataatagcagaaaaagaaccatctgctatatgaattttattgttccctgcacatggtttatatgagaaaaaaaacttgaacaactagtcatatgatcagaagctcctaaatcaataatccatgagatcttaggtgttgggttttgtgccctaaataaaactaatttcaatatnnnnnnnnnnnnnnnntaataaagatcagaaatcgcattctatg

SEQ ID NO: 123150 - DNA, 3061 bp, Cannabis sativa
ttggcggcaacattttgttaatttggagatgatattaagattattattggttggaaaatggttttgttttctcttaggccataactcttggatatatttatagagaaatagtaaagggtagtaatggtgtcatttagtattattaggaccaagtctattatatggtttatggttatggtttaatttcgtcttatatattttaatttaatattattttaaaaattattaattttgctttttttttttatttatttaagcaaactataagaccccaaaattacaaaattattttattctatcttattctttttctttttttttttttttcatattttttaaataatattaaatataaattaatgtggaaaaaaaattaatttaattataaacgaatacttaaatttgtgggatgtattatattattatatcacttataaagaaaaaaaaaaatcaacctttatgcgtgttacgtgtacacatatataatatattactattattatatatgtttttttcttaagttttcaaaaaatatgtttagttagtaatattttatataaaaaagtatctcttataaaatttcaagaactatacatattactttttcattaaaatttacagtaaaaaaaaaaataataaaagaaaagaaaagaacatagtcaatcaattcaaaaagtagtaagtgtattgatttttattttgatagacaatttctcaaagatttttctattatttctcatgttattttctcatgcattctctatgatttctcactaaaaatatgtttatgtaaatattttatttgtggtccttaatattataaattatggtgaacattatggaatgaatcacgttatatccattagtagtttttatttattattaatttgttttttttttttgtttaaatattattttatttgtttcattttaacataaaattgtattatatttagtataaaaaatagttttgtagtaaatttatactaaattttagctttgtactccaatgcataattgcaaaattttgatgtaaatttaatatctaatttaatattttattaaaaaaaaatctaataattttataatcaattttattattattttaatatgtaagacaattaaaaataatataaatattttataatttaatgtaatagttaaatatactaataaaataatagaaatgacataaatataaatgaaaaaatagtgtatttattgtggtgtaaattttacatcatagcaaatgttgtgccaaatttagcacaaaatttgctatgtgccaattttacattactttttagcacactattggagcacactttttgttaaatgaattatattttagcttttcaccacttatttacacatctagtagagatgctcgttgacggtggtattaaactctataatatataaatattctaacactttatttatttatttattttcaaaataaactaagtttatgtttcctctacgtgttgtagaagatttttaatatatatgtatagatttttttttttttagcttttctattaccatcttttatcaactgctctagaaactttttagaagttccaccataaagacaacacttggcgcaacgtacgaacaagcttatgtaagtttacctttatattaatttctaaacatttcttccaatttgttttgtattcaaattagctatttaatttattaatttttgttggagcaaatgattgaattggctgcaagtcaaccatcgcccactgatgatcaacttgatgagactgatgtagatcttacacagtattctcgagacttgcttgttatgatgcaagtactcagggagcgatctcgatatctaagaggctttgaccaatctttcgagattgaaggcagttgggccaaaagagcacctgccacgaattcttctaccccaccgattgttactatggaatagtacgaggcctttacagagaaaagtggaggacgcatagcaggcaactcagtatacgaggcaacaacataaaacacaataattctacctcagacaattccaagatcagtttgaatatctctcttggcctgtgtcgagtttcaacttgtctatgatggatcttccactattccccactactcttggtgctgaatcgtcatcgcatcctcccgagactcaaaacaacaacgatgacattacccatctttagaacattatatattatataccacagttagaattttacttttttttcgaacatcttttaatattttgtttatttactattagttttacaatgttttattacttactaattttaatacaaatcaaatatttttgtatattagttcgattgaaaaacattaattatttttttaattatgtttctttaaaattaattcaattataattattataatcaaattattaaagcagaatatttttttaaaaaaaaaaatagtttcaccggcgcattattacgccaataaaatcaatcctgaatcactcgcgccaaatccaactttagcacaaaagattttaccagtgcatatgtacgctgataaaacctttcgcgccaattagcggaaaattcactaaatttttgtcggcgcacaaatgtgccggcaaagattttctaagctagctaagggcggagtagggtgttcatttatcccggcatataatttttcctggctctaattatcgcaggtacaagatagttttgtcggcgtaattgttgtgatattctcaacacgcaagtatacgtaccgttaacaagttaaagactcacaaagagtgagatcgatcccacatggatcgtaattaaatactttaaaattaaatttttacttctatttggccataaaaaatttatgagaaaattaaaactagaaaacaataaaaacagtgaaaataagaagcaagtaaattaataaggaaattagcgatgattaaaagttagggcttgcgatttcaattgaatctattgattatgggttaacatgattctattcctattaccaaattctttgtaatagcaggtttactaaagtaatttatagaggatgataccaa

SEQ ID NO: 123151 - DNA, 843 bp, Cannabis sativa
  modified_base (778)..(781): a, c, t, g, unknown or other
ttttttttttttttttttaactacaaatttacttcttcaactctctgtctttcattttataagtgacttttatatatgctttctctccatattttatataatatatatatatatttatatatatatattaatgaatagcaatagctttctcaaaatttagtgctttccaccaagcaattataaaagaattaaaattcatatagcttttcagtttgccaaacttagtaactctgttttttagcatctatagcattactctgtttttttagataacttttcagtatgcaaattagtcaaataattaaaaagaaaactcaaaaattataaatgaagatgcatgggtggggagtagagagacgcatgatcgagaggattcgaggttgcatcaggaccgttcactaatgatgaagatggtgccccattaattccattgaaaacccaacaacacaaccccaaattgaaacattattatttatatatatataatttataattataagatcaactgaaccattgtaagtctggaatatgaaagactattttctcaaaactttaacaagcaatagcttcgagttttagagaaccaacaaatgttaagtactaattaattgctaaattctaattaaggctatgaagggtccattggacacaacacgttttgtcttaattgtttcattttctcacaagaatctaaagctaaccacaaaatttctttgtcaaccaaaagcagatgcattcatacatacacgtatatatatataaatatctattctatatnnnntgtgcctatataactgaaattcttagtttatgagaaattcatgggtaactttttatttttat

SEQ ID NO: 123152 - DNA, 1573 bp, Cannabis sativa
  modified_base (1524)..(1548): a, c, t, g, unknown or other
agtttaggatatggaattgtgtattgtttattataattttttcaaaaaattgtttttaatgatatttttttaatattctttattagtgatttcacctttgaaaaccttagttctaagcacaacaatccaatttaattatgaaaaaaaaaaaaacagaaaccctcctcatattataatatcgaaaacttactcaaaaataaagtaatttggtttatctttactttcacctcaaattatacattgcactttactaaacccctcttaatctaaaccactctcatctattgaacgaaacgacaatgcaatcaaaaaaacgacattaatcataaacataatagtagtacctttttgaggagcaagcaatggagcatacatgtaagaatctgacatgagatactctccaatcttcttcaccaatcttttattgtctttttcttttctttcccaacctgaaaaaaacatattaactaaacttaaattcattaatttaaaaaaaaaaaaaattaaaaaaaaaacaagagaattaaagaatggttactcttaaagtcgaaagttgaagagctattattatgagtcaaaggagtaaacaagtatgagtcatgattgagatagtcaacaatttttttgaacaaattattattatttttcttctttttgatcttcttcatgtggaggccattattaatggctactcttttcttttgtactccaaacaacattttcttctccatcatcataattgccattaataattattattacttactaaaagttttggtcttggtggtgaggagaacaaatactctttgggtgttggacacgtgtcacttggttgtaactctttagacatgtcgtgtcgttttgaggcttcttgtcgagagaatagagtgacgcgtggtcttttttgatgagtgtcttcaccacttactaataactatctttgcttttacttttttagaaatgaaacgacgtgtcgttttgtggaactaccacatataataagctattgaatgagtaatgaataatgataaatttttgtagtaagacaaagagagacaaaagtgtaaaagcatatttggtaaaatcgtagtaaatacaatttttgttttataagcaacattgaagaatatgtaagtgtttattacaaattattacaaaaactggtattttgtaattatatatatggtattttaaaaatatattaaaatattgttaagctcttatgcatttttgtgagtctcctattatattatgtaagtactatagatacatatataatttgaagcttctaataagaattggaggtaggtgaaggaaatgtttgatacaacaagtgtatatttttgattgttaaaagaaaaaaaaacaaaacaaaacaagagtatatttattgtaaaaattatatattttatgggttttaatacaatttgtgtaagaatatgacttttgcaataataaaaaaaaagattatggaatttttttaaaacaaagttaaaaaaaatagtacagtagaacctctatttnnnnnnnnnnnnnnnnnnnnnnnnntctaatttgttataaaaaaatcaag

SEQ ID NO: 123153 - DNA, 3183 bp, Cannabis sativa
tctcaactaatttctttctacgtggtagaagggactagagaagaagtaataaggaaaattcctttaatacttcttattgaggatgatcctaagacttttttaaaagccatgcaattcagagatagtgtattttggagacaagcggttgatgatgagatggactcaattctctccaatgacacctatgatattgtggatttagctagggccgaccctaggcataggcgggctaggcccgtgcttagggcccacaccttttgagagcccaaaaataaaaataataaaaaaaattattaggcttttatttaagtaaaatcaagtgtattataaacaataaatattcatagcttagttggttaaggtgtatgacatattatacaacgtcatgggttcgaatcttataacactcttttcaatattttttttatatatattttttttatatatatttttgagggccccaaaatctaattcatcttaggaccatatattctcaagactggccctgtagatcttccacaaagatgcaaaataattgggtgtaagtggatatttaggaagaaataacacactgatatgtgaacctttaaagctaggttagtagctaaaggtttaagtaaaaggagaaataggttagtaccaatttgagggttagacttttaaaagtcttcaacagaattcagtttttgaaaaataagtatttttgtaataaatactgtaagaattctacctatattgacctaagggtctagcctcattaaaccgtacatctttcttggtatatccagataataggtgggagcataaactgaagcgttctgaaactacaaagatagttattgaatcgttagcaccgcataaaaacattcctcctagagtagctgctaatatgaataacagaaactctgctatagccatttctcctaaatgagaaatagggagtatattttctcaaaaaggtcaacgaatggaatgtgcacaagaccattaacggtgcaaagcgagacatgaggtcttgggtgaatctagcaaatgtgtgtgtgtcatcaccgttttattataaagaaaagctggctcaatgctttgtcaaccaaaattttcaataaaatttgagatgattacactatggttaagttcaagttgaaaattacttaatcatatgcacttgagcaaggactctatactctatagagagtgttgatttcttcaatcaaagtggaggatatatgagatacttgattgattaaataaagtgttacaatgaggtatcaaaatttttatttagtgggagaatgttatattatttattaaataatatgatatttaatattaaaattatgatatattatacatgagtataatatataatgtgattgagagttacatacatgttataatcactatataatgtgattcagagttacataaattgtaacataagaggtggagttttttacattttgtaactttcacattatcaccaattaagtgtataaagagtggttacacgacttaatattttgaaattcaaagctgtaatgcaaatatagttgttggggattgaattttatcatttataatgtgtataaatgatataaaataaagtgggaatgatttagaatgctttggagagttgtttacaaaagttaaaaagtttggtaactagtaaccaattgctgtttttttagctttatgatttgaacttacttgacaatggggatgctttctaatagcttccataacctctaaattacctatttaataccatttacatctaattaagaaatggtaacaacctttgggtgtagggtgtttgaatttcaaagtgtgtgatccgaaacactataaatagagactttggttcatcatttgagacatactctttctatctttcaaacacaaagctagagagttctaagacttaataattctcaaaaatatttctacaaagccctaagtgtttcatagagggaaaaataattttcttggacaaaggtgtagaaaccttgtttaaacttttggtgatcctcatctccactttgggtatttgttcttttattctctagttttatattattttcttcttctcctctgcacacttatatatataaatatatatatggaacacttcttaatgtgtatactatatatcatctatattatatgtcatatataccatctatgtcatatatactatatatcatctatattatatatcatctatgtcatatatatacaagattatgtatatacgcttttatagagtttatatttatttgtatgttgaactttaaattgtaactctttttctttatttatattttgtgctttaggattataactctttatttaatctattattcttgtaatattttatttagaattataattattttgatcttttatttattttattttatttttccattataatctctgatatatttctaacaaaacatgattggataccttaggataaatttttcacttttctctttcaacattttttttttctaacctcaaacggttatcttaaaaaaaaaggaaaaattaccccatataatattttttaattttttttctttcaaatttacggtttggtttctaaagtggtttctccggtggtttctatttgagttgctatacgatttttggttgcgatttaagttgccccgttagttgcaatatgagtttctatttaatttcgtaaaaatgtaaaaaaattgttttgaagtgtaaaaataaaaaagccgaaaaaaatgagtaaattgaaaaatgccttttttatttatgcattaaccaaatctacctctaatttatatttaattgaaacatatctcttttcatatgtgttgtacccaaaatacccccacataagggagtcacatggagagtagcttgaagtgacaagggcaaaattggtaaagtgttttaaaaaaaaagagataaaaataataaactttaaaaaagagggtaaaaatcaaagaggacaatataaaaagggtatagagtctaatttcctcaaaaaaagaagaagggaaacttacaaaaatactagaatttgggttaacttttacaaaagtactgtcacacgaaaatctttctaaaaatactgtgtttttataaaataccagtaaaacacaaagcagaacaactcaaaacaactaaaaaatatcagtgaaa

SEQ ID NO: 123154 - DNA, 776 bp, Cannabis sativa
  modified_base (730)..(731): a, c, t, g, unknown or other
aatttcacatatgttgaactatataataatataattcctcaattaactcataattatctagttagggttttgctaatccttttcttaatcccgggtattacaggtagtgtctggccaggttgttgattccatggctggctagcctactcaggtagtagtgtgctagccttttggaggccaggttgatgctacagtctaggacaattcgatcctcccgacactcagtttgctttgcctccggtatgattgtcatagagcttttatgcactcctttcaatagctctttagcttctttcttggtaacacatcatagaggtggtattgggatacaacatctatgcgttacgttgtccaggattggacacccagcagttatcccccttatacttactttctggcaaggtttttatttagaggtatggtgcaattggtgtcatccatattggatggttgtccagcatgtctgtttcttctgaaatagggattcttagttcttttaaagaactgagcgggtgccaagtttgcctcagctgccaaggcattgctggctagtcaagcgagtgcatcggctattgcatcttctttggggacttagctgacttaacaagtcttgaatctagcttaaataggccatcatctttttgcctttgagttgtgtatatgttggaaattattttaccaggatctagaattactaacaagtatgttgattaacatcctaatatgaatnntaaaacaatgaaaataaacatatataatgttagaaaaccttacag

SEQ ID NO: 123155 - DNA, 985 bp, Cannabis sativa
  modified_base (942)..(950): a, c, t, g, unknown or other
tacaagctgtgaactaatttggttgatagccttcctcaaaagatactttgtacataaacgacatatactgttactgtggtaatctatccgcccttcattcacattgctgcaactcccattttcgttagcgcaatgaagctagagattgattgtaatgttcacgaaagaattcaatcaggaattgttacgctatgaaaatattactgaggcattattagtaatttgcaagtggtgtgtagagcctattataaatatgtaatcgtctaaaaattaataggtatggaataagaaaataaaacttttagtttatttttggagatttgtcttgtctagacaaagactattcactatcaagaatgcttaaaaaactttgtatgtgtctcaaaacgaaaacttgatgatgttcttacctagtccttatccagttcaaattcacttttcttattgacaatatggcaatgttcaacatagacatttcatctggaggtgaattagttattgaaatattgattgagaagaaaattttgttttattagaaattgattggaaagaaaattgaaattattttatattgtttacattatgaattaacctaattaaatggactaaattgttaaatttttattaaaatatgtacctataaagtagtattttagtgagatacattttaaactcatgaatgaaaatatctttattgagatatattttaaacttgtgaatgaaaataattactatacaaatgattgaccttaggtaaacacgtcattaatctatttgcaatatctaattaactagtgtggtggttgatgttctctaagaaaattaaccaaacgataaactgagaagtgcaataataatgtatttgagcttctttagtcgtctatgtatacatggatcttgtaaaaattatgattcagtttggggtaaataccattttggacnnnnnnnnntgcaaaagttatagattggaccctgtgttttgtta

SEQ ID NO: 123156 - DNA, 1382 bp, Cannabis sativa
  modified_base (27)..(32): a, c, t, g, unknown or other
actaatcagattgtaaagagttttatnnnnnncataaaacccaacaccatcaacatacaaagtccacccttcgcccgttggtaattcggggtcgactcgctcttctgtgattatggccacttcatcatttggaaactcgagtattaaataagcaagggcttatcccttcattgccgatcttggtttgtacctgatgtcgaactggcttagttctactgatcatttgagtaatcttcctgatgcttctggttttgccaaaacttgtcgtaagggatagttttttaaaacctcaatgttgtgtgcttgaaaattcgcaactttcttgaagcgattactagtgcaaatgctagtcattccatttgtggataacaggtttcagcgtctaagagacacttgctcacatagtataccggatgttatctaccttggtcttcgcggattagcactgaactaatcgcgtattcaaacaatgcgaggtagatttataagacttctccaggaatcagcttggatagtattgggggttgccccaagtgcatttttaaggcctgaaaagcttcttcacacttttcagtccattgaaactttttatttccatttagaatttgaaaaaactctttacatttatcaaaggaacgtcatataaagcggtttagtgctgcgactttacttgtgaagctctggacttcctttgttttggtgggagattgcatctctaccaaagcttttatatttgcaggattagctttcattcctcaatgattcaccataaaattgaggaattttcctgaacccactccaaagacgcatttgagggggttaagctgcattttatactgttgcaagattctaaacatggcttacaggtgagtgacatggtcttttgcatgttgagattttacgagcatatcgtcaacatatacttctatcgtctcgccaatcagatccgcaaacatcatgttaaccaacctctaatatgctgctcctgcgtttatcaaaccaaagggcattaccttataacaatataaaccttgatctgtaatgaaggaggtgtgctcttggtctggttcatacatcaaaatctggttgttcaaccatgcatcgatgaagctaagaagctcatgacctgcgacagcatcaacaagttggtcaatgcttggtaagggaaaactatccttaggacatactttgttgaaatcagtgaaatcgacgcatgtgcgccatgagccatttggcttgggcaccagtacaagatttgctaactagtttgtgtaaaacgtctcccttatgaagccacatgccaaaaggcgatctacttcctctttaagcacttggtacctcgcggggtccattttgcagcgcttttttcggacacctcgcac

SEQ ID NO: 123157 - DNA, 1251 bp, Cannabis sativa
aattacagcctctatctcatatttaaatctttatgagtaaataaaaatttaaggcccttgtgatctgtgtagatttcacacttttctccgtagatatagtgttgccaaatcttcaaagcaaagaccactgcagcaagttccaagtcatgagttgggtatcaatgttcatactccttcaactgatgagaggcataagcaataactctatcagcttgcatcagaacacaccccagaccttgtcaggatgcatcaaaagaccacgaacttttctaatgggaaagctaacacaggaatcgtaatcaatcattgcttcaactctcgaaaacttatttcacacttgaatgtccatataaactgctacttcttcttagttaactcagttaagggcattgaaatcctagaaaagctttctacgaatcggcggtaataaccagctaaacctagaaaacttctgactttagtaactgtattcggtcttggccaatccttggcagattcaatcttccccaaatcaaccatgattctatctttactaataatgtgccctaagaaggacacttgggataaccaaaattcacacatcttaaatttaacataaagcttatgttctcatagtcgttataaaacaatttatagatgttgctcatgctctacttctgattgagagtacacaaggatgtcatcgataaatactatgatacatatatcgagaaaatccttgaataccatattcatcaaatccataaaagtttttagagcattagttagtccaaaagatataacaaggaattcatagcagccatacctagtatgaaaggcagtatttggaatgtcctcttggattctcaactgatgattgcccgagcgaagatcaatcttatgatagattgtcttccctgaagttgaacaagcaaatcatcgatcctaattagagggtacttgttcttaattgtcaacttgttcagttcccgatagtcaatacacatacgaagtgatccatttttctttttaaaaaacaacaccggagctccctagggtgacacactgagtcgggaaaactctaagtcaaccatcccctgaagttgtatctttaatttcccgagttcagcaggaaccattctacaaggtggaaactggctttgctccaggtgctaagtcaatgagaaaatcaatttctcggtgcaatggtaaccctggaagttcttctgtaaatatgttaggttatttttagtattaattttagattaagtt

SEQ ID NO: 123158 - DNA, 1331 bp, Cannabis sativa
tcaattaaatatgccaaaaatagaattaacaataagaacttttaaaatcccatactaagtgtaatttcctctttttatcaaatattcaatatgcatgaacataaaactatccaaaaccacgacaaatcacataaaccaatttaaacatgttcatctatgaatataaagtatgaactaatagttttgagactagttgctaaaaatacatgctagaatcaatttaattttcacatttttttacaaattaatatgtaaaataacttagaaatatgttactaactgatttacattaaacatagattgagtacaaatacttacaatcacgcaggggaattaataactcttcccgttcaatgatttaacccttgttcctttctattgcagaatattatcaatcactgaactcgaatcttcatagaatctgaatcaaagcactaatttctctgcacaatcttctccaatgatctaggtattgtaacagagttatgtaggtaattgttacaacactaagtatggatcacgaaatttagagagaagagagaactactattggcagctaagttcttagaagagaataggagactaatttttcaaaatatctaaatctaaaacaagtgtgtagaattctctcttatagccttccttttttaggcaagtgaagagttatttttctccaaataattaaataaataataaaaaaaatatgaaagggaaactagagcttccttgcggtccactcatgtagtgattgggccaagtatgtttcttggattgaaatgcaaaatatcctaaatttggaaactaaggctttctctcctctcgccacgtgtccacatgcaccaatgagagagtgacatgtggcaggtccattttaactttagggtaattgtatttttacccgatgcaatttgtaataagtttaattatatattagtccctttaccttcctataaatataagtttaagtttttagaattcaatacagtttcagacaaaaaaatttagagaaaacgttcgaagcgctcaggcctcagtgttagtttatcgtttttcttaattaattttctgatggatttttaagttctcttattattaaggcggacgataaaatctagtgtatttaattaaatatttatttttattttgattctcagtacaatatatgctatttttgtttcttaaaataatttgtttcatctttaatatatcatgtattttttatagttagaaattattaatgtttgattctacattttattaaaaataatattctttaatttttttgtatttatctcaaattattttagatttaatgcttagaagttataatt

SEQ ID NO: 123159 - DNA, 1019 bp, Cannabis sativa
tgagcagaatctcaatgtccttcattaatgtacgtgcacacatgttgcacgactatacctatttattttactcagcagaaatataaatataacaatatcctattaatattttttcttgtttatttttacaaatttaattaagataaattaaatttgtaataatctgtttagattatgattgtttatatatgcatctagatttatttaatctaacattaattagctatcatataaaattagtgatttagtaaattattttttttatgattaaaaattaaaattctattttttaaattttatttttaaatatatcagggaaattcaaaatttttattaattttttttctttctttccttctttcttcatagaaaaagacatcaatgttgatgttctttgagaaatgaaacatcaatttttcttgttagagtattttcattgaaagttcaaacattaattctattttgaagaacatgcgaactcataaagtaaaaaaaagattgttttgcagttaaaccttttcaattattattttacttgtacttaatctttcaagtttaaattttagtggtaaaactaaaatgaactgttagcaaatttaagatgtcacctatttttcacagttaactgctgacatggaatgtttatatctacactcttatacatgtggcactttatattggtacacctaatattataatttaaaaattacaaaaaaaaaaattcaaaatttataataattttatcttttaaatattttttttatcatttttataattatatttaattttaaaatgaattttgattaattttgaaataataatattaggtgtgttaatataaaagtgtcacgtgtacaagtaggggcagaggtacttaaggagatagtgtggccatggtcccctaagattttattattagaatatgtttatttatagaataaaataaaggaattaatattgagataaataaatattttatattaattaaatctggacaatattaattgcgtgatattcta

SEQ ID NO: 123160 - DNA, 2057 bp, Cannabis sativa
aaaatgatttctgatcttttattacttagtaaatctgattatactgaaataggttttatttatggtataaaacacaacaagtagagcactgactaaacagctccgtaatgaagaaacttgaagcaacaacaacgtctagtttaagacaataacaacacactttatgggaggcaacccaatcaatttttttttgtttttagtttttttaatttttcttttagagctgagttttatttttgtattatttttagtcgaggaatagtgaaatacgtgaatttttttttaaaaattgtagcgctatagcgccatcactaggcgccattgcggcttatgtcactatttgagaaaaaatagcatttttatggcacttaaatggcacatgattgacacatgagttttatgctacgtttgcatgtcacttggggtacattgattatccctaatttccttatgagcttcagagatcataccaaccacctgctggtattgatgacgatcaagctgctactgatggcggtgatatagttatgggcttgtagtcctagcttctctagtttgttttctcttctattgattttattgcatagtggggacaattttattttaagtttggggatggaaatgcaaattttacgtttttaatttttttttattatttttttgtttcaggagtagattttaaggctttatttattattattagatgactgtatttacgttgacttatgactatgggatttgatgatgaacttttgctaaactctttgatattatttagtatgtgtaaaaaacttgtggattgtgtgtctgacctgttatgcttccttttgatattgctatatgaattatgtgtcattctacttgttcaatatatattgtgattttgtgtgtatatgtagaattgatggatattgagataactagaacttgtgtaattaatttgttgaggcaaaattctaaatctgggttatgtagagataattaaggcatttttttggaattgtttaagccaaaaagctaaccttgattcattatcttttgttgtcctattttaagcctaatttttctaatttttattatttgttaaaaaatacgtatttatccttgattatgagccatgaacttaaataaattatcctgaccctattttccaccataaacattggttgttgtgtaccaaataaaaaatatgatgtaagtagaatggaaattttttctgagaagtatggttggagaggatgtatgtgtatcaagagttatgatccaagtatatgatgttaaaattttttcttgttatatatatataagaaaaatactacaaagaaagaaattcatgttaaaaaattataaacaagagataaaatttaaaggattaaaactttaattgtgcttaagaatgaaaatttttgaagagagataaatgaatttacaatgaagatgtgtattttttattaggttttttgtaagtttatggtgttaaatttggttaaatgacattctcatttaccattgacctaagcctagcgatatatgcctataaagtccttttgatctatataacattggtttacattagtggagatgaattgattatgcaagcttatggttatcttgaatatttgtggtgcaagaaatctttatgcacatgaattatatgtatatagagttagtataattgacatatgcacatttttttgttgataaaaatacaatattggaagttaagttttaatagattaaaattctagtcatttgttcgaaatgtgaaattctgtgttttataattaccaatttattaattaatttaattaatagcgaaataataatatttgtattgaaatagtaattatgtagctatagaacgcaactctgtaactacagaataaactagaaaacaaacagtacaaaaatataaaaatacagattttgtacgaggtatcaataatccttgcaggttgttactagtccatggggccacgccctagatagataaggctcatgagataaatctcaaaaatataaagtaattgacttatgcataaatagactccctctta

SEQ ID NO: 123161 - DNA, 549 bp, Cannabis sativa
  modified_base (507)..(510): a, c, t, g, unknown or other
cttccctcaccacacctcatctggcgttttgaaatccagttctattgacggacatttatttatcaaataagttgtagtggacacaacttcttcctagaacgctttaggcaatctagcactcaatagcatgcacctaaccctttccaagatagtcctattgaacttctctgtgagtccattttgctaaagagtcttactcatggtcttatgccttgctattccttctttcttacataacatatcgaactcatccgaacagtacttagcccattattggttcttagttatttcacttttcttccagtttgattctcaatcattatcttccagtgcttaaatctttcaagatcttccggcttattcttcaaaataaacacccataactttcatgagtagtcatcactattgaaagaaaatacctgctcctggagtgcaatggtgtcctcgagggttcccataagtcattgtgaacgtaatctagtgttcctgtaacaccctaactaactnnnncgtattacgtgattttcaaacgtactgtgcagctcgttg

SEQ ID NO: 123162 - DNA, 915 bp, Cannabis sativa
tagaagttcatatttaggctgttaaataacatacttgttagtaaatctaagagcctggtaaaatatttccaacaatttctccatgtgttataatagttggggaggtcttgtttgtcccctctgaagccttaaagcagaagagatattcttggcgagttataacaatgcattatagcactcacgggtagttccttaattgccaaggagacaactgatactatccattgctgggaacttgacagacaagtggtatactaaatagatggcttgatggttgtaaagggcatgccttttgagcattttgttgtacagagacttcacgtccaccattatgaacatggccatgatggtggtttgcctcagggcagtgtccatattgagtagcagtttgatcttgtcagatgtagaaatgtcagctccactgaaatcatacctgagttattagcatggttccaagtcttttaaagataaactcatcctaagtcaggcttgctcgaataggatgtttgattatgctacatcatcaatcattaccctatccactatcatattacctatttgaatctcaacaactaggggatcgttgtgagggtagctaacatgataagagtatgataatctgaaagtgataggttcacatccgtagtactgagactttggaagatgttttgctacctctacaaatttgattattttttttgtcgaagtgatcttgcatacctttctaaggtgttccttgaatatcaagctaggtaacagactccaatcatgatctccaacctgtctacaactagtgcatgctagagaggtgcattgcctccagttggaggtttaggttgtacatactgttgggaatattttaccgggatcaagatttactaacaagtacgttaaattaacatcctaaatatgaat

SEQ ID NO: 123163 - DNA, 530 bp, Cannabis sativa
tcgtgctaggcctacactttaaaaatattgacacaatacggcacgactcgtattttattgtagcacgatacgacgtaatcttttttgaaaagcacaaatatatacgaattagacctacacggcacgcatgaacttaatattctccatatataaaagtaatgaatagtgtctatataaaatatttactaaaatatcacatatgattatagtaacaattttaattactcgcatttattaaaatcgagactcgttattaatttttaaaaaacagtgcctacatattaattacacataatgatattatataaagtaacgactatattgcaacatttttctttctcaaaataagtacatagggataagattcaacatatgatatatgtatcattattttgggaatgatattcaagtagatattttttttattacatttgtacatatcaatatataaattggacacaaaatcattaagacattctaaaaaaaaagatctcttcaaaccaacataatttattgtctaatttacacta

SEQ ID NO: 123164 - DNA, 1545 bp, Cannabis sativa
gagaggaagatcttgattcagatctcttgagtatactctattttatagagacaggaattaagggttagagatatgaatagaatgagtcataatattttgttgtaaccaatgcaaggttttttacaacctttatatgtttatattattgttttaaacttttccatattaagatgttagattatagtcataatttaacatacatgagtagtaaattaagattttggtaaaagagaaaagtgttcaaggacaagtcctctactaactaggtagtggaaaataaagaaaaggttgtttaaagagaacccatacctcctactcatccaagttgttcaaccataagaataaatgagcctatggttgaggctgcctgctcccttatgcccgttgtcaagggaaaaaggaagaaaatggtggagaaagagcccacccatgacacttcgaatgatgaatgacctaccgtcattctctatgatgacactcctcagatcatcgagggagtgaatagtatgaatttttagtctctcttactttaccatatatgtatgttgaacttagcctatcttttctcttttgtactaagtgtttgtttattgtgcagctatatcgtccaagattttcaactggctcagcaagaggaaggaagataactcttctgctcgggagtttcctgccaagactcatagacagacttcctccatccagggagagaagaccccttcagtcaaggaagtagttcctgatgcgctgactagttgaggtcaagtctaacaaacaaaaattataattctggacaatccaactccaccatccatcgagccagccacgaagactctagctcacacccggccacccattgctccttccaccgaatcaaggcagtcttctgaaacgcttgtccctctctacttcgagccaaagaaagtcaaggagatggtgaaatgttaccaagattgggtaatgtttgaaaccaatgagaagctgaagggggtcgataaatttagggtgtaaataatggtcagagggctcctcggagagtggatgaaggtaagatttttacaagtcttttgttttagctcaatatatgacgatcactaatttctaacttcgcttcttcctccaggtgaaccttaagctcacgcattgcaaagtctttagcatcttaagtcgagatttcctctaaggaactctataaggctacctaggacgtaagggaagagctcgagaagaaagaggagcaactgggtaaggcaaacaagcttctaagtgctacgaaccagaaagtgaccgagttggagatggaactttttgacgagttagagaatgcacttgaagaagaaaccaagagagtcaaggagcttgaagataaaagggaaggctttcgtagaccgaatcactctctcaccgaccagggggatgagctgactaagtttctcaaggctgaggaagaggcccatcagaaggacatcaagaagtatgagtccatagaaaacatggtcttttacgagttttggaaggctaatccaaatgcaaaatttacatattttc

SEQ ID NO: 123165 - DNA, 1469 bp, Cannabis sativa
gtgtaaaaatgaaaaagtcccattaaaaataaataataaaaataaaaactaaaataaaaattattttgtttttattcttcttctttttcatcctaaaactctaaattctatttttttttattgtacctccaatgccacgatattttctcaatcaataaacaccatggattttcgaaacccaaagctaagatgtctggccatataaataaaacccctcaatcgatgttgcgattcactcaagtggactcaatggacccacctttggccaccattagcacaaacagagaccaaaactgaactcagagcactccaaaacccacaaaacccaaccttgaaattttcaggaagaagaagaaataaaaaagaatcatacttcgatgactcattttattgtctatgcctcttatatcgatattcatctctctatcgtggtctttgtctttgtagcttcgagagctcaacaaaatatcgaaggttcgaccctccaccctagtggtcacaacacccaaaagccccacgaacccaagcacaagtgaaagtccaaccatccatggcattctcccaaactgacagaacaaggttagggctcaatttctttcaaattattttgtattttagttttagattgtgagactgcattaggagatttatcttttgtgaattgatagtttgatttgtaagttttcaatagaactctcgatgtctcttgacaaatcatttcaataataagatccatatttatttcttatttgttttgtttgatatgatttatgattgttttttttttctggtttctttgattttagtttttggatgttgatttttggatctaagaaatgtattggttgtggtggtggtggtggtggcgctaatatggttgtgatagtgattgtaacaccctgatacctaggcgcgctacagtgtattttaaattaatgtgccacctttcctaatcaaaggattttctttgaaaatcgtgccaaattgaatttgttttttatttaaattattaaactttattaacatatatatatatttacataaatcgagatccgtgtttacattttattttaaatctatatcaaaatacttttataaacttattgcacagagaccagaaaatacagcccaagtcgttccgagaacgaacactcctagttgcgccgtctcaacatgtacaatcatccctcgagctcggaactcactcttgttcagccttcgccttttttgacctacacacgaaatttaaacacatgtaaagttcaataaaccttacattggttgcagtagaattaaatgactccttccgctcagatctctaagttctaacccttctatcctttctgtagcagagtatcactaagatctgagctcgattctccttcagttgattggattcttcacagtcttactgtgacgcctcgatattttgccttattttacaaaaatactattttcatgcataattt

SEQ ID NO: 123166 - DNA, 593 bp, Cannabis sativa
gaggcacatgagagtaccctaaaaactataattggtccattaaattatagtataccattattgaaccacttaagcccaattagtgtataaccccttagggttagaacttagaagggtgtgacatatatatgtcttaagtgaaaagggtttgagtcaatggtaataagaagaaaagagggatagctccaaattgtgctcctctctaatattattctaattttgagttcatgttgatccttgttggagatttttggaatcacaaatgggcacaacatggctataccgggaaaaatcatcaatgaaggcccacaaatatttataaccacccatagcagctggaacaaaaggctcccaaatatctgtatgaataagctataacacatctgtgtatctgtctgacttattctttctaaccttcgcagtcaactttccttttatacaataaacataggcagtgaaatgaagatcctaaagaacaccatcttttaccaatctctccattctatctctagaaatatggtccaaacttttgtgtcaaagcatggaagatttcaaatttgatcttgcacgtttagaaccaacaacaacattaa

SEQ ID NO: 123167 - DNA, 3024 bp, Cannabis sativa
ttttttttttattaagttaaccgataaatattaaaataataaaaatataattacataattattcaataaatagagaagagttttttctatttaaaaaaattcattatcaatctaaaggcatgctcaaggaatacaatgttaaaattataattaacttacaatgtgaaagatctgaagaaaaaaaaaacaccctcaatgccttttcgtcctaccaagagaaacatttacaaaaaaataatgaaaagaagtgaattaactactagctagaatcatatatatttaatgataactttaatattaaaaaatatctggcataattttatgatgaaaattagaacttatctgagtgttattattatatctgatttttcttaatccaatgaaatatatctcataagtcattataaatgcttaaatatagtttatttatttcaaaaaaaaatatatatatagtttatttaaaaagtgtttaaataagtttcaaaagaatttacacggtctaaaagatctcatgattgattttttttaaaagaccaatttattgtaaggaaaaaacaaaaacttatcttaatattgaattcttttgaaaaaagattagtcatttgctgagtaaacaggaagtagctaattccaaacaaaatgggcttaaaagtaaaaacaaaaataatattgttataaatattattgtttagatatctctagctatagtaataaaatcaaggttaattaagatttttgccccataacatatactaaattatacattttaaacatttaaattcattaaaaatgctccttgaactattgagatttttggatttaataacttttttctaattttagtaaaaaagtctaatgtggatgaaagttcaggaggtataatttagtacatgtcaaagttcgaagaacataatttagtagatatcaaagttcggagagcatggtttaggacataaagaattactgaaattgtaaacttgaatgaaattagataaaaaatccttaaatccaacaatctcaatagttcaggaagtatttttaacaaccttaaaaattcaaggagcacgatttggtacatgtcaaatgtcaaaattcatggataaaaatactaattagcctaaaaccaattagttgtttgtaagttaattattttttcaaatatacaatatattttttttaaaacaaatattaaatatatgagatttgtaaaattccgattatgtaaaatctctccaatcacgaggagatcgtctttcatggtgatggacctgatggtgatgttttgatttattcgagtattcaatatctttaccaaataatgctccaatcaaaaatgaacattgttcattattaaatcccatttttggttttctacatacaactattattattatttttggaaatttaaataaaatatacttttacgaaatattgtttattttagatggaaaataatattttttagaacaaaaaaaataatagtatatatttttgtaagatagaaataatatgatttgattatataaatctataaaagcgtaaatttttttttgctatttttgagtatttatgaaagaatttagtgttacgtgaattttgtataattatattaattatacatacaggagtccttcaatggaaattgaagttatttttactatttatctccatacactacaagaattccaccatataattacatttgcggataacattttaaaaaaaacgttattatcttatattaattaaatcaataaacctgttgagtttgtttagacataaatatatatattttatagtataaattttttaaacattttgtggggagttaattttcaaaaagaaaaaagactaagtaccaaatagtgctctgctagggttttggagatttttcaaattacttctgcgagagcaccaaatgccgaaaaaatggaacgaaggcatcgattcaaaaacagaggggaccgtcgtcgaagactggtgagaaagacgagatctatgacggcgatcttggagatcgatacgatggaattttctaattctgaggaagagaagattgatgaggatgcggtgaagaatgacgatggaaccatactctcgcaaagatcgaacgagactctcggaatggcttggcgtaatgaagaagacagaggcgactacgaaatgaggactgaattaactgatttaatttacacgaattgaattgaatttaattttaacgctattttttctgaattagattgaattcaacttataaaattcacactgaataaggactgaattggatgagactcttacaaccagtgatggatgcacatgtattaatgtgggggctatatagtccccactaacaatattatcttttaaaaatttaaatgtaatttttttttaatttaataattataggttaaaatagtagaaaagctcccacaaaattaaataaatataataagagtgattataatataggtataaatatttttcattgataaataagcctccacaaaataaaaattctgagtttgtcactgcttacaaccacctgtccagtctcattgtgcatgctatgtacatggcttggaattgagatagagcaggacaaagacaactaattaaaaattgagttatgattatctcactttcaatttacactcaaaaattatataatatgtaattaatcatatatatattataaatagaagaataaatataataggactttaaataaatcatatttttacattcaaagtattaaattcttttatcacaaagaacgaaaaaaattactaaataaaatacacagcttgtacatataaattttcctaagaaaaaaaatagtttacatatataatatttaaagccaaggtaaatagtttacacatagtatacaattttaattgtgtattttgttagaaaattactaatataccaagatctatttgtatataacatagaacacaatagtaatatataataattaggtatgtgtatctgattaatccatagcaattatctctgtttgat

SEQ ID NO: 123168 - DNA, 1644 bp, Cannabis sativa
  modified_base (1613)..(1618): a, c, t, g, unknown or other
gctagccaagcctacactaggcagctctccatggtaggccaaacctgcatgaagcagtgtctggccacccgtaactccctgattggctgatgttctcgatgtgttgaggtagatctaggggtgttcgcggtgcggctggtgcggtttttgaccatttttttcaaactaacccgcacatgtggtttttttaattttccaaaccacacccgcaccgcgaaactaaaaaactgcaccgcaaaaaatggtgcagtgcggtttttgcggtttggactatcaccaaatatttatattatcacaaatacaataatgcttgtgcaataattgtcaaaaataccataaggcttgaaaataaatatgaaaaaaagttaagtttcaataatacaataattagtgggctttgagttgaatattcacctattggacctaaataaatatagaaattggtatttttataatgtgcggtgcggcagtttaggaaaaattcaaaccgcaaccgcaccgcaaagaatttcaaactgcatttttttttgcagtgtggtgcggtttgagcggtttgatgaatacccctaggtatatcacactaattgctagagtttggtggatccaagtacctgaagtgatcagtttcacttctttaattatcgctttgggtgtttccacccactttcggtcctagtcaattaaagattggcctttgagccgctcactcccctcaagaagggagtatgctcctctgcttggctagggggaatcctataggtgtctagctggccaaaggcttgttgatgtggttgttgttgagcctgagatccctggctgaccccccatgccactagttgacaggatctggctgttcttggcatcaaacctttgttggaaggcatgtcctcctttgggaaagggaaggcctgtcttggatcctgaggagccgggttgatcaggttgctgataaaccctccctaatctatcaacgagtcttccttggagtggatctttaatgagatcctagcctcttccattggtcctcttattgaactgtcttattaagtcgttggcctctctggtgcggtggtctaactttgcctgatgagatcgaaggatgtactcctggtcatccatccattcatctcaggaatattcatctctactgagtgaaaacatcacaatcagcaacgtgtggttctttagttgggctggcttagctgatggcctctgtcagtctggctaactggagatcttttcctaagtccacatggggctcgccaattacaggctcaccaactcctggtcctgtttctccaaaatattactagagacgagatccagttgttattcctgggggttgtcgcccatgagtccttccattagtgggagacgccagtggagggtcctccctaggaggtaaaggcctacttattcaaatccaccaggatgtttttgtcaatttggccagctgtgctgagcaaacccatggtgcctgtcgtggtggcaggattggccacatcaatagtgttcataggagttccagttgtggttggaacatgtgtatcgggatctacagtctatggatcttgaggtaggcccgaagatgaagatggtgttgggttttatgnnnnnnataaaactctttacaatctgattagt

SEQ ID NO: 123169 - DNA, 1569 bp, Cannabis sativa
tgttgttcaatccattcccacatacactatgagttgtttttgtttatcacagaagttttgcaaagaagttgaggcaatgatggtgaaattttggtggggttcttcctccgacaataagaaaattcattggaagaagtggaaatttctttgcaagtcaaagggtgatggtggtatggggtttagatcttttgtgcatttcaatcaagctttattggctaagcaagcttggcgtattttccaacaaccggatagtttgctcagtcgtgttttgaaaggtcggtattatcctcacactgaattcatgacagcttcaacaggtggtttatgttctttgacttggcagggtgtagtttggggtagggaattgttaactaaagatttaaggctgaaagtggggactggacatagtattatatgtggtgttgactcatggattcctggtcatgacaatttcaagcctttttgctattctagttctccctcaaaccatgttgcagattatatcacagcagaaagagagtggaatgttgagcttttgaaagctgacttttcaccactagatgtcaatcacattcttgcaattcctttatctttcattgctgcaaatgatagatggatttggcattatgatgtttcgggtgactactcagtaagtacagggtatcattttgcaaactcattggaagaaagtgaactttcttcttgctctaattcacaggacacatggtggaagactttttggagctttaatttgcctgctaaggttaaaatatttggctggaaagtaattcaatcttccattcctgtcgctaaatcactatttcataagaaaattattacttctgcaacctgctctttatgccaatcggcatgggaaacaataggacatgctatgttctcctgctgtcatgccaaggaggtatggaaaatctcaagtttttctttcaatcttacaagtgcatatcgaatgcaggatggtgattacttgatgtacttatcttcaaggtacactaagtctgagatggaaagaatcctgtacattatgtggtttatatggtctgatcgcaataacttcatccatgggaaaaagactaaagaacctataatgctgctatcgcaagctgatgcttatttgcagcaatacgagaaacttaatactgctgcactaccgaatactggttctcaaaccagttcagcagctggtgcaacaaagtggcatgctcctccagtgaacaaaatcaaaatgaatgtggatgcggcaattgattcttcgaggagtaaaattggtattggtgttattttaagaaattcttgtggacaggttcttgctgctatatctaaaccagcaataggaaatttcaagtcacaaaaaatggaagctaaagcgatgtttttagggctttcttgggcgaaacaattgaatcttcctattgattatgtggaaacggattgtttgatgcttgtgaatgcattgaatgggcgtacatctccaaattcgagttttcatgatctagtttctgatgtttcttctcatttattctatttctctaatgtttgcttacctcacat

SEQ ID NO: 123170 - DNA, 1371 bp, Cannabis sativa
aaatagttgaacattgttgaccgtattttttgttaatttagaaatttgattaaaaataagagtgaatgaagatgaaataaaaaacacacaggataaatatgtggtgaaatggtaatgaaatttgaacttacagtctacaagatttaaatttttacaatggtgaatctgaagaaatttcagtaataatacattccatttatattttgttgcaatttagtatagtttttttgttacactattcattagattggctcatgatatatacttaaaatttaggtgattttgttacaaactaggtggcgacatgttacgcatgtgcgaaatgtaaattttatcggtatatttagccaattgcgtcgacgaaagttgccagcaaaagaacaaacatgaaagagccaaaacatttagccaaaacttttactgaagcatatttgctaataaaagcaacctgtactggcgcaatccagtaaaattgtgaaaattaaccatcttttagagaaaacattttttagaaattgtttatctttactggaagtcacatatttttacgggagaattcctacgtgcaaatattctttggcgggacagatgactttttcccaacgaaaatatgcactggcgaaagccaacaaaaagtatgtggaaaattttcgcctcgcttttcgataagcgaaaaaactttagccagcacaaattttcgccgataaaaatataatgaaatggtgcatttcatttttcaaggcttttattattttgtgttggcgcattaagaaacttttaccagcacaacgaattgcgccagtaaaagtttcttaataacatacgaaacgaattttttctttcccatttctgctcctcctcatcctcctcctcctctctctcaactgtctctctctcattctctctatagtctctctctctctctcctctctctttgtttgccacccactgctgtccccgtctactccgccctgtcccctgtcccccatcctttaccactctatcctctctctctcagtctgcatatatatatttaaaaaaaaaaaaaataactctggccacctacttacacacttccaaccaccacccgagcgaaggacctttgcttccaccattactttgttattaattttgagtaaatcctaacactactacaaattacactattcaaatcggtcaacactactgttcatagcattgaccgacgtgaatagtgtccaaataattagacccgtctatttaaaaacgacactaataatattatttgcgtcttttgcttaaatgacattgttgtgataaatccaacacgtaagtatacgtatcgttttaacaagtaatactcaggtaagtgagatcgttcccacgaggact

SEQ ID NO: 123171 - DNA, 1386 bp, Cannabis sativa
ttatgtaattattcttttaaaaattacataaaattaacttttttgatgaataaattatacaatacaatgtttttgggctaatcaattatatcatacaagttgatttataaaaagggatttttataccacatactgaaatttttactttttttacttttttactgtagggcggaattcttttcaaaaatacagtgtagtgtgttaagttttcacggttgttccacagttattttttagttattctactgttgttttaattattctgttttgttgttttatggtttttttttataaaaaaatacagtatttttgtaaaaaaattctaccttataataaaattataaatttttgctcaaaatccagtatttttttataagaactcttataacaattatatagttggaagaaaaaaataagcagtaaaagaataattattttttcaatatgtgtgctgcaccttatatattattgtatttagaacaataatatattaatgagatagttgttagacggaaagttgtcaatagtgcaaacggtaagttaggagctatgtattaaagctgttaaatcattcaatgatgtggacatttttaattggttagacaagaaaatagacagcaatattagacagaggatgtgagtcccttaatctacctaatattggtggaatattctatttttatgtataccctaaaataccttctcattccaaaattttctaacttctttctatttccctcttgctcgttctctctctttccctctcacagattctcattgaaatacccatcgaaacccccattacaggattcaagactgcgaccatccaccaagaccacgccaattcagctgaccgagagggctcctttttttattcgaccgagatctcgtcaatcgcttcctcaactgcgaatagagagaccaccaccactaacaaagaccacaaacagagaaaagacaaacaaagacattttctgtaattttgtggtttttttttttgttttttcgagtcggtccgatagtgtccgatacaggttcgataagagattccaaaatttaatttttgaggttgatggtgaaggtccaatagtggtctaatatagattcgatggtggttcgacgcttactaactgattggtggacgtatttcgtgtctgatgggggttcgacactgttcgaatatcggacacgaaatgtttacaccaattagttagtaagcatcgaaccaccatcgaatatatattaaaccaccatcagacatgaaaagcctaccaatctgttactaagcatctgaccaccatcgaacctacatcaaaccactatcaggccttctccatcaacctcaaaaacttaaattttagaacctactattgaacatatatcaga

SEQ ID NO: 123172 - DNA, 1262 bp, Cannabis sativa
taaattatatttataatttcaatactattactttgtttataataacacacattaaaatattatattttagattatatcactcagtataattacaatacatatacgtaaagattacaaaaattaaacaacaccgcgcgaagcgcgacttagttccctagttgataataaaagtagtcttttgcaaagttgtctttgtttatgtttaggccacctattggaagcagtctagaaattaaaacttaagaccatctccaattaatgtcatatctaaaatgaatttgtgttatatttagtattatttacttagtaaaaataataattaattatattgatagtcatttcatattttattaaaaatatacaaaaattattatattttatttttttatagcttagatgatagtaatacgataaataaaagatgtaaagtttaataaaaaaaagtcaattgatcataataattagtgacattttagtgcgtaaaaaagtaatatttattatgagctaaatttaacagaatgctacatcatatattaaatttagcacaacttttagcatgtgtcaaatttaacatactttttataacactattggattagtaatttttgttaagtgtgctaaaatataacaatacaccatatttataacactctattaaagatgtctaaccaactgtctaaaatgtcaaaaattattttataagaaattatcacaactaaaccagtgcaaaataacttcgaaaaagatattattttgccaaaggattattttgacaagggtccttaaaatagttgatattagatgtatatttgtattttttctaaagaaaggatattttttagaatatttatatttaaggcaatgtttggtagctggagaatataaagaggatggagagttaatgaaggatgtagaataagagggagggagagtgaagtaagaatccttttaagttgtttagttaaaagaatggagtgataaaaagatcagagtatttttttttagtgtagtactgtaatgatattttaccatcaattaatagcttaatagcttaaaggtcttgggttcgaactcatgacctctccctttttcccatccctccctcaccactaagatagctttaatggcttaaaatataatggggtgtttggaatgggttaaagttaacaagggaatggtaatgtgaaacattaccttgtttgttttgagactttagccttggaatgttattcccttagtattataactacccttgaggaggg

SEQ ID NO: 123173 - DNA, 1646 bp, Cannabis sativa
  modified_base (1071)..(1074): a, c, t, g, unknown or other
atagaatctcttttgtttatttctttattaaattaaatccaacatagtttctatggtggtcaagaaaaatggcattaaggcacaaaactcaaaaaataacatataagtgcttaatcaaatcaaaaatacctaatcatatatctccaagcaaatattcacccataacatcattaaaaagaaactaacaagtaaactttattctgaaatagttaacataaaaataaaaaataatacaacggtattatattgatcaagcacaaacctagaaaaaatctacttaataaaaaactaatacaacagaaactaattagtatactaaccaaaattatagccaaaaatactactaaatcataaactgttaataacatacacattaaaaataaaaaatacactaaaaaacctaaaataacaaatatatatacacacattccatcagaaaactatacagtaaactttaatctttaaataacaaataaacatacataaaaaataaactattcagtacaataaatagagagataaacgataaataacaaaaataataaaattaatcctaacttatttttttaaaaaaataatatatacactaaattttataaaaaagaatattgttattataataataaaaaaaaagttgtagcttgaaaagaaagaattaagataatgacaaaaacataaatagatatattatttagagaaaaaaaaaagtaaaccaatatgattaaaagctgaaacaaaataaaataatatgcacattgcatattaattttaaaattttatatagttatattacataattttaaaattttaaaataaaacaatatattacataattatatagttagcggtaattgtaatattaattttaaaatttcgtctctatgcgtaaatttctcttttttatttttacacttcaaaatagtttttttttgtatttttacgaaattctacatagaaactcctattcaactagctctgcaacctaaattgtaacaaaaaatcgacatattgcaattagcgttgcagccactttagaaacccaaaccgtaaatttaaaaaaaaaagttaaannnnatagtatataagataattccccttttttttattagtacagttgtttatattatttattaatttaaaatatgtcacactcgatattaaaatgcaccaatgatagtttgtcacctagtttagcactttaagagtataatatatatagtgtatatatattgcatacatatgtattgtaacatttatgcaatcaattttttattttaatttttgtattatttttacaattgagttgtaatttattttgatttattcttttattgatatatgaaatctctaacattccaacaataactaaaatgactctctataataaataatggatatagtcacgtttggttggaggaatgaaaatataggaataggaatgagaatgagaataagaataggaatagaatggaataaaatttaaaatgcataaaaaaaaaattgataaaaaaaatcttcaattttttatttcttgttacattggaatgatctttccttcctttttaaaatggtagaaacaacattccattggagtgccatttcaatactttgaaatgcaaaaaaaaaaaaaaaaaataaaatgaaaa

SEQ ID NO: 123174 - DNA, 2091 bp, Cannabis sativa
  modified_base (913)..(916): a, c, t, g, unknown or other
  modified_base (2028)..(2036): a, c, t, g, unknown or other
taatatcaaaaaaaattaaatactactttaaactgggtattacaaaatactacttttacagagcagcatggcaaacagaagcccatttagctttaccaataccacgaaatgaactgcatcaatcttcataactaacaacctccatgtaatttaactaatataaaggaaaagctaagaaagacaaagctcttaccaccatgagcggtctcagttgtttaatatagaaggaattttcggtaaaatgatattgatttgagttcgggccatacattgatagaacactttcaacacaaaaaggagaatttagtgatttgtcatctttcttctgttacaacaggattataagagaggaaccaatttgatgactcaacaattattgacatttcaaaatcaaagaataataataatcgaaggaagactgaacttgaaaattttgatgaaacatgggcttggatggaggagatgacagcagtgatcgatgagaaattagttgaagaattcctctgttgaaaaatcaaaagaaataagttagggttaagaatctaaatgaatgaaaatgaaaatgaatttcttgtttacatttttttatactgagatggggattagggttaagatttgggtttcagttttagaaaacttgtgatttgggatgctaatgtgggttccgattccaaatttgaccaagattaaaaagagagacagagagagatagaagagattgagaagctttacaatggtggtctccggtggtctccagtggtttccaacgatcacaaggtttgaagtttagaagaaaaaaggggaaaagaaaagggttactgtaaaattgataagaaaagaatgattttaggtggtgtttgctttgatgtaatgtaatgtaatgggaatggtaattgtaatatgaatggtaatnnnntggaataagaattgtaatataaatggtattatgatgtttggtttaactctgtaataaaaattgtaatcaaataaataagttgtatattgacaaatatacccttagttttatttattttaatttttaaaattttaaaaaaaagtaataaaaaagggcaaaagagatattttctaataatgtaatcatcattacattggtttttttatgatgtaatggggtttacaatacatagtgtaatagccattacaatgtaaagccattacaaaggtttaaaaatgaaagcaaacaatgtaatggtaataatgattccattacaattctcattacactaaaccaaacatgccattaatgtaaacatgagaaaaggaaaatataagcaatgccctcaacgtgcttgacaaaatgccacatagaaactctgaatctcaagataatcatcagacatacacacaaatcatacaaattaaaaaaactataaaccttttcttgatcacatttgagctcgagttctgctccaaagaagctgaaactcttgtacccaagcttctacttctgctgaatcgcgttttcggcactcctttcaactagaaactaaaaaagaagccgtgaaagaacaacacccaagtcaaagtttgttttgaactaaaacatttaatgaaatcatgggaaattaaagaaatgttttctttataaagggcgagggagctttagttaccgtgtttaaattgaacaggagaggagacgaggtatatgggtgaagaaggtctgaagcaatgagcttaaatgaacatttatgtgtacaaacaataaaagtattgtaaaaaaggtcatttcccttttatttttcactttttaaatatttaaataaaataaaattaaataactgtgtaataattttaattatgaaattatatgtgtaaaaatttaaataatttaagtaaaataaataaattgctaaaagatccttatttaataatatattgtaaaacattaattaataattatacttaatttcattttaaaatataattaatcttaatgaaagttttaaaaggaaatcaattaacaggttaataacaggttacatgtcattttttatttatttttatttnnnnnnnnnattaatcacaaccatttaatagtgatccaatggctaaaaaaaatgtaaccatgat

SEQ ID NO: 123175 - DNA, 3097 bp, Cannabis sativa
ataaattaaaggaaattaagataaaggaaattaaacaataataaattactagagttacatctaacactcaacatttcaatttgtgacaaaacaagatatgtaaaatatttttatatttcaatatttcgcataattactgaaaaatatttatttggtaattttattcatcactaagatcatctttggttgtatttttttgttcactaatttgtactaaatattatatcaaataaatatattttgcttaaaaatcttacattttatattatttacattaataatcaataatataactaatttatgatataattatgtatatatttgtcaacaaataatttatgattattttttcaacaaataaaaatagacgttaaaatgaaaacaaaaaaaaagttatgcaccaatttggtttgaatttaaattcaacactatctataatgtgaaatttgatgtacgctaatttggtgtaacattttgtgtatcttttaagtggagtgatgtgaaaattctatgatgcaccttttagaaatgttttaagtttgattaattgcaacttacaatttacaaagagaaatttaactttctatgtatttattggattaaaattatttttctaaacttaagttaacctacatcagtagaataggctaacatttataaaacttaattctacctcccgtttcaaacacctgactctctcttttctccccttctctccctcgctttctgaattcaccccaaggactcgacccacaacccaccacccacaatctcggtcacttctctccatgaccaccgtgactacagactcaacaacctgtggacccaatgaccaccgtgaacctaacgacacacggacctaacgacttctccatcaaccacgacttctctatcaacaatattgtcgtagaagtaaattgtatgattaatgcctgatatttgtgaattaatgttaaatgtagggttgaaaacagtcgaatatgagttttaggtagaaaactggtttttttgccatgctcgagtctttttgttgttaaagtgagtaaaggttaaagacgaagatccgatggtggtctgatgctacctataaatgtaaaagtgggattaaaagtttttatcacactttttatttttttcatgtgtaaaaactgagataaaaagtcccttttgttgtagtgtccgatggtggttcgatattgcctgatgtcttcataacaagtttaatgaatggagcttaacatctataaatgtaaaatatggtccgatagtagtctgatgctaccattttattaaaaaaaaaaaaaaaagatagcatcagacctccatcgaaccaccatcgatatggatggaaatgaggagtatagatatggtgaaattataacagaagagaagaaaaaaaggtattatggatactaatatacatcgtgcccgtttttttaattttggtatccttgtgtttaaaaaatttaatatacaccaaatatatacatataaattcaaatattcttttacaaaggcccaaataaataataaaaaaaagggttaatatatgtaattgtttacaaataaaggacttgtgtgcaaaaataaataaaatgcagttgaattgatttataaaggattgagaggttgatattgattctgagtcatataggatgacttggcttcaagccaatgaacttgtagcattttatgtgctgtgtgttataatttcatatatctttctcaagaaagctactttaaagtgaaagaaaaatattagttgaatatatattctatcattaatgtgatggatacatacttgtttggtttttattaaagttgaacagtagatatttataataatagagttgtacataattaaataccacacttcttcttttgaaaatctttggttgtcagcttctttctttctccttcacacacacatatatctattctatttcatatgtttatgcatgtgtgaagcaaaattgtatttcctctgttcaactctgtctcatattaatatctctgtggctctcatcttcactctctctcaatcacacaaacacaaagattaagatatattcatatatagttataaatacaagtgttatttgcggaaaaatctctttatgttttaattgtatacaacttaactcttatttttttagagtagtaaaattcctttatatttaccttttttttttttaatttgaggtgccagttaaatatcattattatatactcattgaattaccactgtattggcttcaagttgacattcagttaatatttaatgatgatatttatctaacacctcaaatttagagagaaaaaataaactcaacaatcaacatcaaaggagttttcccacaaaaatttaagtgtagaacatcttatatgaatactctattgaagaataaccttaaatttattataataaagttaagtctcaatttaagtaagttataaataagaataatctttaaattgtaattagttatataatttttaagtcttgtatttaaaaaaaatatacatctatataagaataattatgtccccaattggttaagcttctacttttacttatagctagaagtataaaataagtataatatacttatcttaatgatattcaatcactttgaaaatcactcgtatttagaaaaatgattcaaagtgtttgaatatcatttaaaaaaaatattttgtgagtaaattaagaattatttaaattattgtgggcctgtttggcatggctttggaagagcttttgaagtctcaaagctacttttagataatgtttggaataaaatatgagaagactttttttgatttaaaagagctttttagagaagcaatgactcaccaacttttttaggaagagcttttaaaaaaacataggaaattatttttttagttataatacctaatttaccctttttttcaaaaataaaataaaataattaaatcacattcatgccgaatatgatattgtttttaaaaaaaaaaataagaatctctccatataaaatggattgcatttattatccattcaattactttttaattagaaaagaatattgttagtattatatatgtagaatgc

SEQ ID NO: 123176 - DNA, 1020 bp, Cannabis sativa
gttgaggtaagtgagagaaagtgcataaagaacattgaaaatgatattgtaaccaaccactgctccaagcccaatccaataccaatatgattttgttggttgtagccttgagcaacaagacgtgctttgcatctttcaaccgagtcgtcactgttatatttgattttgtagacccaacgacatccaatagctcttttgttgggtggtaatttgatcactcttcaagttttgtttttgagaagagcaaaaatttcagtgttcatagcatcattctacaccttgtattgacttgcttgtttaaaatttattggttcaaatagagcagtaactggaagaacaaaagctttatgagatttagaaagtttatcatatgaaagaaatttatgcagggggtgaggtgtagaagattggtcttagattgcagaattgcactcataatcccgtagataagcagggggtctggtgagtcgtgaggttcgtctggttgctgtaggatttgtagcagtgggattaatagcaacatcttctggtgcactagaaatgctggttggtgctgctgtgagatgttcttgattatcaagttctgcagcagcagttgtatgttcaggtgtagctgtatggatcgtgacagaaggaggatctgtagggaaatcacttacatatgtgttagttaaagttgatgagggaaaaaccatatgggagaaaggatcaacattaacatcagatgtattaagtttctgaaaagggaaaatattttcatgaaagtatacattccttgagatgaaatttttttttgtatttaagtcatagagtttgtaacctttgattccttggcgataacctatgaaaacacaaggtgtggctcttggttcaaatttggtgcgattggcagttagagtagaagcaaaggcaaggcaaccgaagtttctcagattagaataatttggtgtaatatcgaataagagttcaaaaggagttttattgtgaagaagaggagtaggggttttatttattaaaaaa

SEQ ID NO: 123177 - DNA, 1015 bp, Cannabis sativa
tgacatgtggcatcttaataaatacaattaatatttttagagaaatgttaaaagaggcttaatacatctttaatagtaatatcctttacagatttaaaaatctacatatcattaaaaaatataatattttattttattttggtgtcccataacaatgctcatatttttagagaaatgttaaaggtacctagtaccttcctatgtattaatattgttattgatccagctaaatatcgagtcctatatagctaatgtaataatttttagagaatattactagctaactgcaaggagacatgtctagaggtgctaaacactacaaatgcccagtaacaatgttcatgtttttaacaaattggtattaactagaatggatgaaaactcattattaaaaaaaaaaaaaaaaatagatggaaactaacatgtagtttttaaatcgaaaaaatagatgtggtatataattgtatgaaataaaaaatataaagtatttgtaccataaatttcttcttattttaatatataatttttaatttttgttcttaaaaactataaaaatatatgttggagtcggagtatttttttattatgatagtatttgttgtaattacgacattatttgaataaattttaaaaagattataaatagtcttgaaaacaaatttaaatgtttttgaatacgtgttgtaaaatagaatattagaaacatagtcgttggtattataaattttccaatttgtttttttaaaatttaaagaaaaaatgtcataaatataacaaatatttttgtagaaaaagaaaaatactttggtacatatttttagagaacaaaattgaaatagaagattaaaactcaatctcaaaactaagactaaatctcaaacctaactgataatgaataaaatagtctataatattatatgagtaatgtttaccgagattttcggcaaccgattaaacaataaatatacgaaagctgtaggaagtttaatgcatgagatttttacgtggttggggc

SEQ ID NO: 123178 - DNA, 1256 bp, Cannabis sativa
agagagaccatatcacatttcaccatcaatggatatgacattgagccaaaaacactgctccaagtgaatgcttgggcaattggacgagaccccaagaactggaaggatcccggagagttcatcccagagagatttgagggtagtttcattgatttcaaaggtcaacatttcgagctgttgccatttggatcggggagaagagcatgtcctgccatttacatgggaacaacaacagttgaatttgggcttgcaaatctcttatacagctttaactggaaattgcctgatggaatgaaagaacaagatctcaacatggaagagatagctggtctttctattaccaacggtaagagaactgccgtcaaccttgtcccggagaagcccttttaatatactttaataaatatgcattatatatatatgcatgattgaatactaaattgataggagtactgtgtttgtgtttgttatggatcaatgcatgtagctatgaaaatgagtaaacaaaaaaaaaacctttaattgaatcagatcattattgaaaccaacatgacaaacatggccatatatttgtgataattagtaacacacattgtattacattagtttctgtttattttattaatagaagcaaatcattctccatcactagggtgaacgagcataatgtacttggacattacacgaccacatacaaagcacaccaatttggaaatgtagaaattgggaggaaaacttatggtgatttgttgtgtcatatcatcatgttgtatctttcggaggtaaacatcaagagctggaaggaatcccaacctcttctcccttagtatccacctaagatgttcgacaaaaaccaagaacatgtgatccccattacccatgaccacatcatcatattcacctctgctaatcaaggcccaacctttctcattagatccatagtgaaacatttcaaaaatcctctcggacatgaggtcctctgccataagttgttccttggagtaattcatgctctcaatcctcatccaaaagtgtctcataagcttaatatcaagtgatacgctcaagttctcgttagaaaccatatcgataatgttaagcctagctttctcatttgccagaggatccttacttcttgttcctacgtaaagcaactccaaggggatgtgggatcggcgagctacttcttttgcggccctagtgaattttcgtatccacccaatatcatctcctccgtacaagcatatgtatctctt

SEQ ID NO: 123179 - DNA, 1009 bp, Cannabis sativa
tgctactcaaatttttgcttgaccttggtcaaaatataatctaatagtaatttttattttatttaatggtatgtattgatttttgatgatacaagatacttgtctatgttctcaaaaagcctaagtgaggaatacaaacagcgtggaattgacattcagtgtcaggttggttaattcaactttttctaatcataattaatttataataatattcaataataataaaaaaagagataatgcatattttcctctgttatttttctttttaatgtgtgattaaaacttttcataagtttatataaggtattttcctttttcaaaatgatttaaaaagttgtaaattatgccaagcagtctttacttgagaaataattcataaaatcttctcttttatgattaaaattatggatatattcacaaaatgaagaatacaatatcatattttatcaggctagtcttcattggtgatatcagttatgattactactagatatactactagatatcgaactagtattgtaagtctgtgcatgtcgtgttttttcggcttatatttattcgtgcttttcaaaaaataagtcgtgttgtgtctgtaatgccacaaaaaaatatagatcgtatcgtgtcatatcgacatttttatagggtagacccgccacagaccgtagacccaatattttataccgtgcttagattcgtattgtgctttgctcgtaccgattcgtattttttatacaaatcagcatattttcatattctgacttaaattgctttacttttttatattttattttttcttacaattagtttatatgtatattttaaaattttaattatatttatataccttttaaacaatgttttataaataatcatacaaaaaaattattaatatcattataatcagcttttagatcgtattgagagacttgttgtgcttctttggagagtttggggagctcgtaatgacttagtttggaataacaagcctttgtcagtagagagagtg

SEQ ID NO: 123180 - DNA, 1177 bp, Cannabis sativa
ttaaattttattccattctattcttattcccattctcattcctattcttatattttcattcctcccaatcaaacgcctcctaagtacttatgcctatttatcttattatttaatagtgtttgcatatatccaaatattctcttctcgaggacaaaatgggtattatgtaaaataagagggacaaaataggaaactaaagttcacgagtcctgtcatttcattcccaccgtacggggcacaactaaaaagcttttgtcagttgggataagccaaattagtgggatccacatatattgaattggacggtcacgatcaactgatctgacggtaggtcccacctgttaagctccgttagatacggagacctttttgtttgtcggaaataatcaaacccagttttactcaaatagttttaacactttttttcaagtcacgtttggcgaatcgctttgactcgtcatttttttgtcgctttttgatgacgtgtcttgagctacaattacgtcgatcgtgtggtgtgtattggatggacggtcgagatttggtgaggtgggataaaggagatattgagcgttggatgagagaaaagttgaggcgtgagtgtgattgacagccgtagttggcggactcacgtagtaggtttatgctttgtttgtaaaattgataaattgacatgaaaaatgacaaaataatatataatttttaccaaaatgctattttattggaaagttaaaaaaaatagaaaaataatataaagtaactagttacttaataaaatatttgttatgttacttagacttgaaagaggtagagttagaaagtgttcaattaagagaaaatgaaactcaagtattagagagagttagcattaccaacaattaaacttaaaagactaattagtatttttatccctgaattttaacatgtaacaaatcatgcttccaaaatttttaaggccattaaaaattcttactgaactattgacattgttagattaaataatttttgtctaattttaataagaaaagttttaacatagatgaaagttcaaagaacatgatatgacgtatgttaaagatcgagagccatgatttaatacatattaaaatttagagagtatgatttaatgtataaacaatcaccgaatgaataaaattgaatgaaatttgataaaaat

SEQ ID NO: 123181 - DNA, 1834 bp, Cannabis sativa
  modified_base (1762)..(1769): a, c, t, g, unknown or other
gcccatcacgaaagaactccacaattaagcgtgcttgacttggggtaatttcaggatgggtgacatactcgtgttggtctgtatggtcaaccgttaatccatgaagcagccagagtgacgtactcgtgtacaagagccattcattccgtgggtgtaaggacccaatagaggcttgaagcgaggacgttaccaaaatataaatacttcagactttgagcatagggagcaaagtttttggtcctgctccacaagctaatctggcagccaaaaccaactcaggacattcaactggacgtgttcattgtggtttctctaatcaaaatcaaaactacaatggaggaggtcaattctctagcaatcgctgaaattctggaagagctcgaggtaggggcactcaaatggtccaagaccaacttttcaagtttgtggcaagtatggtcattttgctactgtgtgctataatcaatttgatgaaaacaatatgagatgtgatcctaataaccctcagtcttagaataaaccaacacaaactagccacaatgccttcattgcaactcctaaaatcttggaaagtattgcgtggtttgtcgacagtggagctagcaaccacatcagctccgatgcttccaacatgagatagaaacaagactacaatggtaaataaaaggtcgcagtcggtaatggcaataagctcataatttcatatattaggaaatggaattctgaacactaaaataagaaataaattactactgaaagatatgcttctggttcctaaaattgcaaaaaattaattagtatttcaaaatttaccaaatgataataatatactaattgagttttatactgattattgtttggtgaaggataaagttcaaggagggtgctacttcaaggagtgcttaaagatgggttatatcagctggtttcaccttaatatcagtcacaatcttcatgttcttcgtccacaaagtctgatcaatctcagaccaagtcatgttatctttcaaatactgttgttagctctaatagtcagtgtgttagtcagtccaaaattagtagaagttctatctctaaagttaatgtttggcataggcgtttaggtcatcaatcaactcgtgtgttaaatcaagttctagaattgagtcatgtaaaattttcccaaattgaaatgagaaatttttgtgatgcttgttactatggcaatgtgcacactttctatcctttaatctgtctaattctagagctaattttgttcttgagcttatacatactgacttagaggactagctcccatctcttctaatgtcaataatagattctacattcattttgtagatgacaacaatagattcacttggctttaccctcgaaaatttaaatttgatgccttaaattcctttcttaaattcaaagtctcaggggagaacaagtttgataagaaaattaaaagcatcaagtctgacttaggaggtgaatataaagccttttctgagtttgtctaactcatggtattgagtttcggcattcttgtcctcatacctcaacccaaaatggtcgtgctaagagaaagcattgacacattgtcaaaatgggcttaactctcctttctcaagcaagcatgcctttaaaatactagtgtgatgccttcaccatagctttatttctcaacaataggctcccaacaccaattttacaaaatcaatcaccctatgaagtgatatttaatatcaaactattagaattattttaccaggatctnnnnnnnnctcacaagtatgttgattaaaaacctaaatatgaacttctaaaacgataataagaaaacacatat

SEQ ID NO: 123182 - DNA, 2043 bp, Cannabis sativa
tttaattattaattaattttgaaataatactttttttttttgaaaaaacgtatttgattaaacaacaagttagatctctcggtcattacataaaatgtttgaagaaatagtagatagcgtaatatcaccaaacaacttgtgggtaataatacaatcatacatttattttcatctaaaatttaacaccaaaattaaaaacttctgtgttagtttctaatgttgaaattttagacctaaaaaaaaaaaaagaaatcacaaattttccgagtacagtcacaagagtgaagaataccaatttagagagagaaagagtatggagattgataaaaccaatcattctagttctacacataaaataggattatctttattatgcataattcatgagtcttgcaattcaaaatgataaaataatatttagtcgtaaatttaaatataaacaaaaattaattttgatcatttatgattaaaaataaaaaaaaattataactaaatataaattatcatttttgatattgttatgactaaaaaatccgtaacaaaaagtattagtcagaaaaatataatttgttgtgactaaatgtatttttagtctcaatacttgttgtgactaaactaaattagtaataacttgtgactaaactaaactaaattctatattctagtcacaagtaattttttattttgactaaaaattacatttagttacaaaaaatgaatgtttattgccaaataagactgagttatttcttccataccacaaccaccaaatggttgtcatcattaattcaaaaacattacgagataatctgtcaaaaaggaatagaagaatttcctgcattggctcatatacgtacacagcgacggagcaccgactacaaccccaactgataccacactggaatcaaactagaacagaaaaatagagcatgctcaggaatttcaacttcttctccgcataatgaacatcaaagtcgtacctaactttccaagagatgagttgtaacaagcatatctccttaaaacaagtatactaacatatctccttaaaaacatattgcaatctagttgtaacttcgaacgtgttgtgttggcttggtctatatttatttgcattttttttttttaaaaaaaaagaaaataggtcctgttgtgtcgtgctatagaaaattataggtcgtgttgtagtgttgtaccgtgctaatattgttaaggggtacgtacgtaggcccgacatgacctgtagacccggtattttcgtgtcgtgctcgaattcatactgtgttttgctcgtatttctcaaccaggccgtcagcctattttcatattcggatttgaatttgtgctttaatttttttatgtttttttaaaattactaaagtatatgtatattttatagttttagttatatttatataactttttaacaatattttaaaaataatcatataaaaaaattattagcattattaaaattcaaatatttacttataaatactcaaatttttatatcccaccttataaattaatatataaatcttaatttttttcatatttaatgattttaactataaaattataatttattattatatttaagttttattattttttaattaacttatttacaatcgataaatgctattaataataataataataataaattataatatttttaatatatcgtgttgtgttttttgggcttgtgtaataacgtgtctttcgagctagtatattcgtgcttatgtgtcgtgcttttcatgcttctcgtatcgtgccatgcgtaaggacatatttttgtgtcctatcgtgtcaatatattttgtaggttattttgtggagggtttacaattacagggactttactcattactttaattttaaatataatttgtttgattttgattttcaaccgtttatattaaggtgctagtatgttattactagccaaagggtaatacggctagttattcttagaaattttgttgttttttttttttttttttgttttttagtaatgttgagctagtgatatgagtt

SEQ ID NO: 123183 - DNA, 818 bp, Cannabis sativa
  modified_base (776)..(783): a, c, t, g, unknown or other
gtatttttgtaattttttttccttttttgtatttttttgtttttttccctattaaaattgctatggagaacattacgtacagctagacaatcagactccataacaaccttttaaatttttttagttttaatccaactcaaaacctccttcaagcctacggcctcagcacaagcaggattagcacgagcctgtttacgaatagcaacatcataaatgagggagcaatccaaccaatcccaaagaaactatactcttcaacaactccatccacgacagagttatcatctggaggacaagcattggctaatttccattgattaaaataagctaaagtcaagacacaacaacagtagcaacatgtttcttttcattccaaacaacttattccttgccttccaaataccccaacaaagcatggaaataagacacataatagctaaaggaaaagaatgcataagagatacaaactagtttgcaaacgacatttttgcagtagtcttaatgtcatgaggaaaaagaatccaacacattcttgtaaaagcacaatccaccaataaatgagccacagtttcagttgtagcttgaccaaaaggacaaagcaatgggacatccacacgtttctcaagcagctttacccgagttggaaggttaccgcgccaagctctccacaccatatttgaaacttttgttggaatttttaggttccatagattcctccacaaaccagagttaccagttccagactaactgctgagttttataccctaaataaaacnnnnnnnnatataatcagatttatttattaataaagatcagaa

SEQ ID NO: 123184 - DNA, 592 bp, Cannabis sativa
tcctggtaaaatgattccaacaaaaatatggaacatgtgtcatccactcctattgccacgtcatggtacaaaaaataggataacaaattgttttataattgttttcttaatttttatcaaattttaaattagttttataattgatttcttaattattattagattttaatctagtttgtatttaaattttaaattttaaatgaaattttaaataaatttaaatatttaagtgtattaattttaaattaaggttttatatgtaataatttcaaattataaggttacacgtgaaataattttaaattataaggttatatgtgttataatatcaaattataaagagttttgctacaaatattttgataatttaagtacaaaaaaattactaaaagatccttgtgtagtaacaaatagggatgcacacggggcggagaggctggaagtgctcccctatctccatccatgttaaggattttaatctccatccctgcttatttttcatcggggacggggcgggatggagcagagaatcccttaatataaaaattaagtttattttaaaattttaaatgtatgaaaatattaaattata

SEQ ID NO: 123185 - DNA, 743 bp, Cannabis sativa
caataaaaaattgtacagaaaccctttgtaactagcgctgcaaccagtttagaaacccaaactgtaaattttaagaaaaatttaaaaaaatagtatatgaaataattccccaaatttatattactcattcaataatacaaatttatatactagatattagtttgcatgtttagacttgcattgtttttattacctaattattaattaaaatattaaatctaatgtaattaattctataaaaaaataaattcaaatttaaatttagatttgtattgaaaaatatctacctaatttatcaatatttttaaataattatatgagttacattttaataaataataataataaaaattagatattttaaaaacaatgataaatgaattagtagaaaaagtaattaattatttgatttaacatttaatgcaaattttaattaagattcatttaaaacttaattttttttatattgtaaataattagataaattatattttcataaacaataaaataaaatttataattttttagggtaaatacttttttggactctgtgttttgtaaaagttacagattggatcttctgtttcgttaaatggcaaaatagaccttaaattttttattatggtacaaataagacttttagccaaattttcgacagtttttttaataaccaactttaagacaattcttaacatgaacaaatgtaaaaaatttaaccagctttatcataacactttcaggtc

SEQ ID NO: 123186 - DNA, 1083 bp, Cannabis sativa
atttttatttcagaagagcttatttgatagcccataaagttcttcttaggtaatgatgcacggaatccacctaaagcaatagcctcacctgaaattaaaatcttatgtagtgtgaataaaaaaattggttcttatacaaatactaattttgccaaatattattaaataaaattatttgatacaatggtaattaaagatgtttttgaaaattcaaggaggtcacatctaaattttatttccaacttggatctaacacctacattaaaataagtttgggactaatttatgaagaaaaatatgttagagactaaaaaatgacagtattgggtgttggataccaataatgttctttagcataagaaggttgtgttattattaattacaaaaacaaaagctttataggagaccaaaacgagaaaaagaatttcaaaatcttattaacaaatgctttttatttccaaaatatattctatacataacatatcttagtagtgcaataattgaaaaatcatttccaattttgtgttctttaaatattgcttaaagtcatatgcctttatgggaccattaattagtatcatcattcattgacaatccaaacaaatagagacagacaagattttcaggtcttactattggtagttctggccccacaaaggtgtaaaacctttgtggcttacttggtgataaatggtcttggaaactcaacctcaaaaacattatctctcaaagaggttttttggccaaagaagaagaaaataatagcaaatgatctataaagaaatgcacaccaacataatttttatatatctatatctatttgtatgcatatattcagaatgagaggtggtgaggccaaaaaatccaagactatggacttgtaattggttagtggaaattaaattatccaatctaatgataatcgaccgattcgaatacaactgactgtgccaaacatcagatattcaattgtgatcggattagattggatgttatttttgaatatccaattgaatcagatcagatcagatcggatgttgaatgagcttattttatatagttatacgtaaaatatatatgtat

SEQ ID NO: 123187 - DNA, 629 bp, Cannabis sativa
tatatatacaattgtgaccctaattatttctaacattatagactagcataataggaaaataataactcaatattttagttattacatatagtatcaatattgggttctagtattttactttaataataagtatataaactcactaacgatttataagttgataaatgataatcatgtcgagcactataaaattaatacattaataattatttatttttatttaatatattaaagtgcttaataataactatatgttaacatgcatgccgttttataataaattaataattttttatattatttattatcaaaatttgtaaaaccttacatattattataatgtatccataatattatcaccttgttatatagttgatatttattttgagtgcgttaattttcttccataaatttaattaaatataagactgatgatcccagaatttattttatggctttattcaacgactacctttgactaattaataacattaatgatgcaggaaaaatatatttcgacccatggtaaataatcacattagacaaacactaataaagggtaaatactattttggaccatctgttttacaaaagttactaattggaccctgtgttttgttaaatgacaa

SEQ ID NO: 123188 - DNA, 506 bp, Cannabis sativa
aatgtaccctgagacccatataatataccacggaatacattccgtaaaaatacgtcacgggacaaaatcatatccctatatatatatataaaaaaaactacagtgaaaagtcaatttcgagtcacgttatatatatatatggtcatgcaggaattgagacagggttccatggaccatggtcgcatgttctctcatgcatagtatatataataatgatatatatatatattgtttttttttttttttaaataatatcaaagtgaggaagtgtgttatattcccatatattaaaaaggggttttgtacaatgggtatatagatatatagtcacaaatgtatatgagtccaaggagattaaattaaagatttagaatatatatatacaatagttaatctaataattaatacaaattcttagtttcttaaagaataaggttttggctcggatcaatagttgggatggcaaattcttatctcgagccggcaaggaaatacttctcaaaact

SEQ ID NO: 123189 - DNA, 521 bp, Cannabis sativa
tgaaaaagttttgatctttgggactgaaaactttcgtgtcaatatatcagaggacgtgaacgatgaaggtgtaagctttacagaagacatcattaatggagttagaaagagaggtgttttaatggagtttgtgttgtaatagaaagtgaagaaaaggtatagtcttgaaagagagaagtgagggaatcttgaaacggctttggctgaggaagaggaggtggaggcctgagaggtttatatatgagttggtgggagagacgaggttatatatgacgtcattattgtattattaccaaaatatccttgtcgacttatttcctctttttaggatatttcttcgaatcttattttggtacgttctgtaatgaaattctaaaccgttgtttcctttttcctagaaaagaaatatctttctaaaaggaaaaaaaaaatgtaattcttttattagaagaaaaagtcaaattttcaatcaggtaaccaagaaaagggaacccagcaaaaaaaaaaaaaataataaatgg

SEQ ID NO: 123190 - DNA, 554 bp, Cannabis sativa
aacttaatctaaaattaatactaaaaataacctaacaggttctcatggaagaaaaggataaggttagttggtgtcgagaactgtggagtcagtacaatgttcctaaacacaactttatcacttggttagctgtccagaactggctgcaaataaggaataaattagcttctttcaaaatctgagtagatgacacttgtcttctttgtggtgataaagtggagacaatggagcatatattttttttttaaatgtatttacagtggcaggtgtcttgagttgttgaaattgtagctacaatgaaggactcctagttgctctcttgttcggcttttgagatggatatcgaaggccaggataactcggttcaggaagaaaattttctcagcaatgtgaacaatttggtgaaccagattaatttagtaaaatagaaatgattgttattagaattatagaatacaaactattcgttctgaaagtcctaattactacaagttctaattgataattctcaacagattaattctatgttatgaacagaatttaaaatcaaagaa

SEQ ID NO: 123191 - DNA, 1657 bp, Cannabis sativa
attttacatcataataaatattacgctaaattcgacataaaatttattatgtgctaaatttatataatttttttacacattattagagcagaaattttattaaatgagctattttataattttacatcaccgatttccattagagattgcatttctctttaattaaacaagcaattctctttttaattggttagggtagagtagattttcttttcttcgatctccaactccattttattattgttccaatttgagaaggtccattcacccattttgaggtcatttatgatagatctatcatccatgtcctctaaaaatgacagttactctttggacaaatccatttggaaatttgtatctacgaagaaaaaacatgggcactcttttttatttctgtacgggggtatgtgtactgccctgtttctttcaagtttatctttcatttttttggataattattgatatgatatgatagggtaggtgagtgtgtgaaaaggtgaccctctcaactttgtgcccattttcatcacaatagccacaaaaattaacaaaaaaagtctaaaccagtcagtccttcactaagggtacgtacgtacataccctacctcttcatgtccattagtgtaataacatatattgtcttctactttcaagccaaaaaactcttacaaccaccatagacattttaagtaataattaaagtggaaagcaaaatactaagacaatacagatttttattttatcctttgctttgcattattgcattgctcgtgtaccaactgtaaaatttagtaaaaataaaataaaatgcagtagtattaagaacaattttataatggaagaaactagtttctaacttatagatcttctttattacaaagaaaataatacaaaattaataaatacgatcatttgacttaatttgtacctcattacaattaattcaaataaagcaggagagaagaaatttaattagctgtataaaatgtaggtagagaaccgttttcttaaccacaagtttacttgctgagaaaacaatagaacagtactttgccattctcaataaattaatttctcatatctatttatgtgtgatttaattatgtcattttaatgttctttatggaaattgtcattttattgttgttggtttcttcagtttgaaaaacttactctgctctgctgacaataaaaaaagaactacatgtaattgaagttccacttgttcttttttatttttggtttcaacactttgttattgaaatttatcttgaatattatcatatttatttacaaaatcaattattgtactttctttttcctcacagcccgacttgatcttatccatttaaattatatacatcgttctgttgacttgtctatacatgtttgtttaattggagctatatttgaactaaagagttaaatccttaacagtaacatatatacatatgtcaatgtgagacgtagttttgtttcagtaccaattatgtttttcactaactcataaattattttgtcagcttagaattgataattgatttatatttatatttatatttagttggtatacaataataaactatatagtactgtagttctagctcattattttatgggtaaatactattttggatcctctgttttacaaaagtta

SEQ ID NO: 123192 - DNA, 1434 bp, Cannabis sativa
  modified_base (44)..(45): a, c, t, g, unknown or other
tttacaactaatattctaacaattatattattatataatttaanntatgagaatttatatgatttatgccatgttaagaccccgatggtgagctaggggcattttagtaattttgacccgagaagggtaaatcaatgaaattaatatatttgcgtgcctatggaactatattattatatagtatgcctgtgttgtctttttcaggtgtgttcagacaggttggcgcggtatagtcacaaccgggtatttcgggccgaaccgggttcggacccgaaatgcaattgggattgaattattggaattttaattattggtgaataatctaaaaattaattgggtttagatttgtgtgaatgacataaatacccttgtatgtgtgaattagtcctaggggcaaaatggtcattttgacctttatgttatatttgataaagaagtgaatttttttaaaaaaaatgaaatgaatatcctaattttgctaccccccatacccgaacccctctctttctcaaaccctcttttgcttcaacattgaagtgaaggaattttatgagaattatttgtgattaagcttgcttttgaggaattaaggcttggttgtggcttgaatttgaggtagctcttcttatcactctttaattttgaatttgtagctgaggtagaaattgaaaagcatgctcttctaagctttgaatgttcttgattgcatgagtgtgaattttgaaaagtttgagtattaattacaagatgttgttgtgagtttattgttgattaatggatgaggttgttgagtattttctaggtcacaatttatgtgttaaatgggtgttatgctgctggaaaattaagtgagttgggtaagtttgaagctcaagttcatgagcttgattttgtgtggaatgtgcaatctgaatctttggggtttattgttggaattgatgcatgaaatatgtattttttaactctctaatatttggtagcaactttactttgtgatttgggagtttggatgtaaattgtggtatttgattgtgttttggagctgaaattcgtgaaaatggttgctggtttctgggttttgaacccaagtgccgcgccgtggtatttagcatgccgcggcccgcacctattggtgagacctaggagttagtcccaggtgccgcggcatggcttttgcatgccacggcccgccctcgagtttttgagcagatttgagttctaacaactttaaaatgcataactttgtgatccgaactctgatttgggagttctatatatcattggaaagctcgttctgagctctatgtgattatctgtaatttaaataccacgtatatattttatgagtatggaatcaggggttaaccctatttgtgaaaatcccaatattgtgactaggattaccggcacctggtcaggagcatccggggattt

SEQ ID NO: 123193 - DNA, 1102 bp, Cannabis sativa
tattagttgttttcttactgggctttataagctcaccccctatgttctcccattctaggaactcagtttgatgctagcggatgaggatagtaccgttgagaaagaaattcgtcattagtttagtcttattctactctctaatcatctaatgaaactcattttgtgtttaagccgaaatggattgtctggatgacctaaattagctatgtactagttagaaatgaggaatgatggatgctaggtattattctggtattttattgacttattaaatatatctatttggtgattacataactgtggggatattattgttcttttatattgatgagtggtcatgattttcttattaatataggagttaattcattacttttaaattagtaatttttgttataaattaaaggatcatttataagctttatcttcctatagggggcaaagtgtgacctttaaccacccgaattatggatattacatatttgtcacgacctagggcttgagtcgtgacaattaaaattgaagactaaagaccaaacttttagaaggtagttcaaaaaggtatttaataataatattaaaggtcaaagttttgttaatcatcctaacgtatttttgcttcatatggtgttaatcatattacaaaaactataactaaaaatttctttagaatgtataataaagcataataaattaacatatcattgttgataaatttataggtttagaattataagtggtttaagttatataataagaagagacataaaattagatatcataataagaagagatataaaattaataatttttttttataaaaataacaaattatttattataatttattcaagtgcaaaacacatacaaattaataatgacatcataaacttccaacaacaaatttactaaaacaacataatacgaagtaaatttttgttggaaaaaaaaaacacatcaatttttacatactaaaaatctaataatcaaacataactaaatttataatcaattgatggattagcctgttagaaatttattggggtcacaattgtatatataaaatgtgtgttgggtcatcaaataaataagtcaaatttat

SEQ ID NO: 123194 - DNA, 1276 bp, Cannabis sativa
ctctaaaggtaaattttcaatagggaggtattttcagaccctttagcttctctttttataaaatgggttgaaaaaagggaagctaaagacccattttgtagtagtgacggtggagcagctgtcttcagaatgtccattagttttctttctgtcctggttgatagtatcactagggtggtttttctgcaccctgggcctaggtactctcatacattgcccttttagcatagttttgcctctgggagcagaagggcatccaggcttgaaagtaccagtggccttgtacgtcttagagggctggctgactagatttgtgtccttatgaggaggtttaggagcagattttgtgtgggctcacctaacatgcctttacctctatccttgtggggattcgaggtttcaatcttgattttccaaagagcacactcttcggccataacttccactaatgggttgtcgccagactctgccaggtcctcaaacatatcttggagacaataaattattctcttcatttttttcagtgagtttttcctgatttgctaactttgtctgagtagcttatagttctttagtcactcgcaacaaatttggatagtggtcatagtaataaccatctttgtagtacccatctatcacataatcatcgtcatctacctcctcctccctgacttcagggttctggtcatcatcaatgccatcatgcaaattttcagcatcttctcctcgtagcatttgcggtacctccttctattacattgcctagctggagaccgagggcgagagagtccgtctcctcgataacagtatccagaggagttttcttgactccattcttctaagtgaacaccatggttgaggttgtacgacaactagcaaactttctttagctctcaatgaaagacctaaaatattcaccgagatttttcgaaaactaaataaatagagctttcgaaataaataaaatagtaaatgatgaaaagatggtttttacgtggttcaagcgttaaatattcctagtccacaagtcagttgtattgaccttacaggctagtatttggaaaatacaatatgtgtttatagtataaaccctagctctgcactccttttgtttctcttgaagaagaagaaagcttgtaagaatttttatagaggttctgctagtataaaatattgttcaccctttgtacataaaaaatgaggatattgataagcttatatgtggctaatggcattccctttacacaccttgggtgttggaaatattttaccacga

SEQ ID NO: 123195 - DNA, 2012 bp, Cannabis sativa
ttttggtatatttattttacactacagtatatatttattttgtgatatgatatattaaggaataagtaataaagaacaaactcttgctactataatattagattaagattttggtatttttattttgcactatgatatatatttattctgtgattggatatattaagaaataagaaataaagaataaattcttgctactataatattagattaagattttggtatatttatatagctcggaggtttattttttcaatgagctatcgtatatacaaacaatttaattttattacatataaaaaaattactatgatttctttgttttaggaacaaacaactattgtggaggaacaaaaaatacttgagaatgttgaaatgaaggtataaaaaggaatatttaaattatttgtgtatattatgatttaagtttttggtatgtttattttacactatagtatatatttattctatgttaggatatattaaggaataggtaataaataataaaatcttgctactataatattagattaagattttggtatttttattttgcactatgtatatatttattctctgataatatattaagaaataggaataaagtataaacttttgctactaagtagattaagattttagtatatttttatagctcagaggtatatatttgcaatgaggtatggtatatacaaacaatttatttttattacatatcaaaattactataatggcattgtttgttaagaacaaacaacaattgtggaggaacaaaaatcacagaaaaatattaaaatgcaggtataaaaaagaacatttagatcacttttgtatattatgattccttcttggtatatttattttgcactatagtatatatttatcatgtgctaagatatattaacaaataaaaaattaaaaataaactcttaatataatattagattaagtttggagtatattcatattactctaagatatatcgtttctatgggatgtcgtatataccaacaatttaattttattaaatattaaaaattactacaattgatttgtttgttagattaagtttagatagtttgttaagaacaaacaataattgtagatgaacaaaaaacacaataaaatattaaaatacaggtataaaaataaatatttagatcaaaaagtatatgatgatttaagtttggtatatttatgttgcactatggtatatatttattgtgtgataaggtatagtaagaaataagtaaaaaaataatcaatggtggtatatcattttaaatttatggtatgtttattctgtgctaaggtatattattttttacaatggaaagttgatcgtatattaatttttcactatggtagatttgcattaagtttctcataaaataaagatttaacattatggtatatcatttttcagaatattcacatatcagttttacttttaggtatatgaggtttgttattcaactatgttcatatgtcaatatattactttgagagtgaggtatattgtttctatgtgaggtggtatattaagaacgaactaaattatattacagtatattgcttaaatagtgagctatattatttcttaagtgcggtggtatataaagaacggaagacaaagatgtttattgtaaattttgcatctttgacgatttaacagtgtggtatataattttttagaacaatgatatatttagttttgcatcacgtaaatgtggtatattgtttctaataatgtggtatattattgtttttatgtggtatattgtttctaataagggataattataccacatactgaaatttccaacttttttaattttatactgtggggcagaatttttttcaaaaatactgtgttttttttttaaaaatactgtgtaagctttatacggtgtatagtgttaagttttcattgttgttctactattgttttttagttgctccactattgtttttagttgttctattttattttgtgttccactgttgtttta

SEQ ID NO: 123196 - DNA, 1638 bp, Cannabis sativa
tgccacttcaagagccaaacaaacagtggtagcttcacctcgaagagcatcaaaaaagtccagtttcgccgaatgaacccaaaccaccttgctttaggagtctctagccccaacttcaatgcacatgtgcttccctccaactctaacatcgcaatttaacttgatccattcttgagggggaggacaccaaacagcggggcagagggtcggggaaggggagggggtaagggaatctttataatctgcataagaatgagaaacatagttaatacactgactcatattatccattctattattatgaaccttgtcattctacaccctccaaatcgtatcgataacaatggatgcataaaaaaagaccttgtcttcgtttacgcctttgctttttaggctccataaaaatttgacccaacccgcatacgaataccaataccagagattggggagatatcccacggggagaattgccaaagatggaaagccaggttacagtggaggaagaggtgctcaatggattcctcctcttccccacaaataggataggtgttgtcgacaatatgaaatcttttgaagcagacccccttgttaagagagcatttgaaagaacgctccaccacataactttgtagcatttagggatcctactgttccataatttgttccaaagtgagggggcaaccttacaatggggagatcgttgcagcgcttggattaagtaagctgacttactcgtgaaccgaccactaccctccttagtccaaacccaatgatcatgtccatggccagaaggttttccccctttcaagatggcagaaacggtttcatgatcaaagagacgttgcagcttttgggtgtcccagtcactagaagcagtcaaaagctcagaaaccacattgaaatcaggagatgggttatcagtcgactttgggtagaacacttgtccgtgattgacccaagggtcctcctaaattttagtgtcattgccattggtgattactttacaaacacccttcctaagaatatcattagcttttattacacttttccaaaaccacgaatctgtggctttgtctttgcacttgaggatatccatccccctgagatatttttccttcagaatgttataacaaagcaactgacatcttgttagaagcttttaaccccacttagccaagaaggcttgattcatttctttagttttcttgaatccaagatcgccctgagatttacggaggcataatttgtcccaagacttcaagtgtatctcatggttacctttttcaaaaccccaccacaaatcacgcgccaaaccatcaatcctagaaatcagacggttagaaagctttgtggtttgcatggcataaataggcattgccaatcccattgatttgatgagggtagcctggcctgccttaaataaagtctttgctttccagccttgaggcttaaaagtcaggttttccaagataaagttaaagtctgcatccttatgtctagaccggaatagaggaaggccaagctacttagttatgccttctggacccccgattctcaaggaatttttaatttccattttcaagttctcaaaggtattctttctaaagaagatagaggttttaagtttgttgacacgct

SEQ ID NO: 123197 - DNA, 2352 bp, Cannabis sativa
  modified_base (2274)..(2277): a, c, t, g, unknown or other
gtaaaataagtgagattcaatattgagttttaccaattaataatgatagtacacctcacaatgatgctaggcattataaatatcttttaacatttctcttaacaattagataaataactattttgatttttttttttttttgaataatgaaactttaaagaaaaaaaaaactcagagcaagcaaaaatcagttcaaataaatgagcataagagaggccgaatcctcaaaagaaacaaaaacagaaaacgactgacttaatacccattgagaaagcttatgagcaaacaagtttcaggagagaggaatccaaacgacatccatctcagatgaaaattaatcaagtacctccatagacttctaaaacaagcctgacatgtgtcgatcaggggccttctgagcttgaactccaattaggggccttccaaaataactattttgaattatgtgtacttagactgaatcttttattttgctaaatgataaattagattggaccttgtaatttttaaaagaaatattagtggcaaaactacttgaattatacgatttgtcacacttaatcccacaaactcatttttagggtaaaactacccaaacttcacttcagttatgctatttaccccttcggttagtaaattggcgtttataaatgtcaaggatgattgtctatgtgtacccaagtgtgcacatgtgatgttttaattgatccacctaatttttaatatttaaataaaattaaaataattaattttttaaaaaaataaataaaaagataaaaaaaaaatgacaacttcttttattttttaataattagcatttttgctctctaaatttttggtactatctaattttaccccctaaaatatacggcttgttaaaaattctccttaaaatatacagttacataattatgctcattctgctaggtttcgtttcttttaccgttaaaaattagtatttttatcctctaaactttgaccaatacaaattttaccctcttttattaaaaaaattaattttaaaaatataatattctatcttttttagagcaattataatattttattaattcaaaaaataaaaaaggaattttttttttctataaattagttttttataatctttaaatatttttcttatatttaaaattaaaattatgtagaccgctaaaattttatcacgtgtattcttgtgtacacgtaggaagtccattatgacacttaattgagggttttggacggaaattataaagagcaaaacagaatatgagtttaggtagttttgtctttaaaattttaatttttgtgagtaaataatattaaaaaacttttgccatcaatatcgttatataaactcttggtctcgagatacaatagttgctattgtatactatcaattatatatatatatagtaattaactataactatatatatgtattaaataaattataaataacaacaaaatcaaccttatgacaactataaataaactataaaataaacaaaatagaatatcaaatagtttattatttttactgaaaaatatatttttataaataaaaaacttaaattgtaaaaaaaaaaatcatatatatatattaacgtatttttataatttttcttaaaattttggtgtaatatggaaaaattttaaaacattccaagtaatccaattactatgaaatccataaatgaaagcttcatcattttattctctccccttaaaagacaagattcataggttaatatagtagccattttcgaatcctatttaatgaatgagcataaagctcatgctcacaacaaaacaaattcatatacactacacacgtgcatgcaaatcaaccaaagaaattaatagcaacttattattacattacgtacgtaaaataatccactcggttattatgacacaacacaaagctctctttatggaagctccttttgtcgcattgtattttttttccttgttagaatatttaggtaacaatcaatgatattaaacattaattctaattgattaatagtcaacattaatggtcaacatttagtgtatttttcctatagtttatcactcatatttattatatcaaattaccatcaaagttgggatagctatatatccttgtttgttcaaagtacacagttaatttcgtatagtcataccgactaatgttttttaagcaacattcttcgttttattttggctaattatgattcctgaacttttaagatcgttaaaaatatcctatgaactattgagattgttggnnnnaaggacttttgtctaattttaataaaaaaaaatctaatatggataaaagttcagagaaaatgatttattatatgt

SEQ ID NO: 123198 - DNA, 949 bp, Cannabis sativa
gaaatctgaatatacgtgtcctctaaataggagtcttgtctcgagtttctaggtgagagaaatctcactataacaattatgcctatcacaagtgtcaccattgtgaagcaagcggaacaagaaagtttgcgaagctacatccagcacttcaataccaaagttaccaaagtagggaaggtatcaaaagataaactcacgttcgccatagttggtggggtacgccctaggagtagattgtgggagaatacgctgaaagagagttggatggcttagacgacttttacaaaagagcggagaaatacattcgtgtggaggaaggaaatagagttttaagagaagacactagtgagcattctttaggaagctcgtcggatccttacaaggtctattagatgatactccaaatgctcataagctaacacattcaagtgaatcctccaacctacgacctgtaaaaatcaaacatctaagattctcatcaaaatgaagtatcaccatacaagagagcgttcctagaaatgataagttcacctttggtacattaaactaaattaagaaggcacttaggttggtctccaaacataacatatgtactcgaacaatcgcatatttgcctcatcaatgagatgttaagttttcactatggcattcattgctctccacacgtctcattacacttgtcacttgaaattgtcaaagtaaaaaaaactcttaagactacaaggatcaaccacccctaacagtccaagaaaaaagtaaaagccaaaagatagttccacaagaaagagcactcacaataatcagggggatgctcctcaaaattagtcctaaaatgtgcgcagggaaacaaacaaaaataaagaaaaaggtcgaatcggttcacagaaccatcatctcccttaatgtgacagttagtagtcccgtgatccgtaaggggaaacaccgggta

SEQ ID NO: 123199 - DNA, 778 bp, Cannabis sativa
  modified_base (733)..(740): a, c, t, g, unknown or other
tggtaaaataaattccaacagtcggctccctcgagagagcattggccctcaggaccgagaggattgaaatagcgtatcagtgcaccaggaacctggggagagagggagaaaaagccgcaagcatcatcctactgacttaagacaaaagcttatgacaagcatggagacttgagaaagcacctggagaaaaagaagcatacaatatcggtgtcggaggatgccctgaatgagggaacttagctgaattggcaatcctctgcaaagatatcgctagggtcacgtggagacagaagggagatgactcggagtttgactttaaggaacaagagccttgtgccaggaacatcctaggggtggaactccccaaatatttcaaaatgcccgaaatggcaatatacacaggggtcacgaacaccagttaccatctttctcaattcaatagggtcatgactgtcatgagaactagcattgatgcaaattttttatgtttcccactgacgctgggtggatttaccgaggaatggttcaagaagttagagtccagatctgtagactgttggaacaacctacaagtcagttttcggcaacaatttgtggcggcaacgaagattaaccttgaagtaagtgccttgtgttgggaatattttaccaagatctagatttaattccaagtatgttgattaacattctaaatatgagttctctaaaataatgaaaataaacacataagggnnnnnnnnaaccttacattgattgcagcggaagataatgactcctt

SEQ ID NO: 123200 - DNA, 919 bp, Cannabis sativa
  modified_base (49)..(49): a, c, t, g, unknown or other
  modified_base (653)..(664): a, c, t, g, unknown or other
ttacataaaaatattgcataaaatacaatttaatataatacaatacaanacaatacgacctaatacggcgttctaaacgagctctaaatgatttataatattgtaattattttttaaaactttactgaaatatgagaattttgttaaattttaagactaattgaatattaatgacatggtacttttaatgttggtttgtcattatcatgtcattgcaacatattttaattaaaaaattgatttaggatataaaaattatttttgttattaaaattaaaagtttagaaaaattaaacaatattttaatttaaaatactttaaaaaacaatattttaatttaaaaaaacaaaaaaaaaaaaaatataatcatcgatattacattaaggctaataataatctttttctcctaaactttgacatgtaccaaatcatgccccctgaatttttaaggtcgttaaaaatatctcttgaactattgagattgttggatttaaggaattttttccaattttagtaaaaaaatctaacatgaatgaaagttcagagagcatgatttagtgcatgtcaaagtttgagggacatgatttggtagttatcaaagtctggggagtatggtttagtagataaataatcactaaaatagtaaaattgannnnnnnnnnnnaaaagtccttaaatctaacaatgtcaatagttcaggtgtcatttttaacgactgtaaaaattcaaaaacataatttaatacatatcaaaattcaaaggacaaaaattctaattaaccttacattaaatcaaacaatgacctagctgcaatcgaaaagagtacatgtgaattccacttgtccggtctgcaatatggctccggaaactattgaacatgctcttttattttgttcaattgcagcagctgtgtgggatc

SEQ ID NO: 123201 - DNA, 1247 bp, Cannabis sativa
cagaaaaaaaaaagtaccatatttgagaatccaatcgaagaacatgtaacatcaatacaccaattttgctaaagtatctatccaatgaaatggtggcctgtgattgcaatatgatgtttatataagttcaaatttgagaaaatacaagtaatccatcaaaatgaatgattattacatattataatgaagattgaatgtacaatactggtatacttgataagtaaatgacctcaaaatcatttactttgtactacagcacctattataaaattatcatggtaatcatccacgagacattttactacaatgtattacttttttttttttttgagatacattttactataatgtattacttaaaagaatgtgaaaaccaaaaagacaatcagcaatccttaatctgcagcctataatttgaggattcaagcaagaatagaagcacagaaaggagaattctctgcaaagataaaatcatactcggcgagctaaaagattcttgcctctttactttctgcttatctcaactggttgcataccaacattccaatcaaagttacttgtgtattcttatgccctgtatatctctcaaccccatcttcactgctgtctttctaaatagagcaggtggtttttccagaccaattgattcagaaaatcttttagcaacctcaacaagtgtggttttatccctaccgacttccttgatcgagttatagtagccaagccaagcatgatatgctgcttctttgacgctaccatcgatcttggccatagaatcttccatctgtaagttgacaacagaatccagcataaaatattgaaattgtgcgaaaaaatccagaaagcaaagaagaaatggaagtgttctatagcaaaaattccatctgatagatattttaactgcaaaacaaggttacttatcatatggttgttagatattactgtggtttcacaagatttcaaattttgaacactgtttggttagtcatcatatggctccgaagaaccccaacaagaaaatgggagtttagaattaagtgtagaaaaatacactcttgaatgatattattttcactattggaaaagcccttaaataggctaagtataaaaaaaataatctagatattaattacatctcaactataaaccactaaataatccaataaatacgaattacttctattccctccctcaaggagatgcatacaagtcccacatgcccagcttgcatacttgttcatcaaagc

SEQ ID NO: 123202 - DNA, 1285 bp, Cannabis sativa
tatgtcattaggtttggggaattggcaacctgccaaagtattggtacaaggcaaaaataatacgtgatgtttttcatcgatatataataaaataaatatatttggcaaaaatgattcctcacattctgcaccgatagtaattttttaaaataatgcattatatagcaaatgacgataacagtactaatatactttttttttttttcgattaacttacaaaaaggaatattcacaaatcattccacaaatacatatatatataaagaggttaatatatataatatatatactcagatagttcttgtagtggtactttgggcacataatttactttatatcctcgtaattcaacaagtaaaaatatcctcctatggcctcaaattccacaattcaactttaaaacatagtaaaatattatcaaacaaaaaaaaaataatataaaaatagaagcacaaaaaagaaaaagagaaaaaattgcttgcgttgaaatattttatgttcacctgcctcttaaaagggccttttcggcagtttcgacctcttccaaaatcctagcctttcgcttagctggaattggggctgttgggccgaaactaatgtaatgtccagaaacagcattaagggccgaatacatgtccctaaacgagacccggcccaataaggatttctcccttctgtacttcgccacccaagaattcgacgtctctctcagctccgtcaccgccgccgccacattcggatctttcttgtccatactaatggtgtttctcaccttgctgataacctcttcagtctctttcacgtactcatcatccgaacccgccagagccggtctgatcgggaaaatcagcgccggaaatacacttccggcagccacgagtgataagaactcccgccggcggaatggaactgttgaacttccggcaccggtggtggaggacgcggtgatgggtaaagatttgggtttgaaagaagagaggggtttgggctgtgaggtgggagttacgagcgttggtgaggccattgtgtgtttttctttgggttggggagagtggaagagagagagagaagaagatcggcggaggagagagagtgtgtgagtttgtagaggaatggggggcatctgagtgtctgccacgtgttcttatcaccttatctggttttttaatcttatggatgagatggcaccaattagatcttagatatagatatgtaatttggtatagtgagttttatttaccttccatacaataataaatacactttattattacaaattaataaa

SEQ ID NO: 123203 - DNA, 2429 bp, Cannabis sativa
gttcattctggtgatcagagagttgagttgattaactttcccctcatcgtagatactcatttgcaccttgtagttttgcatgtggttgttctgctgaattgtataactcggctgtgcatgagtatattgcattgctggatcaatgggcccaagaagttgtggtggctcttccttctcttcttcaacacttggctccctttgtcgccttctcccttgctgttgcgtttcaggggtggctgcccataaggatgaggctccttgagcctgttaaccatgctgacatccatttttctttgcagtaccactttgttgtcatatttcaattcaggcacatcataggtcccgcaaagatcagtaatcactccagccaacccaaggccaccgcctatggctccgtgaataatttgctcaatgctaccccgaataacttgaccaacatcaatattgtaccccttcataatggcgtacacatatttcagtctatccatctgaacatcagaaaaatgcttgcttggtacaaaccgagcactcataaagtacaaccaggttttagccacaaggttaatttcacaccggtacagtaaattgggtgacccatcctgcccatcattatcatggaaccataacctcaggaatcccacagtcttggcaacatccaccatatcaaattgctcttcttcctcaataatccgcaggcgttgatcttctctgaagtagtcaggtaaggagtacatggcattgatggcatcagatgtggcggaaactttcttgccatgcaccttgacctctccgtttcttcgtttgggccaaatccccagcaattcacaagccatagtaacattggctcggtctttagcgttaacaaaggtaccccatttcattctctcaatttgacctcgaattgtttcaaatcgaggtttacatgtcaatggagcattagggaactcaatactccggtcttcaatatagggcttactctttagtcaaaggaagcattgttgggccgcctcgcttacaaactgggttctatcaaaagctgaaggtggtgggttggatgatgaacacccctcttcattaccccttgttcttttgggacccataatcaacacaaactaaaattcttcaccaacaaaaatttttagagaaaattgggcagcacctccccttatatttcttaattttctgaaattcaaatatcatcaaaataacacaaataaaaccaatggcaatccacaatccacaatactccaatcaatcacacaaaattcccaaatactcaattaattccaagaaatccctaaattctctaatcaatctcttaaaataagaaaagggatgatacttactaattgaagaagccactaattcacctccattgttgaatatcctttaaaagcttgaggttgaagatgatgaatagtgttttcaaatttgggtgagaattggtgattttaggtgccatttttgaagaaaaaggatgggtgattagagaaattgagtttttggatgcttttaatggaagattttgtggttgggtgtttgaatttggttaatgggtgttgagggttggtgttttcggctgggaagaaggatgggacggctgagaagaagtgattttagttaaagttaatgtgtttaaaatttgggattgataggcattttcgtaagctggtcgcgactaccataagggctggtcgcgattagattcgaaaagaaatttcctacctttctttaaaatccgtggtcgcgaccatgaaaaagggtcgcgacaatggatagggctggtcgcgaccactgtagtccaaatttttcaatgtttctgtaaaacccccaggttacgaccactgagtttcgagggccaaatttttttttttctatttttcacgtttttcacgattcaaccaaaaatataacgtctaaaactttgcaagaagttaaaatgctaaaaacaaataaatcataaactgaaataaaaaataagagtctaaaaaataaagataaacacttgggttgcctcccaagagcgctgtctttatcgtcatatagtcggacgctaagttattcgtcaaagaggtgctaatataacagcgaacttggcttggtcaatttgacccccccaagtagagcttcaattgttgtccattaactttaaaggtttctggactttcacctttcaattctacaactccatagggaaacgccttgaccaccgtgaacggtccagaccatcttgacttcaacttaccaagaaacaatttcaaccttgaattaaaaagtaaaacttgctacccaagttgaaactccttactgaataagctttagtcgtgccatttctctgttctctccttgtagatctttgcgttttcataggcctcatttctaaattcttccagctcattcaattgcagcagtcttttctctcctgcagc

SEQ ID NO: 123204 - DNA, 1223 bp, Cannabis sativa
aattcaaaacgcattccaaccgaaagctccccttattgcgattcaaacccccaaacttcggtgcaatttttaacgattcttcatcctctgcgttgttcttctttgatttctctcaacccatattacaattttttttttattcttcatcccctgcctatcttaaacatgttagtttgcctctagctaaacacgagaatatcacttgacataatgaattgggtcagctcgagagagcttcagatctctccacggttgattgattatatattttaaaacactgcaggtttgatagccgaaccctcactctcctttgattttatagtgaataattaggtttcgttattttgcgagtttgggtgattgtttgggattttgccaattcattgccttttttataaaagttatggggttctgctgcggaagctggaggttcgtgagtctacaaacttaatattgatatgattagtatgatggaacagtcagacctatttggcctttggcatttcaacttccttatagttaaaagtataattctattttgacaagtttgatcgtgcaccaatcccatttggctcataaaaacaagattgcagcttcaaaatcctcttcatcaaactcgaccatattcaaagatttacttcacatgttacattaacttgcttgtagtgtgcactcattcctctttcccagtaagtcattaagtttgggtttaaatattagtagtcaaattaagctcaatcttttttgttgcactaaaatatttctctttatatctaataaaatgattttcaattcatttattttaattgttaatttgccaaaccttctcggggaataatagtattgttgttgcagttattatgatgtctacttgtttttaagaatgaaatggctaaacattattgattgaattttgatttccttagaaatattatcagaaattttagtatttttctaccacagaaccattttttcttctaatgttttgtcttgagatgtttagttgtttagcaagcaatagaataatctttttttttttaacatgtctttgtgttgttggttagtcaggtttgaaaatttaaaaccttatgatcacgtggaatatgggctccagagctttagtgcttattttaagcataatgtaataatttggtccttacttcaggcatgagaactgttaggttatttttagtataaattttagattaagtttagtatatttt

SEQ ID NO: 123205 - DNA, 1133 bp, Cannabis sativa
ttattttcattccgtttattaataaagtttaatttccgtgcttaattttctagtaatcccaattaggggattagggtttcataagtttattgtgaagcgtgcctaattatttagggcgttacagttggggtggtaaacgagccttaaaccataagtcaatattattgaagctctttagctatggagtattttacacaagtagtttttgccaaatttctgtagagtttctagccaaagattgcaaccttttgcatggaggggtaaagccttatttataagctgaaactgaattttttgagtaaacccagacccgttagggttttatacatgaagtaagcccactgatggggtaaaatataatataatattgacttaaagtctggtaggtgagacccaattgagggataacaatcgtccatacaaaataatacagtctaatgtcgacaggtggccatgcgttgctaatcatgtatagtataagttagaggagtgggcgttggacaaaaatataggttactttttgtgttgtgcgcctttctcaagtctgatgtgggggacaaacccctaattcggtgggattctgtgtcagagacgtgccacatcagacaggcttccgaaggttgttcactgcgacacctcttaacccttttgggatacccatggtgtatctatatatgtagttttttttggacatttggtaatttggttgagttagctctctggatttgttgatctgttttagcccccaaccaagtcttaattgaatttggaacatccatcttttggcttcgttctttggctggaccatccatcttttggcttcattctttggccggaccaatatttttttgggccttgagaataggcctacaaattgatttggcaacaccaaatgacatgtgttgcttgtccgaaaattcagataacatttacccccaagcctttgcgctcgcaagtcatggaggcttgcacccactatccaaacttgtagtattatacgggacaataaacaaattaagccctttgaaatttaaaagtgaaagggcgtggagacccactgtaacgccctaattctaaggcacgctacagtgtttttttcaaatattgtgcaatctttgctaatcaaagaaatt

SEQ ID NO: 123206 - DNA, 503 bp, Cannabis sativa
  modified_base (43)..(72): a, c, t, g, unknown or other
tgtgtttatttcattgtttcagaattcatattaggatgttaannnnnnnnnnnnnnnnnnnnnnnnnnnnnntggtaaaatatttccaacactatatacttttgaatcaagccaaatccaagtgtctgcctccccaacgccctatagcacttttgattacaccaatctggccagtaccaacacagctacaactataccaccttagaaatctaatgctaatatgtgtgtcaaatgtaaaaatcttatggatgagcatgaattgtggcataatcgtttaaaacatccttctgaaaggattgtcaaaaatgtactctccaaatgtaatatttcaattgtgaataaaaatcccaatttagtttgccaatcttattgcttacgcaagtgttaacgtagatttttgtaaccaaatttgagcctcacgattatgattcaacacagaaataataaaaactataggaaaataaaatatgaacattgggtttttacctggttttgcagttaaa

SEQ ID NO: 123207 - DNA, 970 bp, Cannabis sativa
gctattttgattagtaatcccgatataggggattaaggtttcataaaaatatttaagtagcgtgcctaagtgtttagggcgttacaaatggcatgagcatcaatgtaccgagcaaacttaagaactgctctttgatcataaggccttgcagactggacaatcatatcctggaggttctcaatagcaacaataaccctagcagtgagttggagcttaccaggagtatgtcttcctatacatagcgagatagatgtctcgttatgcgttatctctgtcgtgtctttgagagtatgccttctgacacaaaatggtttctcatcaatacgtgaaccaatagtttgtacctccttgtctcaccaaagactgtgatgtctgcgagttataaatatactttattaattctacatttaaatgagttattcaattttgcattaaataatataatcgccattatatttgctggttcatattctctgagattgacacgtgtcaccttctgaagtatcagccgaatttcgggtataacacctaaacaacactattttggatattctgatgatgctatagaatctgaatttgatgaatccgaactgaatgaagaatcattggcataatcatacaagataatgcatggcaagtggttgaaggtttatttagagaacaagttgatgtcctagactatcaaaagttggactgagaaaataagaatcttgaatccaaatgcaaaaatttcgaaactgatcttaattttaaaaaataggaaaattctaggattttaaaagatcttgagagtctaaagaggaatgtgaaaatgctcaatccaagttctttaatttttgaggaggaccaaaattttagacagattagtcttgctgagttggggtttgttaaatcccaatcgtttatgaaaaattagtttgtcaaaactgaaagtgtgacagtcagtattccagtgatccgtaaggggaaa

SEQ ID NO: 123208 - DNA, 503 bp, Cannabis sativa
gagaattccaaggctgatttatctttcttcatacttgaaaactcaaagtttttcatcatgactcttatttatgttgatgacatagttgttacaggaaacagcccaagccaaaccaccactttcatttccaagctcaacaaaacattctccccaaaggatctggggccactacaatactttctgggcattgaagtatacagggacaatacatgcatatacttgtcccatagtaagtatacaacagaacttcttcaaagggttaaaatgaaaaacacaaaacccaatgttactccaatcacaacaagaaaggcattatccataacagatggcatacctatgagtgaaccaacatcctactgaagtgtaataggaaccttgcaatacctcggccataccagacctgacatttcatttgctctcaataaatttagctagtttctcaaacaacctactgatgtgcactagggagcagccaaaaggatacttaggtatctcaaagggac

SEQ ID NO: 123209 - DNA, 2077 bp, Cannabis sativa
gtaacagaatgctagtgcagatataacagactaaaacaccagacatgactagacattgaacagaacaaaaactgtcacaaaataatgacactaacaaatatataataactactaatttaatctttaaaaaaatgtgattaacataaattatattaaaacttataattttataaatattaacgtattcatctacaaaccaaatgttattttttatattgcttattgaaaaaaaaatattacacatccaaaaaatgtcaagcccatacaaacataagcttaatcctcataattgatattagaaaaatacataaagatgctctaattaataaattattcaatacactttttcttcattttggctattgtgcttactttccaagtgcctccctcttttgtatttctaaaagtatattaaaattccgcacaaagttatgaaaagctgacttaaaaaaaaatgaatataaagttaaaaaaatatagtaaaaattagaaaatagatttgaattacaaaatttccaatgtcattcattattgctaagcataataaattttatagaagtaacaatttcctataattctagtgcagatttaaactaaagaacgtacattataaaaagtaaactacagaatgatgataattaccttcatttaagtttgtagttgtaaaacaatcctgcaaaaatgtaattatatgtcttttagtataattagtaatatctatacacttatcaaacataactttttaccataatttgcagcctttgcgtcaatattgaaagagagagcactattaagacttccacattttacatctgcagattcaaagttcaaaccaatgcttggctcaaaagtgtttgagagagagaccaaagttccaatccaaaattaaccatatataatacaaaatttaacagaataaatatttaagtagcattttacatctataatattcaattcatcaagtaaaatttaataagaataccaaattattcgtgcaaaacacataattcaacaggggaaaaaataactaaaaagagtaaagagtaaaacaataaaaaaaaatccaatccaactacgcttaatagtacctttgagtatcatagtaagaggcttattttggaaaacaatccaaataacggattagactccatcaacactgaaataattaactccataatcctgcacaacacttgctactcctctattatatgatggtacttaagtttagtgcctacaacagaaaagtagtacttaagtttggtacctacaacagaaaagtaatgacgtaggcaattaattaaacatcagcagaaaatagttaatgcaaatgttgactagtgctagtagaagagttgttcaatgacttatttacgaaataaattaagcacaattagtacagtgttaatcatttatataggtatatttcgatcaaccaatataaactaaaagtctaaaataaaaaaaatctttagctagacaaaaatcatctcatgataggttgctcaaaatatactaggatagcacacctgacatcaccttaatgtaacatatagtagaattgtatttgttgttggtcttgcatatataatatatataacctaatctgaaatcaaaaagcattatgaaaggatgaatttagaatatttcaaaaggaaaggaccatcagaattatataattggacaagaagtcatacatataaagtaagcaattgaatacttaagaagagaaaattctgttaaaaacattgttgctaagaaaaacaaaatcattgtccctctttatctttggtattagaaacaagtaggatctgcataatgaaattaacaaaaaaaaaacattcagtttgattttaaccaatagaagaaactaaaataaggagcaaaaactcacaaacctcacctttgtgatagcattcttatttatattaaaatgtttgcttaataggggagtttattgggaaagggactttgttatcctcaaaagtgagtgttttaatatttatactcgcaagtgcacgaacatttcggaatatagtgttcatgtaagtgcaaggtcaaacctatgggagttgactaa

SEQ ID NO: 123210 - DNA, 2855 bp, Cannabis sativa
aaattcctatcattttgggtagaccatttttagccacatcaaatgcaatcatcaactgtcgtaatggtgttcttaaattatcatttagaaatatgactgttgagcttaatgtttttaatgttgctaataaatctgttgaatgtgatgatgtatatgaggtaaattttattgatcctatcacgcataatttcttgctgaacaaagataattcttttgaaaactgtgcaagtcattttggtatgaattttaaaagttcttttgatagtgtaattttttgttagagtctacaccattaataaacacggaagaatggaacaacaaagttgaatcaattgaaccttttctccagttagaaccacagtcactccctaaaccactaaagttagatataaaaggttttacccgaagatctaaaatatgcattcttaggagcgtcagaaactttccttgttatcattgcatctggtttagacaagaaacaagaaaagaaattggtacaagtccttaagaatcacaaagaagccatagggtggaccatggctgacatcaaaggaattagtctttcagtatgcatgcatcgaatccatttagaaaaaaaaatgcaaagccaacccgcgagtgttaaaaaaggctaaatccaaacatgaaagaggaagttagagatgagatacttaaatcattagacgtggctattatataccatattttttatagttcatgggtcagtttgatccatgttgttcctaagaagtctggaattactatagtcaagaatgcaaacaatgaattaattcccactaaaattcaaactggagggagtgcattgactacaaaaagtgaatagcctcaccaaaaaagaccatttcctgttatctttcactgaccaaatgcttgaaagattagttggtcacgaaagctactactttctcgatggttattcgggatacaaccaaatcctgattgcactcgaggatcaagaaaataccacttttacatgtccttataaaacttttccttatcgcgcatgtcttttggcttatgcaatgcacttgcgactggtatggttgaatatttttttgaaaatctttatggatgatttttcaatttatggatcttcttttggtgaatgtttacaccatttgtctcttgtcttgattcattgtaaagaaaagaatttagtgcttaattggaaaaaaaagtgttgttttatggtaaaacgtgggattgtcttaggacatgtaatttcatctaagggaatcgaagttgacaaagctaaagttgatcttatttcaaaacttccaccacctaagaatgtgaaagaaattagatcattcttaggccacgctagtttctaccgaagatttataaaatactttagcgaaattttacggcctctgtaccatttacttggaaaagatattgcatttattttcaatcatgattgtcatattgcttttgagaaattgaaaactatgttaactactgcacccattattcgacctcttgattggaaccttcattttgaaataatgtgtgatgcttctaattatgataaaggagttgttttagagcaaaggattgataaaataccagatgttatttcctactttagcaaaactctgaatgaagctcaattaaattattctacaactgagaaagaattccttgctgtagtctttgccttaaaaaagtttagatcttatctactaggatctaaaataattgtttattctcatcatgctactttaagatatctcttgtcaaagaaagatgcaaaatcacatttaattcatttgatacttcttttacaagagtttgatatggaaattcatgataaaaatgggtctaaaaatgttgttgttgatcacttatctaggctagttattgaaacagtaaagagcctacccctatcaccgaaactttttctgatgaacaattgatgtatatttcttctctgtcttggtatgttgacattgtacatactcttgttactggtgaaataccatctcattggtctaaacaagataaaaataaattttattccgaggtgaaatttttatctaggatgatccatacttgtttaaatagtatcctgatcagatagtacgtagatgtatcctgaattacgatcaaactaaaatcatatcttttttgtcatgatcatgcttgtcaaggccatttcagtagtaaaaagactgttgcagaaaatttataatgtggtttttattgacccataattttttgtgatacatatgcatactctaaagcctgtgaacgttatcaaaagttaggaagtctgtctagaagaaacatgatgtctttaaaccttattcttattattgatatatttaatgtttggggtattaattttatgtgatcttttcctaatttgtttggaaatttgtatactcttgttgaacttgattatgtttccaaatggatcgaagctgttgcatgtcacacaaacgaccacaaagtggtggttcgtttcttgaaataaaatattttttcccgttttggtacactacgtgctatcattagtgataaatacacatttttataataagcgatttgagcatctcatgaaaaattatggcattacacacaaagtcagtacactatatcatcctcaaactagtggtcaagttgaaatatccaatagagaaataaagcacatcctagaaaaaatggtaaacccaactaggaaagattggtccctgagactaactgatgctttatgggcatatcgcacaacatacaaaactcccattcaaaattaaaccgtggaatgcaaagaattagaattacaatacaatatgccatgaatgaagaaattgttggatattattttacca

SEQ ID NO: 123211 - DNA, 1008 bp, Cannabis sativa
tataactttcaaataacatagaaaaaaattagcataaaatttagtatacgtgcctcgcacgtagttttttgctagtatattatatgtgattcaatacaatattgattaatgtatataatatgacgttaaaagtttaataagatttttttttaatattgttgaaattttattaaattaatttttaattttttataatgtttgataataatgatagtataaatcgcttaaactgcattacacatttatactgcaccgtatttttgctgtctagtttttgcaattttaaggtcttgcattgcgattgtggtttgagaattgcaaaaactgcatatgcaaccctacgaacaaccctaaaatattagaggtgctaaaataccctattaactaaatcaagatcccatatttaaaagtggtgtctcatactgtgttaaaccaatcaaaatttaacacgtcaactaattttttatttcttaaaaaattaaacctttaattaagtcaataagagtagttagcatatttaatataaatttagttaatgtgtaaaactttgattagtttaacactgtatggaacactatcttttaacagtgaatcttaattcccattaactatatatatcaattagtaaaagtgactactgttatatttttcataaactaggttgataagacatgacatggtagataatagaattatattatataatattgtctcacataaattaaatgtaaaaatattaagctatgtagaagaatatgagttattccactcgttatctaattagttttgagatgaaatcatataattcttaacaatgggtgttcataaaatagtcgatccgattcaatccaatccacacatatttataacaaaaaccgcacttgagcggattggatgttgattgacatgtaaaagtaaccgattcaatccaatccacacatatttataacaaaattaaaaaattatagatacaaataacatttcaatataaagaaaatagtaatttaa

SEQ ID NO: 123212 - DNA, 1190 bp, Cannabis sativa
tgtaaagggttttatttagggcacaaaatccaacagaagcatgtctggtaccacgagatcggagggacaagacatcgtattctcaaaagacccttccagtttccttttttatttttgtgtccaaataaggaaattccagcttctagatcgtaacatagtatcatattaggattgatgggaaaacttcctatagtgaatattatgcaattaagtcatagattaattgtccacaattagtgcacacagtgttgaccaaatcaatcctaatctgatctgcctagtcaatagatcatcttcttcatgggctagactttatgagacaacctaagtgtattatttactgtaaactccccaatagaaggaaagtggaaagttaatgtaattctcaagctactataaatactacttgaatcctatggattaagagttgaactctatttcaaactttgctaaggtaaatttgagaacatatattttctgtattctcgaaagctttttcaagttaaaggaattactgaataatactgactcactcatggactaagactaattattaacactccaaccacgtaaaaatctcggtaaacaccttttgttctaaaatttggagaaaatctcaactttgtcaagttcaaataagatatacccaaaaagcttccctcttctctagcttttgcaatgaccaatctcacaccatcacaaccctaatttctaatatggcgttaatcgatctactcccataccaaattaaaaggaatttgatattttgatgagctattttgatagagtttaaagagtgcatcaactgaaactataaagtttcaacaaagagatttgtgaaattggtggaattggaaaaaacttcatattatacgagtttagtaagttcacacaacatggccaaggtggttgttggacttctttttatgggtaaaatatatttttttcttcaacaagttattgactattgatgtgtgtgtggtgcaatatacattgaactcatattataaacatataactttaaaatattgactctgccattgacaagcatataaataaacactatcacttttttatgaaaatacatatctatcaaatgcaaatacaactgtctaataaaattaaattatatatttacggtcagtattatatttaagcggttttttcatttttatacttcaaaacagttt

SEQ ID NO: 123213 - DNA, 1174 bp, Cannabis sativa
taaaagctgcccggtcagtctgttttctgcaaaatgaaaaataattccaagtttaaagaccgcttggccggtcatgatgccttaaaaaaggccttctggccagatagatatataaaaaaagaaagataaaaagagaagtgtttaaacagctggagtcccaggctctttgtacgggttttctgggccagtaggagctggaggatttgttgtctcagcaaggggcacactaacattctggccagaagtagaagtggtcgcctcgggttcaccataagccacctgagaagcgtagtactccagaaacatgtctttagaatgacccaagtaatcaaaatttgccttgggattagctttctagaagtcataaaaaatatcaagacccacagtctttaaggcatgtactttctcttccaaccttgtcacctctgctctctgctgttcagcctccgatttgtacttctcgaccttagctgtaagctcctcctccttagacttcttctctgcttccaaccgatggaagacagtccgaagaactcccctttcctcttgaagttcgttcacttctgctgacaaggtggcgatggtagcttcaagttggtcggaagcctcgaggtccttagtcaacttggttactttcttttcggtagtaaaaagcttctttttgacttcacccagttccattcggacagctctgagtttcaccctggcagcttcagcatcctttctggccaagtccacttccgccctcatggtgttggacaaggcagtgttcttggaggcaacagacttagctcgggaataggtgtaggcgatcttcagaccagtctacacaaaaaaaaaaacattagagtttgagccaagtaaaaacggattaaatgaaactctcaagaaaaactcacccttgtaaattcgttcagaactcctcccatcaatagctccagggaagattcgttgtcagccccggccagctgctcactcccctcaggaaccaacaggttcatgtagtgagtgagcatctccttgccctttttggcttttggaggcaatggtagaggtgggataagagcccgcatctaatcaaatccgctctaggccaactctgatccacccttcgactgttcaggcctgtccgagcttcctcctcgagaatctttggacttagcagctttcggag

SEQ ID NO: 123214 - DNA, 2530 bp, Cannabis sativa
  modified_base (158)..(161): a, c, t, g, unknown or other
ttaaaaacaatcaaatcatatgtttggtttgtgcaatttttactggaattactatctaagtaactaaatatagtataaactagtctaacacaatatttatttattcacataataagaaccagaatttgactcaaaattttcaaaaaggtaagaaattnnnngaacttaatgcaagaatatactcagtaccctcaactaaaatgagacaatgtcctcaatgtctaaatatgtatatgataagaacatgagatgagaactgaaaaaaatagagaatatgcagagtgatagatgttgatattctaaaaaaacaaatgacagaaaataaactaaaatactgaaaaataaagaaagcaattaaagataggaccagtagtgaaagaattcactaaccttggtaaatctggtcgtgaaggagtgttccctccacttcatgtggtgttaattctaaaaatagtttcaacctttatccattgactttgaatacattaccggatttagaattttcaatttcaacagctccgtgaggaaaaacagtacgaacagtaaatggaccagtccatttagaacataacttaccaagatcaaaaggaatgtccgaatcaagaggtcgaaataatgtttctggttcagggagtgagtgtgattctaattggagaagaagttcaactgattcaactttagttttccattcttgcgtgttcattaatggtgtagattctaataacgaatttacactatcaaaaaaacttttaaaattcttaccaaaattatttacataattttcaaaagatttttctttatccagcaaaaagttttgtgtaacagaatcaacaaatttttcctcatacacatcatcacttctcacaaatttattagcaacattaacaatattcaactcaacagtcatatttctaaatgataatttaagaacaccattacgacagttgatgattgcattagatgtggctaaaaatgatctacccaaaatgataggaatttgagaatttatgtcttcaacaaaatgagtatcaagaacaatgaaatcaataggaaaaattaaatttatctacttttatcaaaatatcttctatgatacctctaggaattttcacagatcgatcaactaactgaagtgtcatagatgttggtttcaattctcctagaccaagttgcttataaacagaataagacaacaagttcagactagctcctagatcaagaaaagctttgttaatcacatgatcaccaataatacacgaaattgtgggacaccccaaatctttatgtttaacaagacttttatattgaattatggagctgacttgttctgttaaaaatgcttttttggaacactggtgtttctttttgtagtacacagatctttcaaaaatttagagtacgcaggtatttgtttaatggcatctaagaaagggatatttatacttacttgcttgaatacctctaagatgtcaccataccgactatcgatcaatctttgtgggaatggagcttttggaatgaacgacaaagtttgacttgattcttcaaccgagtctttggaatatgaacttctaggctgactcttttcattttctttcaatgagtctttattcatttcggcattaggttgaggtatgtaatcattttttaataatttttccagaccaaaggatagaaattgatttagcttcttcagtaggtctagatgtacttacctcgtactgactctttggattgggaatgggttgatttggaagttttcccttttcccttttagctacagcagtagcaagctgacccatttgtgtttcaagccttaacatggattgttgggtggtttgtatgaactgttgtagggtatcctctaaagatggttttctttgttgttgaggatatggcatattaggttgggcatgactttgattgggcgtgttgtacaggtgcccttggttcattggaggttggttctatctccaataaatatttggatgatttctccaatttggattatagaattgagcaaatgggctatcaaatgaattcccataagtttgaagagcgttcgcatcttcagaaaatgcctcttggtatataggcaatgatggacatgactgggcagtatgacttgtactataacatagagaaataaattcattcatgtgtataggagtattcctagattgacttaataagatagcttcaactctcctagttagatttgctaacgatgtttttaaatccacgtcatctttgacatcggaaattgcatctctcttaggtgtgttggaagcttttgatctaggatcttggcaatttcactgttgagaatttacacaaagattatgaagagacccccaagcctcttccgctttaaattgcaaaaattttccagtgtgcattgattgttccatttgtcggtttgagggagatactccatcacaaaagtattttaccaatctccatttttcaaaaccatggtgtggatattttagcaataaatctttaaatctttcccaacattcataaaatt

SEQ ID NO: 123215 - DNA, 1148 bp, Cannabis sativa
tattttcgcaatatagttgtacggcgcatggaggaaacccgagagggattagggtaggtagtgttcttttgtgctggtttgggatttagcatataggaagtgtagtgtctaaatagtggtgttaactagatcatgtcatggagacgcattacaaaatgcctatacggttctttatctcctctcagctaagttctgtcttccaaccattcgaataatcatagattacttgtatgcttttgtgcgcctcgtgcatccttctaaatgtagaaaatgtcgagatattctccaacattgattcctgctcaagcattttgaagcgaaatagcatgtgcggtcttgatgcgcttattctgaaagcaatcacccttcaacaatggttgctagagccctatacaacattttgcaagccaattcttcctacttaatcatctcattattgctttctttttggggcaaaggaaaatgatatgtcagccaatttgggcatcttccaactttgttctctttgtaattccaccatggacaatagaatgagttattcctatttcaaagtaagagaaaattattaatgtccaaataagattatcctttcctttcaaatcttaatagattagactctctattcaagaatacacttgggattaagaaaattatattctactacaaaaaatcaaagcaccaaaaaatatcattataataacaataacaataaagcattcttaataatatattataataaaattatttttgaataagtgtaatatttatacatgtattaagttggaataaaattattaattgtacataaataaattaataaactatatgtatatattttattaagataaaattattcttatatggagatatatttttttaatacactaattagaaaatatataactaattagaggttaatcttatttacaatttgcttaaatttaaatttaatttttttattcttaaataaatgttctactaccatgaatttaatatagtggcttttttatttttatacttcaaaacagtttttttttcatttgtacggaattccacatagaaattttcatagcaactaacagagcaacctaaatcgtaactaaaattcacataattagataaattaccggagcaacccaaactgtaaa

SEQ ID NO: 123216 - DNA, 797 bp, Cannabis sativa
atataaaggcttgtaattcagctccaccataatacaaccgattattttttccatctttactctgttttctctgttacaaagcttaaagcttctcatacctttaacccgttttccaataatcatagttttcatggtatattttaattagatgtattaacttataaaaaaaaaaaaactaattaaaaagtttaaacaaaatacgaaagtaatttactaaaaaacaatgaaaaaaagatactaatgtctttttatttttcttgttataatggaaaagttcaacatgatagataaaaataagacttgtttgggaaaaaaaataaaaaatttacataaatatagaattaaatttaatgtcattaaatatatcatttcttaaccaaacaaactatatatatgagtatataaataaaaaaaataccataaaattcatcaaaaaaaaaaaagcagaattaatttttcaaacaactttctttctcatgcgataatttgcttctctgtcctgcgatctctgtctctatctctctccatctccctttctaatctacacttggtaataatatttaatttaattctaatttcttaatctatatcaattgatctttactgttacttgtctaattttgatatgctctcaattctcataaagatagttttttttatatgtactacaacttttactctttctattatcattagctcccaagctttagtgacaactttgtagtcacaacataaattttaaaacatagtatttatatacaagttgttaataatttaattttagtcacaataagtat

SEQ ID NO: 123217 - DNA, 2099 bp, Cannabis sativa
ggaaagcacttgcaaccaaaggtcttgaatgttgaataatcaggttttgtattaaacaaaacttccagaggtgacttgtgcttaagtaagggtgttgggagcctattatggatatacacagcggttctaaaggcttcatcccaaaatttgagaaggagagaggcttgtgcaagaagtgttaagccattttcaacaatatgtctatgctttctctcagctagaccattttgttgatgagttgtaggacaaggatgtctatggtgcacaccattttcagctagatagttggtaaaacttctaaattccccaccccaatctgtttgtaaggtttttatggacttcccaagttgaagttcggcttcagatttaaaatgcagaaatgtcttaaaggcatctgatttttgtttcaaaagatagagccaagtaaacctagagtaaacatcaacaaagtgaatatagtatttatagccattgaatgaattcacataggatggaccccaaagatcagacacaacaagttcaaggggttctgaaataacagtagttgatgattttgggaaagggaatttatgaatcttgtcaaggcaacaagctgaacatacagaaaaaggagagattttattacttattggcagattacaagattgtaggacaccttgtacaattctctcagaaggatgtcctaatctattatgccacaaggtaaaatcattttgaacactagtattgcactttatacaacttgagacactaacagtagtgttatttagagaaactgtataggtgctctttattgtggaatgacagcttgtgttggtagtgtttggggagagattgtttggatctttgaggctttgaccaggaactaagcttggtgaaacaggtcctacatgtgagacatcaaaagtatataggccattcttgtgcatccccatcaacaaagtagtatgagtcatctcctccttgacaaaacacatattagcatgaaattcaaaatacacattgttctctttagcaaattttgacacactaataaggttctttgtaatttcaggaacatgaaggagattattaagcactagaggatgagatgaatgctttggaaaaatgtaagattgaccaatatgttttatagataaacctgtcccattgccaacatgcatttgatcttgtccagaataatcatagcaggaagctaaattctgagcttgtggagtacagtgattggtagcaccagaatctgggtaccaattgctgtcattagctccttcagttgtggtgagattaacttgaggttgttgaggcacctgtgactgagttccattattcccaccttgaacagatcctgtgaaagccttatcaaaccgatagaaacaatcaagtgcagtatgcccaaatcgaagacaaagttggcactgaactctattgttcacagctataccagaccttcctcctctagcaccattaaaattgcctctgcctccaaaattcgaactaaaattctgagaaaattcattacctcgactcatacctctatagccaaactgacctgtaccaaactgagtattgcctctgcccaggaattgttgctgttgtctgaatcttttaaaggcaatattagcttccagcaacggatcttgctccttcatggtgagattggcactcgactccacgtctttcccagatttctcaattcttgattcggatgccagtaatagagcctcgatttcaccaacagtatagttttcaattcgtgtgttcgaagaaataacaaaagtgtcgtattcgctcggcaaacctttgaaaattgctgcaatgtggtcacgatcacttatgacttctcctacagatgcaagaaaatcaacagcttgtttaactttcagtagataatcattgaggctcaaacttcctttctttagattttgcagcttcgtacgaaattcaagaatcttggaagaaacttgtaatgtgaagtgtttctccaaggattcccaaatttgttgagctgtattacagccgaccatacgagttaaaagactttcagtcatggaggatagaagccaggagacgagtaattgatcttgaacttcccaatcgcc

SEQ ID NO: 123218 - DNA, 637 bp, Cannabis sativa
aaaaaaaaaaaaaaaatcaagtaattagactcatctccacacctctatcatgaaacttagaatccttcatttgcccaaaccctcttcataactcgagatagatatattccatgccaaaaataaaaagaagcagtgaaattgaatcttcatgtctcacacctctttatgctttgaaaaaccatgcatttctcttataagtataagagagaaacaagttctaatacaattcataataagctttacaaatgtacttggaaatcgaaaagcctcggcaagcatttcttcaagaaacttccattctattgtgtcataagtttttcgtaggtcgagtttaataataacttagtttacaatttttccagctataatgtctaataatgtctaccttaatgttattttgccagcttattattattattattataaacgaatttggccatcttattaaaatagtaatattcatgtatataataagctagcactatatgatgaacataaatatttatataaactaatcttcattaatgtctgtaaatgcgcaaggatattttaaatttgggataattgcggcaaaagtccccaaaaacttgagtttgatgccgattagtcctcaacctcaaaaattggcggtgaaaat

SEQ ID NO: 123219 - DNA, 3361 bp, Cannabis sativa
  modified_base (3294)..(3294): a, c, t, g, unknown or other
gtaaaataatttccaacaaaacccacctagaaatgacacgtggatgggtcggctacagatcaactgtttggtgcagggattgcccttgtcacacctggggggtaacacctacacggggcgatcaaatttgggttcaaagcttccaataatgaagaagagtatgaagcccccattgtcgatctaaaacttgctcgggagctacatgctgaacacattgagatctgtagtgactcacaattggtagtaaatcatgtgtttggagagtacgagacccgtggggaaaatgatagcctatttgagaaaaatacatgatctacttgcgcaattcaagagctacattcttaagtaaattccaagagaaaaaaatacaattgttgatgccttagcccgacttgcgagcagcagcatagttgataaggctaatctaatcccaattcaattccttgaagaacccagcatcacctgtgcgaaagaaattgaaatgattgacacagctccgaattggatgaaaccaatagcagcctacctcaatactggggaacttccaaatgatagaaatgaagctcggaagttgaggagaaaggctgcacggtatatcatcgtagaaggagtcatgtatagaaggggattctctatgccaatacttagatgtgttacacaagaagaagctgcacgaattttgtctgaagtatgtgatggattctgcggcaaccacgcagctgggcaaagcctgtcaaataaaatactaaagcaaggatatttttggccaaccatgattgaagattcaaaggcctatgttaagaaatgtgataaatgccaaagattttcaaagataccccgtgcaccacccaatgaactaacttagatgcagagtccttaaccttttgctattttgggaattggtctaatcggataattgcctaaaagtaaagggggagtacagtatgtagtggttgtagttaattatttcactaaatggacagaaaccgagccattggcaacaattacatctaagaaggtgctagacttcgttgtgaaaaatatagtatgtcagttcggactcccatacaagatagtctcggacaatggcacatagtttggcatccaattattcatcgatttctgtgcaaaccatggaatcatgaaaagtttctctgcagtggcacaccctcaagcaaatggtcaagtcaaagcagtcaataagacacttaaagatactttgaaaaacgacttgaagaagcaaaggggaactggctagaggaactaccagaagtactgtggtcgtaccacacaactgaaaaaatagcaactggataaactccatttgctatggcctatggttatgaagctatgctacccgtagaattagaacctccgtcctacagaagattgacctatgatcaagaggctaaccatgccctcctagcagattcatttgacgaaatcgaagaaaaacgagctgcaacaaacctaaagttaatggcccattaacaaaaggtagctcggtactttaacaagcaagtgaagacacaaaaaatttttgtgggagatatggtcctcaagagagtatttttgaacacaaaggacagcacaggtggtgtgctcaaaccaaactgggaagggccatatcagacagttgaagttctagaatcgggagcatacaaactggggcagtatcatgaaaatatgaaactagttctagtaccaaggtactagaatggggaacattcaagaaaatactaccagtaaaagtaccaagtcggatgaccactctaagtacaaattaaaagaacatttactcttaagtaaatggccttctatgcgaaccccacccaaaggttcggatgaaaggactaagccctcaagtcagatgaccatctctaaaagaaaaatttcttttaaatgcaatttgttttgtttaaatttagttaaagatcagattagatcaatataatagattttatgtaagttactgcggtaacaaaaatgcttcgaccaatgaatgaataaagatgtctatttaaatttagattgtgtcaattctattagcaagttataaattgaccattaaatgcgtacataggtcttctcaaatccaaagaaccgaatagacaaaaaccatacttgtgaaatgcaagtgaccaagagtcaaaagtctgctcagtcacttgggggccaactatacccgtacaaagcattggtaaaagtaaataacaagctaaaaaaaaacatagttgcacagataattatcaaaacaagggatgatattcatagaaaaagataacaaagcacggtaaatccaggattaaaagctacccggtcagccagttgtcttaaatatgaaaaatataatccaagtttaaaaaccgcttagtcagtcattttatctcaaaacaggcctatgggccgaatagacatacataaaaaagagaaaaatattcaaacaacaggagtccaggctcttggtacggattgccttggtctgagggggccggaggttcaacactctgagcagcagggatttcgttgctctggtcggctggagcagtggaggtagttgcctcgaggttttctacggccgtttgagccacgcagaaatcaagatacacgctcttggattcaccaaggtaatcaaagtttccttcaggataggccttccaaaattcatagaaaacctcaagagcagctgtcgtcaggctttccacctccttctcgagctcttcctccctagtctgcttattcttgacttcctctcccagtttggaaagaagagtacgaatactctctctctcatctttaagatcattgacctccttggacaaagaggcattatcgacctctaactgcttggtcgaaggcatctcttacagttctttggtcagctcctcaatcttggtgttagcagaaagaagccttttgttcacctccccaagctcattcctcacttccctgagctcgctcctcacatcctaagtttccttcctggccacatccacctccctctgcagtgtgttggtggtggcaaggttcttggcagtagctgatttggctcgggaataagcataagccatcttcagattgacctgtacggaaaaatgttagagtccaagctacataaaagggaatgagataaaaaggatatatctactcgagtagcttccttcaaaactcctcctaggaccagctccaaagatagcttgctgttcgccccggatagtcgatcactcacctgaggaagtgatcgattcaaataatactaaagaatattgttaggctttgtgccctaaataaaantctatttcaatgtaatctttttctattcaattatcaataaaaaaaaattaatttcattacttgttta

SEQ ID NO: 123220 - DNA, 1592 bp, Cannabis sativa
aaaaagataaggcgagagaggatctccctgtctgagacccctagaaggcttaatggatgggctaacaataccatttattagaaaagagaaggtagtagtagaaatacatttcataacaagagacacaaacttaggagggaaattaaagtggaacataacactttgcaagtagtgccactccacacggtcaaaagctttagccatatccagcttaagagcagcccagccaactttgccatgtttacgagaattgatagcatgcacaatctcttgagcaataaggatattatcaaaaatgactcgaccagagacaaacgcactttgaaaaggagaaatgattttatccaacaccactttcaatctattagccaacactttagaaatcactttatataaggttgtacaaagacttattggacgaaaatctttcaaagagtgggcatgctgttttttgggaattaaggtaataagagtggaattaacatgatgaaaatcagcaccctcattgaggcaagaaagaacagcctggactaattcaggccccaaagtggaccaatttttctggtaaaaataagcattcagcccatcgactcccggagctttatcaccagaaagactaaaaagagccttcctaacctcaacatcagaaaaaggtgcatccagataagcataatcaacatcttctaaaggagggccaagacaatccaaaatctgacaggtagcatcagcatcacacctctcagtacagaacagatcacgaaaataagaaattaccatactactaattccatcatgatcagaaacaacgcaattagaatcatccttaaggaatttaatagcattattctttttccgttgagaggcaaaacgatggaaaaacctagtgtttttgtcacctgctttaagccaatgagtacgggccctttgtctccaataaatttcttctttataaagaagagcatctaactgtgattgaagacactgaatacggaaatgctcatcccgattataagtggaaataccctgagctctggaaatttcattctgaagatcagaaatacgagactttaaagataagtgagctactttgttccaagatttgagagcagcaatgcaaagatcttgtttggaaagaaagtcttgaaaaagactagaattattctgattaacattactgttgacccacgaagttttgataatagaaaaaaattcagggttttcaagccaaacattctcaaaaaagaaacgcctgcttcttcgacaagaagagctaagattttgatcatcaagaaaaagctttaaaacccgatgatcagacccataaaaggaaaggtgatgtaaagcagcatttggaaaaagattgcaccaagaatccgaaacaacagcccaatcaagcctttcacaaacagattgattacgccaagtaaatttgttacccacacaagaaagaggaaaaagattaaacttagataaaaaattggaaaaatcatccatgtccttgtgattatagtaattgctaccaatcttatcattataagataaaaaactgttaaagtctcccatgattaaccaaggcaaattaggagcagaat

SEQ ID NO: 123221 - DNA, 1498 bp, Cannabis sativa
tctctctctctctctctccaaacaaaaggaacaccatcccctcagccaactgcttcgtcaccctcgtcatcgtgcgttcgagatcgcaaggcagccaatgtcacacttccaccccccttgtctaggttgggaccggactcttataattaataaaaaaaatcatgaatagtattgtattttttaaaatatatgttttgtttgcttcaaatctgtatgcttttaatagtttttgtgtaattttctatctatgaactaagtatatttagtttttctgcatctttctgctatatttctaaatgtaataacatatttcgatagcttcacgatagtttttcgatagaacatgatggtttttcaacatttttcttacaaatattttttatgatttttggatagcttttctatagaagataactttgaagttggcttttaactaattcaggttatttataggattttgtgttcacgcaatttttcgatagtttttgcaattattatcgagaaactaacaattgtaaaaataattaaaaagaaattgttacatatcgtcgtcctttggtttgtcttctggcgaggacggacaaatattggtggttcttagcctttaaggctctcgttcgattagtcttcaacggcgaggacacggaagaaccatagggcgtttatgcttttgaaggtttgaggcttcttggatttcaatgcaagagaaatgggccagaagaagaggtggcacttgaagaacttagggctttggtggggggcttccgacggtggagacaatgacaggaatgggacttagggcttcagagggttttctcttcaaatctaaagagatagaaagagatatagagatgtctttttaattgaaagggattgaatgtgtatgttaaaataaactaagaataaattggtatcaaattattttaggaagtattttttagggttgttccaaaaaatttacaaaccgcccaatccgaataaactgctcaaacaaaatcgaataaactgacaaaaaatacaactcgaataattttataaaaaattcaaaccactcaatgaatatattaagtgggttaaatattattttaacctgtccaaataatccgaatgaactgatttacttatatttttactaaattatctataatataatatataaattacgtttaatagttaaactattttacatttaaagtttgtattttatagtgtgtaatttaaaatttagaatttagaattaatagtgttgattgtatttgaatattgaagttgaaatttagaatttacatatgagtatattttttttattctattttttaaaaaatattgtttaatactttaatgtttattcaatttaattttattttttttaacattaatttaaactataaccctttgaatcttgaaagttgtatactatacatttattttctcaaatcaattatttaaacatctaaaactaaaaataatgaaaaaaaaaatagggcttttttcataa

SEQ ID NO: 123222 - DNA, 1625 bp, Cannabis sativa
acaaagagtgaaaactaaccgaaatatgacccgaaacttagactaattttagcctaacaggtgtagatactaatgagaagctcaacattctccagggtcttaagctgttagagggatctttcccctcaaatatttgggagtttcgttaaggccaaccaagtggaaggttgaagactgtgaagtaatcatcaagaagataagataaagattgtatagtcggtcaactaggaatccctcctttgttggaagagtctaatttatccattatgggcttctcgggttctacaattattggatgagcatttttgttcttccccaaagcattaccaaagaggttaagaaactttgcaaaaggttttttggggtctttctggaaacaggaacaaaactcatgtaacctcttgggagaaatttcgtcttttgaaggcttatggaggtcttgggtttaaagatgatgctaagtggaatcaagccattcttgcgaagtatgtttgggctattacagcaaaaaaagatattcttttggtgaaatggattaataacatttatctgaagaacatcttttactggtcttatgagttgaaacaagacataagctggtattggcacatgctctgcagattaagtattcagagactgatattttgtctgcagtttgtacaggtaaattcaaagcaaacaggctttataatagttcacttcatcagcaacaagtgtattacgatagagctatgtagaactctttggcattgcataactattaatttgttttatgacaggctatgaaccatcaactcctaacaagagttaacttgttaagattccaagttgagatggccacggttaattgccctgtatgtgattctggaattgaaacacatgagcacccattttttaaatgttctttgtctaggctggtgattaagcaagtcttcgaatggatgggcataaaagcttggtccttgggcttcttaggctggttcaattcgctagctttgacttccttgagtttagtgtagccacctgttattgtatttgggtcaatagaaataattgtattttttagggcttttctaatatagtgtctcatatagttaaagaggtcaaaagtgtaatgacttatagattataaattgttaaacataggaatatttctaaaagagaaatggtatacttgaatagaattcttttgtattaaggagccggtttttatttagagcttcttttggttgtaattgtttgtcttttaataaagtttctttttttttgaggaaaatacttgttattattaaacaaacaaagattcgtttacaataacagagtaaataggtgaagggataacctccaaccaagagcaagtctcatccacccctaaagcaaacttagcaagaccatgagccgtttcatttgcagaacgtttaacatgtgaaacatgtacattagggaaaaaaaggataaaatactaataacatcaactattaaatctgaaaaaagaggaatttgaagggagctgtcaatgcatttgtcaccatgagtgcatctatctcaacttgtataattggtagttgttgttgaatagcccaattaagattgtggaagagtgctttggcttccatttcatggga

SEQ ID NO: 123223 - DNA, 2783 bp, Cannabis sativa
aattttaaaaactgaaaacaaaagtgtgttctgtaaagttcatttttatttttatttttttattttatttaagtcgagtctaggcctggaatcaaattcaaatctggatcaggggccaggttcagtgccaggaccgggaccgagtttggatccggtctgggtctagccgtagtccaaaatattgattaaaaaaactgtttaaaaaacattaaaagtgatatttttttagtttttaaaattttgattatcaataaaaaattgaaaaataaaaacaattttatagaacatgattttaaataataattttacttttctaagtttaaaaacaaaaaactaattaaaaaagtgttaccaaacaccaccatagtttttttaattttttaaaatatattttatgggtattatgattattatattttttaagaaaaaaattaataaaaaatatgttaaaacaatataaagtaatgggttactcttaattgttttttcctatatatatataatttttaattttttcttgaattttttttttcataaaataacttttttttctaaaaagaaaatccacattttcacaaagattctataaaaatacatcaaatttgtaatttttatagtattgatgcaaaatactggccaacacttgctcctttgattggtgatatatatgaaataaaagttaagtaaaacaaatatagagacaaaagagatttatagtagttcaattgtgtcgcaatgataatggagttacgtctaatttgagttgttattgcgcactaaaatacaagaaaattagctcaagtcagagctctatatttccacagagagatgctctaacattatgtggggcttttctaaatatgaaaagtgaactaaagaattataggcaaggaggtcctatgaaaatacaagtaaaatattacaaaaatatggaaaaatattttgcggctgatcttgaccattcagtatgatctaatagtgaaaatgacttcggatgatgatcctaaaattttggagctcaaatctcatcttgtaatgatcgcatgatagaatattgattagtaaagacaattagcactaattattaatatttttataattatttatgattttattatgttgtgggtcccattttcagaaatgggcattagagttatagtttctcaattctgaaaattttattaaactctaggagtattatttatattaaatatgaattatgcaatttttatgatttttactcggcgacgacaaaaaatgggatgggatggccgttagagtcacatggataagtttagaacttatttcttagcgggacaaacatttgagatttttagaatgtcgggtttaagtggggttatgatttttgaccattttacccttaggcttactttagtttagcttattagattaaagggcttttttcgtacttcctatttgatgaatatgtggctttctctaagggggaaagttggccatcttatttttgtttagctaagttattgaattaatggattaatcttttagaaagaaattaagaaaatcaaaggaaaaacaagaattcatctctccttccctccttcttcgaaccaagctagaacctagggtttggctgctaggttcttcatttcagcaggattcaggagcattttctaagtggaaaatccagtggtagcgtgaggtaaaccctaaacattctaatttcaagatttctcgagttgtaagtttgatcttagtatgtatttttaagagtttgtggctgttagggttacatgtgtttgtgagtctgtttctaagaacaatttaggttagaattgagttcttgatgctagttttgatgtgttttgttgtgaataaacaagtttgagtttgaaacttcaaacttggatcattaatggcatatttggattttgtggatgtttcctgctcttattatttggaaaacattatttgaggttggtacaaatgttttggaaggtttggcatggtttggacacgaattggataagtttcgaatttgtttaagttacctggtgcaaaccgatcaactggttttacaagacctgtaaaaccggttaatcaaatcaggggcaggtttcccgagttgtgctgattcgttgatttgtgttatttttagagtcttagttggttatttttctgataattagggtaatgttataataattaccgatagcagaacccttaatagtgagtttggatttcccaaattaaggttttggcatgttatttacccatttatgtaaatgtgacttagggcatccatctagcacaaagacttcctttcaaatcggacaactcacttgaattcgaaaatgaggtatgattagcataaattatgcatatgtatgtgtgtatgtatgtaaatgcatgttgtttatattattgtacactaccaacactggaatagttgtaatattgagtgtgttggtacaatgtataatgtttaaggaaatattacggtattaccaacacgagtacaagtgagtatggagtgcatgtggtacaatacccagtaacacccggaagtacaatttagccctaccaacactagtatgtgttgtgatatttttaacacgcaagtatacgtgttgtttacaagtaatagactcacaaagagtgaggtcgattccacaaggattgtatttaagtactttaaaattaaatctttacttgtatttggttatgtcaaaatcaagagaaaattaaatttataaacactaaataaacagtgaaattaagaagcaaataaatcaaaaaaaaaa

SEQ ID NO: 123224 - DNA, 1156 bp, Cannabis sativa
acccttccttaatggtatccctatcaacctcaataaggttaactatctccgtagctataaacctagccaaatcataagatttgcacataaaggggataccatacacttgaatccaaaagacatagcgaaggttatcagaagtgattggaaaagaactgtcaggggcagcaaagatagtgacactctgagcaaaatgccaaggttgaccttctaagactctacccttatctccctcacaaccaaaagtaaccaaaaacaagccatcaccatgttcagatacagacacagggaaacgacactgcgatgaccagatactagagagggtgttcataagggatggaggattataaggtcgaatggtgtgaagtaaatataagtaaataggaattataaggggaagaattagaagaaccagcaacataagtaaatatagtgttctcgtcaggaggaagaactaaagcattggagacattattcaaaaactcatccataggtgtagatatagaaacacttaaaacaataggaaagagagtaaaaaacaaaaggaacaagtgaggagaacaatgcctaagctttgttatatagaggaagaatcaaaacccacgcagaactcgtctcgaaacctccctattcgcatccctagtctcatacatggtagctacaatgatggagtcgagctgaatggtttcgggaacccaatcgttcgcctccattttacaatctccaagagcatatatctaggttaatatttggaagatttgtagtaaatggggaggagaccaaaaggaaggatgaagaaaatcgaaaagcaggagaaaatggaggatcgagtatttaatgctctggctaaaattttgcgatgggaaagaaggcaataataaatttgagagcaataaatgcttaatgtaaagaaaaaagaagaaaaaaaagttaaaaatgaataagacaaaccaccaataaactaataagggtggacgaattcctccataaaatggaccaagatctcacaagggaaaacgatgattcgcatatcttctggaaggctcgagagagaaaagcttcaatttttttaaagactaatttagatatgattcattcaacattaaggtggcgtttggttggaagtaatgaaatggaatggaatggaaaggaaata

SEQ ID NO: 123225 - DNA, 860 bp, Cannabis sativa
tctcttttttggagaatgttattatgttgtataaatcgttttttgagcaatacacatacttgattcataaaaaaaaaaaaaaatacaaatcataaatttattcataagtaattttttgaaggttgtgtactcatttggccctcgtaattttatctaatacaggtttgttgatactttgtatttttaataatacttatttggtacgctaaaatttaattatacaacttaaatatagtgtaattaaattatattatattataaataaattgatgatttagtgcaagtagggatggacatcgggtgagttttactaggttttgaatttttggattcagatgtatataattaataactcgaacctgccggtttgtgtgaccgggtttttgagttttttgtgcaggtgggtcgggttcgggtttaaccgggcccgggtgggttttgactaagttcgagctggggtggtttttttttttgaaaaatattattttttatacattttccattaaaaaaaagagagaaaatgaaaagaaagaaaataaaagaaaaatgataaattaatgtttagaattaggttttttttttagttattgtttttagaaatgtataaaaaaaattaatatatatacacgggttacgagtgggtttgggtgtaacccaattttttttttaaatttcagattaatgaaatccgaacgcggcctgatggttaaccgggtgtaacccgaactcgacctctattttttaaaacttgttttttttagtttgctgggtttagggtccaaatgttcatccctaagtgcaagagtatagagaatttttttccaaaattatatttaaaaaataaagggtttttttttttt

SEQ ID NO: 123226 - DNA, 1159 bp, Cannabis sativa
cccatatctctcaaaattagggttaaaaaccctttttagtgctaaaaaacgttagctagttgtgacattgcttagtgaatgtcatggcacgtgtccttgatagagcgcaaatctaggtcttttgaagtgtagcgggccgcgaattgcccagtgaatgttgcggcccgggtggccaagtatgggcagggaattctcttcacaccaatgcctcgacattgacttcccaatgtcgaggcccgcctaaattctttgattttcatccattctgtccattttttccactagagcgccctgacattcaatttccatgctacggtgctactccaacatcgtcaaatcttcaaatttaaaggcctctatttcaccgaatcttctaaatttttccatgaactgttccttcggcacaatagcgataaaacttaaaccgaatcttcatttttttcactattttttcttcaacttgttcatttttctctttatttctaaacctgaaaatattaataaactaaatcgtaaaatagaacaaaatgaaactaaaactaattaaaaacactctgaaaacgaacctataaataacaaaatctaaaacgtaacagacctcaacacaggctcttagggcctggttgacaagttaaaagatgcattacttgactggtgttttgtgaattctaaggttgatatctccctttttgtctacactaataactcaaatatcatttatcttcttgtttatgtaaataatattttagttacagggaacaacataagcctcctcaacaagctgattaatgacttaaatgggaagttttctctaaaatgacttggttctctccactattttcttgggatagaagcctaccgaaattctataggttttcttctatcccaaaccaagtatatcaaagacttgctcaatcgtgttcatatggagggtgcaaagggttgagataccttaaggaaaccataacttatgggatttgtgtagaaagtcaaagaatatggtattgcaagcttttactgatgcagattgggctagcttccctgattacaggaagtcaatgagtgcttattgtgtttttcttggtccatgcttagtgtaacgccctaatgctaaagaacgctacagtgctttttcaattatagtgcaatctttgctaat

SEQ ID NO: 123227 - DNA, 1141 bp, Cannabis sativa
  modified_base (993)..(1030): a, c, t, g, unknown or other
  modified_base (1080)..(1085): a, c, t, g, unknown or other
ggtggtgggtggtgagttttggtgaccgattctttgacctcaacttttctggttcaaagtttacatagacaattttgttttagagtggcccctcttgctaatggaaattggagagttttagtagagcagattagggctgggtaggttagtagggtcgcccctaaggtgagacaaaggaggtggccgccttaggtgccccaccgctcaggggccccatttcaaaaaaaaaaaattaaaatatagttggcaataaagtaaataataatactcttaatattaaatatgtgttgtaggctagtggttattttattagcttaacaactaagaggttcaaagttcaaatcctaacaacctcacttttttactgggccctaatttttatttttgcttaaggcccaaattaatatagggatggccatgtaggttgggctgggagtgaacgagaagaagaagaaagaaagaaaaaaaattaaaaaaattaaaaaaaatgcagttaattaattagttttgcaaattaattaattattcatttattttaaattaaaattatgatttggatcaataaaaaatcaacacgtgtcatttttgggagctacaaacagagcaattaaatcaggtacatacggactaacgagaatcttgagctttaggctattactataatttttaaagattagaaatttattggcatcaaagtgaactttttgaggacttatactgtaatttaatatcaacacgtgatatttgtggagcaactaataggtctcctaaaatgaagactaatgaacttgcaagaatttcgagcttggggactattattgctatttttcaaggttaaggacttattcggatcaaagttacctttttgaaattttacttcaattttaatacacaaagaatttatttattacataaaaaggagtgaaaaattacattaaataattcaaaaaaaaaaaacatgtcatatacatagggaaatttacatggtatacnnnnnnnnnnnnnnnnnnnnnnnnnnnnnnnnnnnnnngtattttttacttttttactatgtaattttttataagtttcatactgcannnnnntgtgttaagttttcactgttgttctactggtgttttttagttgttttactgttgtt

SEQ ID NO: 123228 - DNA, 639 bp, Cannabis sativa
  modified_base (597)..(613): a, c, t, g, unknown or other
cattagagaagctctaaatggatcaatggaacagattaagatgcaaagtacgggcttgcttcattcccctcctcctcatctatttatttattattattatataatattgtaatttagtttaggtgttaaatttgtatttttttttattttaaataattatatatatatatgttcagtcgaatcctaattaatggttattaacaattcctcttagccctcaccctaatagagtattagaagtgagaagcctaactaaatggggaatgaaggtgtattagacaaggtgttgattgtattcgaaagagtattgtaattaaacactaataatttttagaactacttttggttaataatattatataacagttatatgcatataaaatacttctcattttttgtcatcataactaaaaaatatcataataccccctatgtcatcattataacaagtctacaacttaaagtattagtcgcaataaattttatcactaacaataatttgtgactaaattaagtgtaacgttcccgctttaagtttttattgggtccagaccaagtcaaacacgcttaactgtggagttctttcatgatgggctnnnnnnnnnnnnnnnnnaccttgttgatataggtagtaccaat

SEQ ID NO: 123229 - DNA, 1293 bp, Cannabis sativa
aaatcattccctcctttttccttcactattgagtcctatatataataacaatatccctattacaattacacttatgccctttttatttaatatcctaatgcctatcaaattctaattttggcaacttaaatttttcgaaatttttcagattttgtagaggtccctgttactatattgtacactatcatgaaagtttgtttacagcttatctatgtattggaaatattaaaagtatctataaatagtgattaaaaacaatgaataagataccctgctatgtaggtgctgtttattgacttgattgtttatcaccaattttattattacaaaagtcattgagtctctttgtgaaggtcttttgtggcttctaattatgtgttaccaatgttttctttagcggctctaggtagaaaaaaaaattgcagtgtctgtctttagagattacatgttgacaagatcataatcctatacaaaagtctaaacccgatgcttatagcataacaaagaaaatttgtgaaaagatttacacttaatatgtaatagcaataagctgctaacaactgagaatactctcctcatcatcttctctcaactgtttgcatagcctgaaattttgtgacttctcttattttaatttgttgatttggttggtttattcagagaaaggttatgtcatcgtatgacgtcaacgcaaaatcgatgggaattgctaagcagaactataatctgccagtttgaactacctaggtgtttacaacttgctgactagtatgtccaacttctcatctttttctctggtctcgtctttgccctccttttgaactttcgatccttaataccaagttaccattgatgctatagcttgttttggtatgataggtaggatcatggctctaaaatgtaaatggtgctagcacagcaggccatatatgaaacctttagtttagagatgaatgcaaccacaacatggggaaagcattgaaagtgatgctaaatggaagtgagcacgcccatgattagttttggtgagttttgtaatcatcttagtgtctggtggccaaaacaaaaaggggtaatgaaatcttattgttattctgtttaaggccttctttaaccagagaagtatgtatatcgtgtaatattagttttgccttgaaaaagaaaaaaaagcccttatttttgtcaattttccagggcttgtaccccctaaagccatgtaattacaagcatttaaataataagctttcatccttataaaagtttgatgtttattcagccaaaaaagtttgatgt

SEQ ID NO: 123230 - DNA, 1054 bp, Cannabis sativa
atatattataaaaaaaaattgaaatttttttttagttatatataaaaatgtataagaaaatgattataagtttttttgaacatattttgtaattaaataaaataatgtatacaaaattgtaaaataccctataaattattattagtggcatagcttaccgattttgtcccgccgctaataaaaaaaataatattttatttttattttttaattattattagcggaaagatcctgccgctaatacttttgaattcaagaagcgagaattttgctgcccatttattaatggtaggatattagcagcgggtaatagtgctctgctgctaatacttttaaaattaaaaaaataatacatagtattatcggtggaatttggattctgccgcaaatattactgcttatattattgatagattttgcttgctgctattgcgaatattttatttttattttttttaattattattaatggaatggtctcgccgctaatacttttgaacctaagaggcgagaatttgccgcccatttattagcaatgggatattagcggtgggcaatagtactatgccgcctatgttagtgatagatttcgtctgctgttattgagaaatcttattgtagtgtatgttgtttttttttttttgagtttttttttagtgtagcgtaatggtattttataatcagttaatagtttaatagcttcaaggtccaaaattcgaactcatgtcctctccatttttcctatccctccctcaccactaagctaaccttagtgggttaagttgtagtgtatattgacaactatatatagtgattgtctaagtcagcaagttttattttttcctaaattataaaaataaaaaattatcattaaatagacacatgcagatcgatcgaatcgtatatatatattgatgtaataatatatttctcaatcacgtaacttctaaagttttattttttttgaaagaaaacgtttataaatagaaattagacctcacggtcgttacacagaatattgttcgggatagacgattcactcaacctaccaaac

SEQ ID NO: 123231 - DNA, 1576 bp, Cannabis sativa
gaccatatcattggtcaaggtactatagagaaacaggctggaggaaactacctgggaatttgagttcgatatgagggctcaatatccagagttattcatattagattttgagaacaaaatccttttaacaggggaaaattataatgaacgtacagttaaatcattgagattagcaaataattaaggatttaattattaatatataattatgtgctatttagtaaaaaatagggcttattatcagaaataggccatttgaaaataatttctcaatttaggagatttatttgaattctaagtgtattaattacgttatatataaaatttcatattttttatatttttatgtccggtaataatggaatacgatatttggcctatagagtcacttaaatatggttatgtacctcggttttagaggagcactacagttagacatctggaatgtcgagattattcaagattatggctttggtccattttagcctaaagtgttgagaataattcatggtaaagtaaggacaaatgtgtcatttacccttaaccttagaaatagttattagtgtgatctagctttctctagataagttttggctgaatagttaatagtattaagtaataaattaagtgattattatcaaagttaaataagagagcagttagaaatctccttcttcttcctttgtccagccaagctaagggcaacaaaccagagattttattttcaatttagaccataaattagaggcttttcatcctacaatttaaggaattggtttagccatatcaagctaacattcttctcattatattcaaagtaaaaattaggttttcatgcaatatttttttggttttagcttctgtgcaagttaggggtgtttaggtttattttttgcagttatttaaggttattgaagttgtttggagtgatttttgttgcctgtagtaaggtttaagcttgagttaagtttttaatctcaagcttggacctttaatgataatttttgatttacaagcttgatgatgatttttccacttagaatatgttgtgtatggctcaattaggtggtgtatagcatttgaagagatttgggatagaattctaagagaaataagtttttttttttatctttatgtaggaaaaaacggcaagccgtttttccaaaaccggtctatcatttttagcagttagagacataaaaaatctcgtgccgttttgaggaaaagacctaccttttttgtggtatttttctcaagaatctcattttcagtgttttcttgatctttaatgtatttccatgctatttatcgatagaaaaacttttagttttgagtctatgtctcctaaaagtgatttagcgtatcaattatcagttttacgtatgttgtgacttaggggcctgtaaaccattacacaataattttcactcaagttgagggcacacctaaattcgaaatcaacataagattagtataataatatcatatattattacatgtttagcatgcatgtttatgaatgcctattagataacatattagtaacaacagtattagtgtacatagaattacattg

SEQ ID NO: 123232 - DNA, 3554 bp, Cannabis sativa
  modified_base (108)..(121): a, c, t, g, unknown or other
  modified_base (1671)..(1674): a, c, t, g, unknown or other
aaaaaaagaattttttttcttaataaaagaaatttgtgtttaataaaagaaaatacaaaagaaaaaattttatgtttaaaaaaaaaaaattcttaataaaaaaaattnnnnnnnnnnnnnnaaaaaaaaaaaaaccaccaaaataaagatcaaattcaaaattataaaataattaataaaattaatatgtattctatctttattttttaattaattaaattttttaaaatatttaaactaagcactaatttttttttaaagtttacatttatactttgactaaaagaatttatatttatacttttcctgcttaacgttttttcttttttactatttcttactcattaaaccttaaaaaaaaaaaaaaaaatcctcttttttatgctatttttagtcagcaaagtttttcttctttccttctttgttttctctctatttctttctttcttttttttttttcttcgactctatctctcgctcaaactattttttttatatctttgcatatatacaaatataaatatataaaataattgtacaattttatatctcgtttcttaaacacttttctactctaccacgaattttattttatttctttttaaaaaaatacaaataattattctattttttttttatctttttcattttttactatcctcattctaactatttcaaactatttatctttaattaatcacattttgtacaaaaattgtaattaatttcttttaacttttactaaaataggattcttttactttcatcttttttctcatatttttttaatactcattctctctcttacaaaaaaattaacagcactcctcctatatttttctatcttttacatgattaataaaagtattgtattttttagatattttgtagtttattcataattgatttatgaatgatttgcttattttaacaagattgatatcttgttattttatgttgatttatggctatctttttgtaattttatagttatttatgtgttgttgtttaggtattctatggttgttttatagttttttccatttaatttttatgtttttttttttttttgtacagttgttgtttactttatgtacatttttaatcgtctatattttcagtttattctagacaatatttttgttgtatatatgtgcatttattttgctatttttatgtttttttaaaatatttttaagtggtttccataatttatttttcgttgaacaattattttttaattgttttttttattcatctttatttttcatggtgtatatttttagtttatttctgataattttttttgttgtatgtatgttgctttgtagtgtagatgtagatacatatatatttagtttattttttgacacatttttttagaaagacaatgataagattttttatttttttaattgacatgatgtacagtagtaaatattgatataataaatatatattacccattatattatatacccaattttaaaaatataagattttattatttctattatttatgtaacgatttatttaactcttaaaaaataaactatcattttaactataactaacccaaaacggaagagagaaaaaaaaagctaaaaggatgaagttgtaacaacaaatttcatgaaaaatataatgtaatagtacaaaaagataaatcannnngtcaaaactaagtaaaaaaaattcacaatacaaaaataaattgaggagttgatattgttttacttattgcaattaggttaattaatattttttttatttttctgttgctttgtaattgtcttttagttgttttattattggttttatgttgtttgttaagttgttctaggatttttttttagctatcttagttgtgtttttttattttactaaaacacagtatttttgtaattttaaaactttaacacagtatttttgtaaacttggtagagtaaaaatgtataaatctccatgtcccagtatttttgtaaaattttcccattttacaatattttcgtaagttttctaaatttattcttaagtatttgtaaaaactttaaagacaatgacacatgttgtcacgacctaagccgtaggtcgtgacagatatgtaatattcatatttggatggtcaaaagtaacacttttactcttgtaggaaaacaacacttataaatgatcttttaatttatattacaaaatacatgtttaaaattacttgaataattcctataattataaagagatattagtaaccaaaccaggatcactcatcaatataaagaacaataatatcaccacagttaggtagtcaccaaacacatagatttaataaatcataataatatttagcgtccatcattcttcatccctaactagaacatagctaattaagtcattcacactatccacttgttatcgcagatattcgttaatgattatgagcctattttcgtaatagacttgacatagaaattataagaaatttgagaagactaatagaatcaaaaatgacacaatatttttacgtagttttgcagttaattctacatagtccacgagtctatcttattcagatatttgtggatacaaaattagggttttacaattagtatcttttttctctcaaaggttttccgtcccgtctttttgtataatctgcccctatttatagtaatataggtaggtagttaattacatttaaatttgactcccataacaatatttctgatattgtgggctttaaatacgctccatttaaatatgtgtaaattatattacatagctatgatttaaactatctttaaggcagtcaacgctgacaggtatagaaacttccttccaaaggtacctcgccggaggtatctcaccttgtacatagatggatgacttggtttattcttatatatttaagcaatggcatgagcaccagtgtactgagcaaatttaagagctgctctttgaccataaggccttgtagactggacaatcatgtccttcaggttattatacttagatgttataatatgggttagatgctaagtgttccaataaccaatttgtctcgtcgatacttctttacatacaacgaggtagatgcctcgatatgcgttgtttatagctctctcggtattataccttccgaggcaagatggtttctcgtcaatacatgaattgatagtttgtatatccatatctcgcttaatacaatttagtcagcgagttacgtacatactctatttattctatatttaatgagttattctattttctatttaatgatataattatcattatatttgttgattcatattccctaagattgacatgtatcaccttctaaagtacagctcaatttcgggtataacaattaccccttaaaaagtcattttcaacgaaaagtgctttttaaatgattaccgtgggtatttccatcataatccaatttgaaaatatatatgccttcgaatttggcggttttatagtttcgaggcacatcattagcattaatgagccatcctttccacttctctcctgttaacgcagattttcgttaacaa

SEQ ID NO: 123233 - DNA, 604 bp, Cannabis sativa
agacaaaactgatactgatctcaggaaatgctaattgaaaaccctaaaaagagctaattcccctaatttttccggcgaaagtaagacactttgttggaatacgaaaaagaaaaattgcaaacgcaatagtaagcatttgaaaaattgagaaaacaatagcagtttgtgaaattgaaaccgaaataatattgtatacaaaagcacagagcaagtcctttaaaattgatatttaccaccggagcagtggagaagtgcgccgtggaaatcagattgggattcgaatttgcttttggaaaatgtgtgtttttgaattcataaaagtgttttcaaaaatcaatcggccgataagccgattttccttccttcaaaggcagagagaagagttttgagttttgagttttgaagggtgaaggagaagactgtaattaccacttagaatagttttatttgaatagtaggtaatttggtagataggactatagtaaataagctaattaagatttttttccttaaattttaatatgtattaaattatgttctttaaaatttttttgccgttaaaaattctcctaaactattaagattattagatttaatggttgtt

SEQ ID NO: 123234 - DNA, 2146 bp, Cannabis sativa
tccaaaatgatatttaccttataaaattgatcgaatttgaaaatatatatattggtagtcagtttggtaggttaaactggccaactcatcagacgagttactttttttcatctttatttgttcaagttgcacttatatttttgtaaccatttgactttaacaaaatgtggtatataaaaacccatcgacatacacccaaagtaaaaattattacaaatatcatcctatagctacattctcctcaagtatttaaacaatttgatgatgaagcatgtgaagttatacatatagatgccacataggaaatatgttcgaattatgaaagtttccttcctagactgttatagaaacatgctcagactgcttagggatcctaggatgcttcttcttcttggtgttgccacatatttcaagatagtcttgaggagaatcattgtctcttaagacccgaacctgaattcagaatcatcgtgagaagtagacttagaccttcataaagcttatataaatagaaaattatcaaaatatcctcactcttttactgacatatacttaaacttagcgataaaatggtcatttctctaataactcacataatcactcctagttatttataaaaataattagtacctctaaaatactaaactatactactataatatttttaccaaactgtcgagtttatactgtttccgatcataaacataataaatatgtatcatatacattcgacacacataatttcatgaaatctctataattaagtaacaatatcatattttcttaatttctaataatgtctttatttctaaaagcatatattatttcataatttactataatattaattaattattaatttttttatgtttaattatgtggtcattacatctttatttatgggttttcttcttcatggggatcctcatatcatgaataagtgaaaacatagaacattgtattttaatacttttatttaatgtatatatatatatattgttgacctcatatttagcgaacgacgtggagttaataaaataataatataagtgttttaataattaaaataataatgaagaactacaatcgacacataattttataaaaattttgtaatatcctaaaaatgagatattgattagcaatcttaattaatttagttaagtaataatgagggattatattattatataatccaatacataacattataggctagtattatggttgattgtacttatagtatggattgatgttactacatcagtgtgatcagagtgttgagtataaactgatattatggtcaatattactatatagtcaagaacgttcaagatgactcacttatatgctttagatgcgggtagtagactcatgataattaggtgtatgggtgcctaattacaaagtcagatatatatttatacttttcttactgagtttgtcaactcacagatatatttttatgtataggtaaagagaagactaaagcttaatcacatggtgagttttgagctctcagtgaagattgcacatatccagatggttagaactggagtgttcagatcttcgggacaacatgatctcaattttgttagtcacttggcgatacttttgttatgctatatattgattatgtttaaaaaataaattttgggatcctgaattttgtaaacaatttttatcttacgatgtatgtttagtaaattttttaattatcatgaaagttcttatgaaacatgattttatatcaaaccctttcattagtaaaagttagctcagcaattaagaaaatattgtagcgtgttagacagcataaagaactaaaatttattgttggtagttatctcgtgtttgtcttattgcccaaaatccaagccatggtcgaaccctatacgaatggcccatgaatttaatttttgccactttgtttcagtttagcttaaatgacataaattgtatttcttctaattttattatttatcatctaattatttaaatattaatttttatttaataattataaatatttaccgaataaacgtacatgacatatttattaattaaaaacttggaactaatcaaccatataaatcagtttaaaacaagagttcagattcatagctgaagggatttcaactcaatc

SEQ ID NO: 123235 - DNA, 1440 bp, Cannabis sativa
gtgttctatgttatatacaaatagatcttgggttaattgttaatttatataacacttacatgtctactctatttttccttttttatcatattgtataggtgataatatcgtatcgtgtcaaaaaaaaaaatgatgtcacctgtctggtttaggtggtggtgaaacaaagagctatgtgttgatggtatattttttgagtggtcgtatgtgtatggagagggtaggaattaagtagatcatagtactagtagtaataattgtgtcattttgcagccttaaaaattcaaaaagttgcactaataaaagcgccggaaagaggaagatctcacttccaaaaataataaaatgtctgccaacattgtcgaatgaattaataatatatggtcatacaacaaacaaagctgcctaaagtagtctaccaaaatacaaaaagaagaaaacgattataattttacatctatctacctaatatctatcccactaatctatctacactgtacccaccagctacaaaaataccattagtctaaaatatattattaacactacttttattatctactaatcacatcaaaagtagacaattttctttgtcaattcagctcataaaataaagaacgaatcactaggtaattacttgaactaaaagaactcaaaactatattgaaaaaagagaaagggcttcttgtaatatataagtagctacctttaatgcacaaagaatattcggttcatcaattcaataaaaatgttgccagacatgataataaaggtaattaactacaaaagaaaaaatggaaatgttaagggtcgaatatgatatatagtaatttagtagttgctaaatggatcttgtcagttatcaccacataatataataatgacaacactaaatcatcttcttctcttaaaagaagcaaaatcacattttcacaactgaaaaacttaattcaaattttcgttacggttttattttttagataaaaaaaaaaacaacacatttttgtctcattcatctaataatagtggggaatttacataaaattttgtgtaaaactttatatatatgctatgataaatgattttctttacataaaaattgtgtaaagtaattttttttttttactgtttttttattcaattcctactggagtttttaatttttttgtctttaattctcatttttctctctttatttctttaatggacaatctttcattttttaagggatttttacaccgtatactgaaatttttaactttttcactggagtgaattttttttttcaaaaatattgtaatttttgtgtactgtgttaaatttttacggttgttttttagttaatccattgttgttttaattgttctgttttgttgttttgcgattgttttttttaaaaaaaaaacagtatttttgtaaaaaaattccgtgtgacagtaa

SEQ ID NO: 123236 - DNA, 1644 bp, Cannabis sativa
cgattgttatcgcatagagctgcatcatagaaaagtcggtcatcaattgatgacgatcgtggtagaagaaaacgagaagaaagacgaagatcttgaccctcaagttcaagacgagaaaaatctattgaaaccaatcgaggaattataagaggttgtgatttgttgctccagagtttgggtaccacttggtgtcatcagtttgggatgtctggacaacattagcttgagctgtaagggaattagaacttggaaacacccctgtgaaacctttatcgaacctgtaaaagcaataattaacagtatgtctgagtttgtggcaaagttgacattgaatttgattagatggtgtggataacctgccaggtctgttaaaaccagaaacaccatgaccattagtgctagtaggagataatccatagttactacctataaaaaccccacgattggtgaacccacggccacctccacgaggtgtggataagggggaaggaatttaattgtagttagggagcttgttgtttcgatgtggatattcttgtaagcaatgttggcttcagtggcttgatcagaatcgactatggtaagattggcactgagatgagaatcttgatctggatatgtcttctctattcgagattcagagggaagcaaaagagcttcaatttttacaatagaatattcttctattcgagtgttagaagagatgatgaatgtgtcatactcactaggtaatcccttaaagatggtagcaatgtaatctctggcacttagaacttctccaacccatgcaagaagatcaacatgctacttaacttttagaaggtaatcattcaaagacattgatcattttcgaagcttctgcaacttagttcaaaactccaagatcttggaagacacctgcaaggttaagtgtttttcaagagcattccaaatctgtcgtgatgtatgacatcctaccatgcgtgtgagaagactttcagtcatcgatgatagaaaccaagacaccatgagttgatcttggacctcccaatccagaaactctagattgaatgtgttcgaatcttgatcagcatcacttaagaactgaggtggtggagctcgatcttgaattatttgatcagtctatttccacgaattgtaataagaatctattatttccacaaaataaagttatgatcattccatctaattgacatgtgatgtcgcccaattagttacactgcggtcgcggtagtaagcaggctatgtcgtatccacagggaggtaaattactactaaaaattagtataaatagaatatggtagaaattgaaacgaatgaaaaataaaatgatgagagaaagagagtgatcagacaaagagcttgggcttggtaaggtagaaatgtaattatgcaaatcctattctaataccgatattagttcagaacgcagttgccattctacaccattaattacaaccggaagatatatatatatattaaaagcacaaattaattaatcttgcataaattgaaaatcactcctaacttaagagcatatcatattatatatcataaatcgacaaaataccaccattgacaaaatgcagtaaacgacatacaatataataaatacactaaaaaaattaatagtctaacttacat

SEQ ID NO: 123237 - DNA, 1192 bp, Cannabis sativa
  modified_base (1135)..(1150): a, c, t, g, unknown or other
gcatttgaacatttttcttgaaatgttcaagttccttctaataaattcatttcttcatctaacaaacaacagtcttatattttttttaatttttaattttttttaaacaaataacctgtattcgcttttcatacataaccttgtaagactcaaccaaagattcttcacagatttcaatttcatcaaaatcagaatcttcttttttaataacataccaatctctcctcacttgtgaatcataaaacaaactcgaagaaatagatgttagtgcaatattattagaaatttcttcattactatcgatttcatcatcactccatgttacattgaagcttttcttactcctttttagagtatttgcacattcagattgaatatgtccaaaaccttcacactctctgcattgaattccctttttattgttagttactgaaggtttaaacgaagtattttcttttgaaatttttggagaattcttttcgtaacttatctttttttatgtatttttgaaagattctagttaaaacatccattttatcatcttcttcattatttgaacattcttttttaagcaacattaaaagtaatacttttacctctatcaatagtggacttgagtttgtctttttggttgctatttttgatttagttcaaaggtacgcaaggaacccattaactcctccaccttcatcttactaaaatcttttccttctttcgtatttacgagtttagtgcctaacctgtttgcaagaactcctacaatatttctgatatgaacatattcatcaagcttttcaccaaaagtaaatattcattatctacattaaacaatttttcatgaaattcagatatggtttcatttcaagacattctatgtaacaccctaactaatataggtgtgttagcatgatttttaacgtactgtgcagctcattgctaatcaacgaggtgattaaaaatcgtgattaatttaaatttgcttatttgaataaaactataaagtaatacatttataaaatcctaggatcctgtttacaaaatacaattacaaaagtttactattcatatacaaaagatttagcacctagtgactaaacaacaaaagccctgatgtctcaaagatcgtacgctccannnnnnnnnnnnnnnncatgtacaatcttcacccgctcgtactcacggctcctcagct

SEQ ID NO: 123238 - DNA, 1528 bp, Cannabis sativa
  modified_base (1483)..(1493): a, c, t, g, unknown or other
caccatatataattattaatatacttagctagctatattgcttggctgcatatatacattaattaaatttcctacgtgaatatatatatcttttaaattctatatatgatcatatgatgaagcaacaataatgattgtgttaattatatgcttataatcatggtgagttattttcctaattattaattaattccataaattgcttaaataaatatatttacttaaccataaatatatagtttggggttggtgctgaaattgttgtgttacaattcacttgtagtttatatatagaaatgcatgaagtgagtaattgatcataaactttacacataataattcatgaccaatgaatgaccatgcatgaagtgagtttgtggtggtggtggccatggaaatggggaatgggaacagccagccagccagccagagctaccatagtattagtattagtacacactcacacgtgtgtgttgtgttgtggtgtgatattgattgatttgattgcatgcatgtgggcctaaagccacacgtgcatggttcatatattggactttcaaataataataataataataataataacatcaggcccaacttactgctccaacttccttttcataatattaattgattttgattatatatggtactccactccagcccatcttcactctctttgtctctcaattgtcccaaaattcaactttctcattaaaattttctactcttcttcttcttccttcttccacacgtacgtagtacctacgtgtattttcctattttattttattaatttttatcacttaaaaagaaaaggtgattgaaaatgaaggaaagcaacttcatggtggtgttgttctgtggggcccatcatgagtaatgggccatgaagcccaatatgataagacagacagagacagacagacaggagaggatagtaaggatttagtttgttccagcgatgaacacggcattcaattcattctttactacaattaattaatatgttcaatcataatagactatacagactatatatatatagtcaaacatacgttttactggtcaaatatacacaaactaaacatgaaggaaagtcacacacatgtacatatacatatatgtatgtatgtagtgtagaatatatagatacgtacattacatattcttttatataggaataaatacttgcatatatgttaaataataaatatggagtctgccccatattctaccttttttaataagttgtatctgcctttaatttcatcaaattgcacaatacatctataattaaaatagtaaatatattagcaattcctcctaacaacagcagtaataattttttatggcaagcgctgctgctgcttcgggtgtgcttccaacttatttacaactccaaaagcgtcatatttatgttaatgttgactgccctttgtacaactctagtactgaaactattcaacatgcgttggtggannnnnnnnnnncaaaggctgcttggcatcgcagcatagtgaacgtc

SEQ ID NO: 123239 - DNA, 666 bp, Cannabis sativa
ttttctcatctcttgctgttaagaccacattgactccattcaaggccaattgtctcactatctctagtccaatccccttatttgcccctgttacaattgcatatctgcaaatatacatatgcattcaaatatttattcatcaaaagaacctaaaaaaagaaaaacgtagacaaaaagcatagacgctaaaataaattgttggtatattatatgttggtgcagaacaccaaatgttattaacctttctgaagctccagacattgttgatgaaacttgggtttgtaataaaaatgttttggttcgtttagtgatgaatgaatggctttaaaatttagcctcgtataaagcactaaaacttgattgatcaaaatcttttttctctggccaatttgaaggccaagtgttttcctttcggcttagttgcacatttatttggtccctgccaactacaagttataattttgtggagttagtcaattttagattttgagtacaaagagtcacttgatcagaggataaactatttcttagacaagtggatgatgtgtacctgattattgtatctgttttgttgtgactcttgtgagatggatattttggagtattgagatcttagatggcgtttggttggaggcaatgaaatggaatggaatggaaagaaaacaa

SEQ ID NO: 123240 - DNA, 2030 bp, Cannabis sativa
  modified_base (1979)..(1979): a, c, t, g, unknown or other
atagtacattaacatattaatatattaataatttttttaatatattaaatataaattttatttttacaacataaataaaaagtttttaaacaaccgcaccttgtcgttacctagttttattataatttactaccctacgctatacggataaaataaggtgtcccactttaaatattccctatatatatttatatagagagtgtggtcaataatattaactctaattagcaaattcaattaatattgtagtgactctaaagagagatgtatttaatgtcaacatctacttcaagaagtttcagttggggaaagatgagaattaacatgatgagtaccacacattctcgttaaataataaaattaaatattatgtatgcctcttatatataacaagaacattgttattaggtaccagtagtgtttaatattttattaatatgtcgcgttgcgattggctagcgatactccctaaaaactattatattaaattatatgggacattgacatacgattaacacataagagagtgataggcaccactagtaccctctagcatttctcatatataataagtatagttgagtagactaaatgcaagctatattgattattataaacattgttaataaaaacaatatcttggtgtatgtatggaagtttgaaaatataatgtatgtatagatataaaattgaatcgtttaattactagctagtaatagtatataattatttaattgatttttaggtgtatgattcatatttattataataaatataaatattttatatggtgactttttgattcaccaattaatttattttttaatttaatttcctaatttgctgtaaaaatattctagaaattaattgtagcagagattttgatgaaaaatctcacatatataaatataaggtctcggtttctaagttcactatttattttgtgaaataaagtaaatctatctaaagagagtagagaaagcttaaaagttcaattacccatactaatcaattttctttacttttatagaaccaacgctcgtgtgggattgaagctctaagaattaatggttgaaagtatttcgaatctttttccatacaatacatataatttagattaattctacacttcatacatgattatatatatatatatgtttcatatgatcatttatataaaatttctaacaaaagaaggttttcttaataagtaatcagaattaatggtaagatagtattttccttacaattgtttgcttactatattaaaattaagaaagagaaaattttattaattatgtgataaaagaaagagactattgggtaatgatttttacttatgtttattttatttttttaatattaaatatacaatgataattttgtcttttaaaatatgtcttataaaataactaccatacattatagtttatatagagaaaatttaatcaatttaagcattctgattgcgtttcttgattaagttaaaaggataaattattattattctatttccaaaaaaaattcgtaaacaatatattacgaatattgattctgattattttccaattattttgtcatatttttttattaatttattttaattttgaatactgtgtaataaacgtattattattgtatctaagtaagaaatgaaaatataagaaataacaggagtttttggaatgaggggcatttgtgatccactcttttttatggtgtatgattggccttgtagcttttgaatatcaatacatgtgcaaaatatgaaaaatcttctatggtcctcggtgattgaatttatttctacctaattagttggtcatgtatattctttaatttctctatttattagtttgattcaaattctttagatcccttataaatatatacaaatattattttcaaatatatgtagggctacgtaattaatgtaatgaactaatgatagatatatttttgggattattttacaaatncacaaaaataacaaaaaaattacgaaaatatgattttacggaattttaaat

SEQ ID NO: 123241 - DNA, 698 bp, Cannabis sativa
aaaaaaatataaccaagatgtttaaaataaaaatgtaaccattaaatagtcacccattagtgtaaatatatatatatatatatatatatcatatattaatacgttattatgagtacaaaattaataaataaatataaaaaattaaataagtaaccatatatttaatgaagtaaaattattataataaatgacctcatttaattcattaaaaaatatatgatatgttatacgtaatatatatttattacatttaattattaaataatcttaatattatatttttttttatttgtataagttttcataattaaagttttctttgcatattttttgtattatagtaatttttgttatacactaataaaagaagaacttacaaaaatactaaaaaataggggaaagtttacaaaaatattaggacacaaagattattatatttttactttactaagtttacaaaaaaataatgtgttaaaattttaaaattacaaaaatactgtgttttagtaaaataaaaaaataactcaaaaataatctaagaacaacttaagaaaaaaatatgaaaataactattaaacagcaaaaagataactacaaatcaatggaaaaataacaaaagattgacctaattacaataagcaaaacaatatcaactactcaatatgtttttgtattataattttttttacttaattttc

SEQ ID NO: 123242 - DNA, 1925 bp, Cannabis sativa
aaaatccaatattcaataaataattggattgaatcggatgggtctaaatctattagatgtgatccaatgaacacccttattctaaattataaaaaaaaaatagtgagctaatactgttgattttttttattcaagataaggtgtctatgttaagttcgcataaacaccttagttttcacattattaatcaccatattatacattccaacacaattgtccaaaccatggcttttatggctatttcaataaatatacatgaaaaatggttgatttttaattcaggatgccttagagtttactgatattcttctttgtgagggtttccatggacttggccttctctctaagaacaaacttttgcacctttccagtagaagtctttggcaaatcctgaaaaatgacagtccgtggagccatgtaatgaggcaaacgacttctacaaaagctaataatctcatcaccactaacattagcatcactcttcacattaacgaacgcacaaggtgtctctccccagtggtcgtcgggccttgccacaactgcagcctcaagaaccgctggatggctataaagtatagattcaacttcaattgtgctaatattttctccccccagaaatgatgatatccttggatcgatcctatagttcgacataaccatctggatgtttcactcctaagtccccaattcgaaaccaaccaccatcaaaagcttcttgtgttgctttaacatttttcaagtatccattcatgacagtgtttcttctaaacataacctcacctattatctttgcatcagctggtacactcttcagtgtcacaggatctttcacatctagttcctcaatgccaagatgttgaacaccctgccgcgactttagttttgcctgtgcatctctaggtaaagaatcccattcaggtttccaagtacaaacagttccaaggccatatgttacagtcaaaccataagaatgagtcacattgaaccccatttcttccatctttaaaagtagtgataggatcgatggggcagcacctgtcataatcgataccttagatggaagtggttttcgctccgtggctgatgcattaatgatcatgttcaaaatagtaggtgctcctcccatgtgggttaccttatgctgagctatagagtcaaaaattccctttgcagtgacattcctcaggtagacgtttgtaccaccttgagcagcgattccccagggaagacaccaactattgcagtgaaacatgggaacacaccacaaatagacagccattgagtgtatttcattcagaagaccccctgccaatgaattgagatatgcacctctctgtgtgtaaatgacacccttagggctagatgttgtgcctgaagtatagttgagtgagattggatcccattcatctttgggtattatgacttcaaaattatgattccctgttgatagcagtcgctcgtattctaaattcacaggagcggaaatggtgttgctgctgctgttgctactattgacgtcaatagatagttgatcatcacactctagaattaagactagaaggggtggcttggaaccttctttggataaaatgtcaatggctccctgagcaatgtggaggaattggtttggtttaggggagtggaggagggtaatacttgcctccgaatctattttgatatccctttctttgtttttggaggagaggaaagtgttaggttgtgtaactaactcaagcaaacaagtaattgagatagatggtagggttaggcctagggatgcacattttcccgtctgaggatggcctgcgggacccgtcccggtggagatttctgtctaaatgggggatgagaattatttttttttgtctccaagtattaaactcggtggggagggcatcctgttaaaaattattttaccaggatct

SEQ ID NO: 123243 - DNA, 1375 bp, Cannabis sativa
ctgaaatgtttggttgtgagttgttgtactgggaggtaaaaatcctagagattgttttgctctaacaagttcagcactcaacttgtaaatctcactttccttactcttcagctcatgaactagtttttttaacttttttgtctagttccatattattagctgccaattctttgtttatgtcttgcaatttcttcacctttttagccatgtaactctattgttcaaacatttcttgacatgctttattttttttttctgtaacatcaaaatctaattcagaggtagattcttcaacataagatccttccggcatgttttctttagccataaaagcaatcacaaacttttcttcatttgactcatcacaggttccttccttttcactatcactccaagtaacagcaagaactttcttttccttcaatgtgtttacacattctactaggatatggtcgaaaccttcacattcttgacattgaattcctttactcttaatctcattttgctgaggatgcttgttggcagttgaaaatttttactagaagaattttcttcgcttctaaaattattcttcttaaaacttttcttgagaaactgagcataaaacttagccaaaagagcaaagtttccatctatgaaacatttagacagatctgaatctttgctaatttcctccttctgaacaaaagccactacaatctcagctttgtccttttctgagtctttgattttcttacccttgtcccatctctgtagagtcatttcatagttttgcagagatccaaccagttcttccaagttaggagcttcaatgtcttttctgaccatcattttgttggagtggacttttccaagagcataagactcattagaaatatcacatagtttggcatgaaactcagtaattgactcattttcttccatggacaaattctcgaaagatttggcaagatctctcaatcctgcctttttttgtagcctcagttccctcattctttattttcaacttttcccatgcatccctagcaatctcaaaacttgaaatgacctttaactgattagtagagacagcattgaacagaccatgtaatgttttgggattaaagttagctcgttccatctcttcagtggtccatgcactagatcttttattatttaccccatcttaatcagtaaaagtgtgtggttaccaacccttaactgcggccatccacaaccgttcatccataactttcaagaattctctcattttgtcttccaataggggtaattagctccttccaacatataggttaagatgtaggtcctcctcctcaaaacatctacatttcttgttgaaattccgtattttaatattcccagtttgattatttaa

SEQ ID NO: 123244 - DNA, 2109 bp, Cannabis sativa
  modified_base (595)..(602): a, c, t, g, unknown or other
ttgttgccaacaactctatcgatttcttttgttgccttttcaagcatctctggctggtttaacatttcagatagtgcccattctgtagcgttgtatggattatctattgctgctagaaataaatcctgcttttcaccaataatgcaattagttaccaattgattataattagtgatctgtcagtatatactcaaaattatattaaattatcttaaatttgctaactgaatccgagattagcaggtcttataccaccaaattttttatagcagggttatgtgtaacataacttaaattagttttgctgtaaataataactctacattaatatatattcttacgttctattcgatacatagtgctataagcatcacaattagtcacccataatcataaatatatatacacacttttataattatagggacaccattttgtaatttcatagaatgtattccgtggtataatattagatgggtctcagggtacattagataggtctcagtgtacgttaccattttttaagtttaattgtcctagatcaaccccagccctcagaccaaataactcatccatctaacggctgtcgtacatnnnnnnnnacattccgtgaaagtacatcacgagacaaaatcgtgtccctataattataaatatattaattttaaaatattaaatttaagaaattaattaatatatatatatatatatatcaaccgttaaattttaatttaatgactaataataaaagagcaatttaagtttctatacttacaaaaaatgctcaaactcaaactcaacttttttggtctcttaattagctaatggaacaaccttaaccatgtaaaaatgaaagatttttttagttagattggaaaaattaaacataaaaactgatggaattttcgtaataaaaattcatggttagtgcatacttattaaaagtatattcatatatatatatatatatatataattattataagaaaaatatgtagagacttctctaaaagtaaaagtacggcgaaactccatattaatagagcattgctatcagggtggtcctgaaatttagtgggccataaggaaaaaaaaatatttttgggtcctatttagaaaaaaaatgtggtattttcaaaattaataaaaaaaatatataattttaaaaggagataaatttttttttgggctcctgagctaggtgggccctaagcacaggtcaagcccgcttatactcagggccggcctgcttgctatagccttcacactatatcaatgtggcctaactctataattaattagtaattttctagattatttattaaataagaatgtaatgcactaatagcatggtacttgacatcttaagattcctcttagcatttgtcatattaatatcatattgacttaatttaccatgatttgtgctcgaatttcgtcatcggacaaaagtggggttccatcagaatctttaagcgatacgagaacatcaagcaaatcgttcggggtcctcctactaatactagggtcgccctctctccattctcgaattctatccttgattattgggtcatgaagcttcttcatcactttcacagctttaccaacaattctttgatggccatctaagtccaaccatctcagccacggaagaaagtctgacacagaaaaggcataaatgtgtaaaagcataacaatcacagcctcaacatgctcttcttcttctctgcctggccctccatcctcctttccttccccaaaatatcttttaccaaacatcatttttctcattacgcctcctatgtattgttgcgcggcaattctcacatttactacttctccttctcctttagcggacgagtggttataaacgaagcgaaccagattatcagcttcttgagttctcttgggtagaagccaagcaagtgtagagcggttgagtacattagacacaaggaccctcctcattttcttccattggtcactccatggtgcaaatgcagtctctttgtaatcacgagagattaaacgagtgacacctgtgagaggtcttgaagcgaacactttgtcgtgtttcttcaagaactctctggcaatctctggagaggt

SEQ ID NO: 123245 - DNA, 1521 bp, Cannabis sativa
  modified_base (1165)..(1166): a, c, t, g, unknown or other
tgtgctctgcacatcttgtaaagtgagtaaattccaatcaattgaatctttatctttcttttcaattcaatttgactctccgcaatacatgtatatgtgcatggtgtggttataaaacaatatatttcatacaagcatgtttctattttaaaatatttgagcatgtgtattatattatgaactaaaattacattagtattaataactattcgattatttaactttataccttgtacagatattgcttttagtaactaatttattattcgtattaaattaatgatagaaaaaaattcatttttgcatgctaattagcaaatattttgtcactcatctaaccgtaatatatatttgcataacttacttcactgcgaatgaatatttaagatattcaaattcatctagcatacatattattccactactcattcaactaaagtataatatattacagaacttacttcactacacgaatgaatatgtaagatattcaaattcttttaagtattcataattaattaataataaaagttagtgaatatatacttgtagctaactaaaaactggtcaacgtcaaataagttgaattcttgcaaattgacctcacaacgtacaatacaaactgctcgtgtagaacatgacagaatgaaaactattcgtgaaagatatggtagattattaactgcttgtatatttcaaaaaaaatgacattggagatgcatgcaactcaatgtatcttaggctaaatcgagatacaaatgtttagattgcgaaataaaagaaaataaacatatttaactcaaaagcaagatgcgaggcataaacagtaaatatataaataagcaaagttggtcatccaacaatgtaaaagtttttacaaaatgccacaagtaagatttggttagtagacagactacctttcccagaggtcaagtgaggatattccaactcattgaaaataacatttctagcaatcacaatatttggtttaaccttcttgaaaatgtagattctataccctttggttctttaggcataacataggaaagatcccttcacggatctaggttccaacttgttaataaattaatgtacatatgttgtacacccaaaagtacttaaatgtgttaagttgggggttctgttgtaccacatttcataaagnntttttaagtctatcactctatttgggcttgtatttatgagcatccccccaaaaaggtttttctaatctagatctgaacagtaaacatctaacattgttaattaacagggttcggttcatctttttagcaacaccattttgatcagaacaatactaataatgtaattttagttcatgctatatatatagtacacatatgctataatattttaaaatagaaacatggttgtctgaaatgcattgttttacaaccacaccatgcacacatacatgcatgaccacaaacaaataattaattaaagggatcaaatccacaaatagtttttggctacaccactactacaatgttagctttt

SEQ ID NO: 123246 - DNA, 1724 bp, Cannabis sativa
  modified_base (1627)..(1632): a, c, t, g, unknown or other
tactttggaggatttttccaccaaaatatgaggttggatggttttttacaaataaattgatagttgagagggttttgtcgcaaattactctttttttgttgagagtggaatcgcaaaagagcttctatttcttatttgccattttgaaaataattgcctctaaattgtatgaggtccataaattatgctaatgttagttattttttttttttgttattatttttaaatgttaattttctaaaagttaaagattttaaatattttattatttatatttaatatcttaaaattttgatttttttagagtaaatatgtcaggtccataaattatgctattgtttgttattttttttttaaatttttaaatgttaatattttaaaagttaaagattttaagtatattttatttatattgaatattttaaaattttgattttttttagttaatgtttaaggttaaagtgaacagaaaaatgaataataatgttaaactaaaaaccctttttttgggggggaattacctattatttttttatttttttttttaaatttaagttttgggtttttaaagtggtttctgccctacgttttatgtgggttgctatacgatttttagttgcgatgcaatatgagtttctatgtagaattttgtaaaaatgcttttttgaagtgtaaaaaatgaaaaaaacccccaatttttttaggggctttttcatttttacacttcaaaactgtttttcttttttgcattttttacggaattctacatagaaattcctattgcaactggcactgcaacctaaattgcaacaaaaaatgtatagaaactcctattgcaactagcactgcaaccactttagaaacccaaacagtaattttttttttagaaaaaaaagttaaaaaacagtatttgaggtaattcccctttttcttatatagccatattttatactaaataaatattttgaaaaaaaaaaatgagtaatttaaacttagtttaaatggaaaggaatgtctgttaaaagaaaaaagaaaaaatagtgtacctgttgcccaataattttaataagtaagtagtgtaagtaattatagtttaggggtgttcattggatcacatccaatggattcggactcaaccgatccaatccaattatttattagatattgaagtttgtcatctgatccaatccaatcgaattgagtcatccgatccgatccaatgaatgtattagattggatccaatcattagatgcattgactagttttctattggattggattagatccatccaatccattttaggtaccatttaaattaatttcattaaaaaataaaaatatatataaatatatatttaaaacttaataatccaacatacataataaacattagtttagtcgaacctaattctcatgatctcataatcaaattgctataaaaaaaaatttattcaatgcgcattgacaattttttaacgtttcggaagatgagaattaatattttaaatttaaagtatttttttcattaatctcatgtgttaaatatatattaaatcaattaatatatatttttaaataaaatatattgaatatataaaactttaaatgtattttaaaaatatatannnnnnattggatgataattggatcggtttgggtggttatccattggatcggatggcgcatccgacaaccgatccaatctgattgggttttccaaatt

SEQ ID NO: 123247 - DNA, 1921 bp, Cannabis sativa
  modified_base (183)..(183): a, c, t, g, unknown or other
gagagagagagaagagaagagggatgagagagagagagaagcgggctgagagagaaagaaagagaagagggttgatcgacttacctgggtcgagggacatcctcagcaacagtgtgcgcctggcacggtggtcatcggcaacaacgtgggtttaggtacctgcatagagagagagagagaganagagagagagagagagaggtaaatgagaaaatgaaaaaaatataaaggtataaaatatattttctttatttttttttaatataattatttacgttgaccaataaaattgtgacacgtgtacactatgtctatgtgtacaatctaccatgacagttaacagtcaaatttagatggaagttataaagtgcttacaatatcgtagttttggaggttttatcgctcaaatttgagtttgaaagttaattacaaataaaataaaattattgaagggttttgccaccatttacccatatatattatataatggattctgggattggatgcattaggctcacttatttggttttttttattttattttattaaaatttcaacacaaaataaatgctaaaagtagcaaggccggccggccataaatgattacaaagtaccacattattgattattattgcaaggaaaaaatgtacttttttacaaaccctatgctatatataaaaccaatacttatatatatatatattcagctttcattggaagtattaatacttaattcttagaatgaaatgtactgaatattggtgattaattaatgggtacatacatgcataaaaattatgaactatacatatatataaatattgtgtttgatttgattttatttttcttaaaaaggaaatatattctttatatatgtacatttcattttatacttctactaatatttaaaatattattttggattttaatttggtataatcaatctttcaataattaataatcgttccataaataatccaacataacttgagtgaaactccaagcattttctagttcaaaggcggttttttttttcttttttatttaaatatttatatattataatacataatttgagattcaaactaaaaatctctaatatacgcaattttaatttttatagctagcctcaaataatttttctcgatcaagagtctgcaactaatgtcacctgactcggaaaactaactctatactgcacaatatatttttcatagatagaaatattgttctttaatttaaatttcatattaatatatctctggaaacttatgtacatacatataaatatgcatggttttgaataatatgatgtagagataggaataagacttgttattaatgatcaataataatgcatatatttgttattaatgggaaggagttccgttgggagattgataactatatctctttttgtaaaagcatctccttttttttattggttgtatgtttcaatttgttagtaaacagtgtaattttatggcccataatgtggccaagtgggcatttttctgtcagaggttcggctccatgcctctatcctctatgcccaatattatcttttgtaatgaccgtgagatctaactgattttattctaatgcatgcacacttttctccaagaataaaataaaataaaataataataatgcatatattattgagtagagatgtgtacatagcattgtcagcagcctatagctagctagctaggtagttgtaagtactacaaaaaagataaatatatagatataggtgacagagtctagtatgtacgtatgataatatagttcacataaaaatcgacacacaaaccccccactatatatctatatataaaaattagagtaatttgcggcataaataactaagttttatgccgagtagcagataaatacctaagtcgtatttttggcggta

SEQ ID NO: 123248 - DNA, 825 bp, Cannabis sativa
gaaagagcattccattagaatgctattctaatactttaaaatgcaactaaataaaggaatggaataaaaattgtttcttttccatttcattacctccaaccaaacgccacctgattcgaagaataaaaacttctttcaagtccttagactccatttaataccatctaaaaccacatctaaaaccactaggagaaactaattttgcaaaagctatactaaaaaaataaaagatgctaaaaaaacaaaaacaaattactaagagaggctcaatggacaacaaaaataagatgatagctattgattggttagaactactttaattaatatactcgtttttttctttttctttttttgtggaaataggcttaaattgatatacttgatatgtttacttaaatttttttaacaaataaaaatttaatcatttcatttttaaataaataatatatatatttgaaaagttatatatatatttaatatatatagatgtgatttgaaccataccctacacctaatctctgaggtaataatattaatttatgtaaatttaatgggccattacaacctcatattgaaattatgaaatcttttataatattttttattatacattaatttagctggcaaaaatttatgtaaaataataataataataaaatccttgcaaattaaagtgtagggataacatttagtatccatggattgtgatgacacttagaacgtttggatgggaggaatggaaatataggaataggaatgaaaatgggaataggaataagaatggaatggaataaaatttaaaatgcataaaaaaatttgataaaa

SEQ ID NO: 123249 - DNA, 772 bp, Cannabis sativa
gcatttggagcaaaataacacaaattacccttcagcaaaacgagcataactctctctcaatatttatccaaatgacatggttcaacttgcattagaaagatcttttaaagacggatctaagtgtctaatagttatagctcaattctgaagttattgggttcaaaattagatcacaaggtaggctggtacattttactctaagtaatgtaattaagtgttggatgttggagaactatgccatagcccatgtggcataatgtgcgagcagtggcactccaaaaaacctatttccaacacttctcaccaataacatgaattccaactcgagaggtgacatcccgtgtcactccatttcaatttggtgcatctctagccgagaataactattttctcaatgtttgtgggattttggcctagaaataaggagattttttgtagatatttatttatttgtaattgtttattcattattgagaggaagacactggatttgtaagtgagacaccacgacatgtaggggatcactaataaaccttaaagcctatataaagatggtaataggctagggtaaatgggagtttttacttactgaacggttgctaagaacactacatcctcttcttcaccttctttgcctaagtcatccatactttatcgacactaagcctcttttacccaagcaccattgacatacacagttactaagaacaagagaccattctcttttcttgctactattagtttattgttcctaagaaccttacaaccacta

SEQ ID NO: 123250 - DNA, 725 bp, Cannabis sativa
tagttagggtgttacaactagtctccaaatctaatatgtctttccaacgtgctttgtcctcactcacacacttcctgacaaaacttctcaggagatcacccatcctgagattacttcaagttaagtacgcttaactctagagtaagctcatggtggggtacctaatacacaatacatcttgttgttcccaaatgtaacaagtattgcataacataaaactcgtcaagtatttcttgcttcaatcttttcatcaactgaaatctataatcaatcttttgttactcaataatctttctctttgctacatcatattaatccctttcaataaatttgactactcagtcgtgttaacaaatcttttaaattccaaactctgttcccatactagttataccctttgccaatgacagataaattgctccaaaccttaacttttcaattctcttgatacataggcagtgcccttttcaaactattgtaaaactgagtttagcaccacaatcaatctctacttcaacttaagaaggcattactcataaaacccttttgcaaatatccttccatagtatcgaactaagctagacaagtattgtcttcaataattgattcatatcttggcaaatataacattgttgggttttatggcctaaataaaactccatttcaatgtaatctctattattcaatatcaataaagaaatagaagtattttcatcactcttttg

SEQ ID NO: 123251 - DNA, 1046 bp, Cannabis sativa
tcacacacacattacatgtaaggccctacaagattagacatattatcgtgattttaatttactgtgcactctaatattactaatcaacgggtttatttaaaaaaagtgagcaattaaaattttcatgattaaactttaatcttaatatataataatttacatgatacatgatcctattttaaagtcataactgttttccacatattataattacaaaagttgtagtccagctagcaattatcaaaatgagtctaatgtcccgaagatcgattactccagatctaaccgccctcatatgtgcaatccccaatagctcgaattcactactgtccaacttttgcatgcttttacctatacatgtaaaaatatatctgtgagtcgatagactcagtaagaaaaacataatcaactactagaaaattgggatttagaggcggtttttaaggcctttcagcgttagtttttgcaaaatacgctatcgacgttgttctggatgacgctaaaaggatatgaaataacctttgccatagggaccctatgacgtcagttattatgaaataaccgagactccatagggtccctatgatgtctgttatttcaccaacgctatagggaccctataaagttggtttttatgaaataaccgactccataggagctttctataattttttttcaactttaattaacataatttttttaacttttattaaaatctattttttttttcatatatataggaaaattctactataggtacacccattttgtcattaatagtatagggacatttttccaacccttgatatatttgattttggagtgtataacttatcttacatatacatgtgtgtactagattaaaaaatttggggatttttttttggtaggtgctaagggaaaaatttatgctgaggcatggttactttttttctatttcatcaaaactccttttagatcaagtctctgtcgggttttgtggcctaaataaaatccatttcaatataatcagatttactagtttataaagattagaaataacattt

SEQ ID NO: 123252 - DNA, 864 bp, Cannabis sativa
ttttttttttttcaaatttttgatacttgtctatattttatttattttcaaaatgataaaagtagaactttgagtttaattttcgataatttttttaatataataattactaatataaatagatataaaaaatgtaaacaattttgttataacacatttagatcgaattattattaaattttattatgataaaaaattagttaggaacttatttgtacaattttgaaaaatataagatctactttatcatttaacaaaataaagagtctaattaataatttttatataacatatggtttaaaataatatttatagtgatttaatttttttttttcaaaataaaataaaattatatatataagatatataaaatcaatacggttcctacatataagtgatatatataactatttttttaatggatcatgttttgtcgttatgtcatgggggtacgttcgtgcttgttattgattttttttttttaatttaaaaaaaggttttatttagttgggtacactttgacttttctaagttaataaattattattgagattattgtaaaattttgagtttgtaagggatataaatttaataactttttttatagttttgtgactttataatattttatgtttttgttcagaccttaggtctgagttttatatgtgcaatttaacgatcttattaggtatttatgctgttaaaaagatttattgagtttatgccgattataaactcaaaaattttataacttatgtcactatttattcttccataaatacctaaaaccaacaaaaaatttaggagaattacctcatatattattttttaacttttttcttaaaaaaaaaatttacggtttgg

SEQ ID NO: 123253 - DNA, 696 bp, Cannabis sativa
gtaatttttatcggttttttcggttcggtttgagcgggttattcggtttaggcggtttacaaatttttttgtacagtcctagtattccgaggttttggtaagccgcatactatggcggtaacggtatagttattcaatctccaggtttttttttttttttcaaacttaatggctctacagctaacatagctatctccctctttttatttattttttcctttcttatgaagctatctttctttcttttttcttttttttgaacaagctatctttctctttaaattataatgttactattttttttttgaaaaggaaattataatgttactattaaaaagataatttttctctttcccaaaatttttgaaaaaaaattacagccattaagtttaataatttttttgggtaaccaattttttgacacgtaagaaatatatattttctcgttgttattgaaggaaagactaaaatcaaaagtaacttttaattttttttttctaattaattaacaaatataatcaaaattttaacttaaataaaatttaatagatcaaaccaattttatagattcagagctcgtttggtatgtcgtattctatcgtattgtattgtgttgtattgcattagtattatttaatacaatacaatgtttggtattgacttgtattaattaattgtgtaaagttataatatatt

SEQ ID NO: 123254 - DNA, 2472 bp, Cannabis sativa
ttaatgaaacatatggtagtaaatgttgtagatcctggtaaaatatttccaacaaaatctaggtaaacaattcccacataatgttgtgtacaagatcgaggccatttaatgatgacatttgccttggaaatcctactaacataaaccagtcgtcatcttgcgtccctagaatgcatgctctttctcaaggcatgtaataggcacagactaagggactcatgccacgtgtaccctactctaggaagatggaaagatcgcgaccctccaccacttactccattgaaattcttaaaggttgcacctattcacggttttgcattcaacaatgaatttggaagtaagctgcaagcctccacgactctcgagccccgatgggttaggggtaaatgttatccttctttctagattaatggcacgggtacttccaaggcgcaatatcagccaaagcacgcccattcctaggccaatcaagttagtaaactaacccacaagtggagttaggctacgactctagatttggatataagtctagcttataaatgcgacaaggtcggacccctttgttggtaaagactattatggctggaagccgaaaggttaatcaggacaaacctggataccctcatagggtaatccggaatggacaactgaagagacatccataaacctccagatatcatcctacgtgaaatcctctaaagacagggtcccaccatgtacgggtttgtcccctatgtcaaaataagggagtgcacgcatgcaccatcaaaaggaaaccaactttttgtccaacaccatattctctgacattcttgataccaacatggttgtgcatgacatcttacatcaccatatgaattccactcgtactgttgactattatctcgtcaattgggcctgatctaattggcccgaagtcaatatatattgtattttacccaatcagtgggcctcatctgaacactaccgggtccgggttcacccatacccaactctagcctataaacaaaatattatcccttgtggactaaggccaaaacacttatgtaagattactttgaagtttttctagcttaataatatttactcgtggactaaggttccttaatgacctaatcactaaaaatccttgtttcttcttatttaatttattttttttttcttaagcttagttattttataatcaatttttaaaactcttgataaaaaaaaaagtgaaaaaatattcttgaaaagtattggcaatattttcagcctcttcaacatgattcccattagcatccgagacacaattttttttaagattccaatcacacataacaattatccaattatcaaaattttatcgtagggtttatgatttagtagctataagtattaaaaaagcactaacaatgtgtgacacaacacacacaggtttctttttcttcttctgtttttacagatttcagtcacacaataacatgtaagtcaacataaattttagtgttgttcaatcatgcattctattttcaatacattggtgatttggacctcaaacgctaccctttaattatcgtttaacaattctagattttaaatttttatcactttttggtcaaaaaaaaaaaatacaagttttctttaaaaaaaaaaaaaaaaccaatttatttttttagaaatattatatttcatatttaataagaaaaaagatccaattattttttgtaagtaccacataataaattaagttaattgttcacagcgaaattatagtaaatgacctcaaatcatagcactatattagtaaatatcttcattttaaaatttgtagcaaaatgacctttttagattatttattatttatattatcttttgtcacataaaaaaatcaattattttttttcatatttttttagaattagaagcaaattacttaaaaattattgtatatctatattaattttgttaaatctttatgatttgatagttatatcgatttttttttttaattttttaagagttgttgtgtgttgttcgtatatagattttgttgtacagtataattttattttgttgtatattatattattaatcttagatgattttatttttattttgctatgcataatagtggtatataattttattagcataatataaatattttaatgtatgtatataattttattggcatgctacatatatttaattattaattttatgtattttaacagtatgatatatatttattttacataatatttaattcatttatattttattatatacaatggtggtatataattttgttatcatggtatatatatttcaattattgtatataatttagttagtatagtacacatatatatatttgtattattattattgttagtatatatattttggtaaatgatatatgtattttttgttatacagtatattattttttttaaaataatactaaagttatattttctattgtacttt

SEQ ID NO: 123255 - DNA, 707 bp, Cannabis sativa
ttcaataatatgttaatgtgactagtggagcttatgaatttgttttttttttctttcagagaaatttttattagttagaaacattgtctaagaagctcaagtcaaaaaccctaagagctgaggctccatctcaattgattgctgccacaaggtactttagtgattacttagaagttgttgctatgtttcttatatattttattcttgaatagaagatgtactgaagttttttgaattgaaagtacaatttatttagcattttctttcatttactatataatcttcccatgagtttgaaaatagagatattggtgtctttgtgatgtatcttataagattcaaggataaggtgtttggattggaatataagctattctgtatcttttaaaataaatcaaaaaaactccattttctctatattaaaccattccactttaattttcatatgctttttgtatctgtcaaaatttttattggacgtgtggagagctaattaaaataagtgtgattgttatattagatttaacaccagctacttctcttttttttttttctgaagtagttgtcttttttgaagttgttgcttttgtactttgttgattttgttgaatttcagttaacaactaattaggatttttaaaattgatgattgattagccctttgtttttcctctactgtatattttatgaagacaacatttgaggat

SEQ ID NO: 123256 - DNA, 1752 bp, Cannabis sativa
  modified_base (973)..(984): a, c, t, g, unknown or other
  modified_base (1697)..(1700): a, c, t, g, unknown or other
aaagcataatagtgatttaaataaaataaaaattactattatactatgtaatagtaattaaaaaaaaattattattcgtcctaaatttatcttggcaattgatgaaaatgcttaggttaaactatcaaaacatttaaatttaatttaaaataatatttaaaattaaactacatggatgctgaccctttacgtggcaacatctaataatttgttatttctttttattaaaaaagaagtcacccaagaatttctcataatccaagaattctattatataaccacattttatatagaatagatatatattaatttgctactatttcctacataatatacacacaaaaataaaaattactcaaataacaaattttgtaactacatatcaccattttacttaactcgttattaattatatattattattttaagcgtgtcagtgaaaaatattaatcacaaacattacaatacattagtgtaagtaaataaaaacaaatatatttaattgttacctattcaaaaaaatttatttttactcacaataaaatattatgattaaatttttgtcatttaacataaactattattcctatattattactaaaaagtctgtgactagtattagttataaaaatcacaatttatcgtcatgagtaaatgtatttttagctacaacatttattgtgactaaaactaattagtgacaagtaatttttgttacgaccaaaaaagataatttagtcattaaaaatttatattgtaattaaaaaattatcactaaaagtagcattttttaaaaaattaaggtttctcattcctaaattaacagctacaggaggttatcttttttctatggctaggcccccggccttccatgggcatacgtgcggcttggtcgggactgtattttgctattgtgattcaatttttgctactgcgattagtcttgtctctgtgacatggttttgagtgtttnnnnnnnnnnnntgtgacatagttttgagtattttagtcttgtctgtatgattttattttgttgttggttattagttgttcttcgatgattcaccatcaaatcgctactagtggttgggtaacaagttctctgcgactgaaggggttgttagtagtgcagttatttaccttgcacaatagttgagtgctcaagctacgagattgaatgaacctgccgcaacaatttctactgttgtgtcttttgagtggtagatgaaactgaatataggtatattcttaaggttaactgtgatgctgtaatcttttttatcttattttatttttagtttttttgtcaaatgatatgggatgtagacgactaattatttgactcgtttttcttattctattcctaaccgtgtctctaatgaagagatgtctcgattagatcgcatgctattatattttaactgattgtaattaataaaattgcataatttattaaaaaaaaagtaatattttttataatgacacttaattatcgatcagttcatataatatgatttataatattaattatcactacaaaaaattgtaacttttagtgacaactttttagttataacatattttttttgtgactaaaaatgtgatttttagtcacaataaaatgttacttgtgactaaagtatagtatttagctacaaattgtcattaattacttattgtgactaaaaatacatttnnnnacaacaaattataatttttgtaactaatacctttagccacagaccttttagt

SEQ ID NO: 123257 - DNA, 1048 bp, Cannabis sativa
ttataatatgtatacacacacacataaaatttaagcatgtactttgtttggtatatggtcaaatggaaaaatttgattagctggtaatggtataccaatgtaaaattcaaaggcgatgctggctatgattctttacatgctgacattgttctgtttaagtgtttgttgggagcttaaatggctatctgttacaagcttgttatcttttgttttgttaaataaaagtttaaggttttactctcttgaatggaataggatggacaagaaggtgtatgatgacagctttgtagatgatactggcagtgacaatgaacgactctcttctctttatgcgcctgaggtttgtgctttgtcccataggctcttacatgcatacacttttttaatttctgtttctcattgacaatgagtgaggctgtcgtcattatgctcatgtaacaattcatattataccttatgccttacaagaagcctgttgcctgttgggacttaacgatagcttctgtacatatacctgtatttatatgtatatatatatgcataaatgttaaaatgaagcagaatgtaaggttgttatgtaatcaagtctttctcaagcaccatcttctttgtttgtatgcaaaaaccagccattagggggagaagatggagagcaaaaagctaaacggcttaaagctttagcagaggctaaatacaaggccgccaacctcaaatcagctctcaaagatgtgaagcgagcttaccgtctctgtccgaaccttgatggcctctcttccatggttacctcatttgagatcctctctgctgcttcaaaatcaactacccatgattggtacaagatccttcaagttgagcccttttgtcatattaatactattaaaaaacagtacaagaaactagctctccttctgcatcctgacaagaatccctacttgggttctgaggagacctttaagctcgtgaatgaggggtttcgggttctttcggataaggtacaacgaaaggagtacgatacaaagctgagaaatcagattcaagatgaaaagat

SEQ ID NO: 123258 - DNA, 1713 bp, Cannabis sativa
ctttagacacccaaaccgtaaatttgaaaaaaaagttaaaaaaatagtatatgcggtaatttcccttaaaattattactataattgtctttttcaacaccaactattgtctatctcatacgggtattcatccaatccaatttgcactattttacttatagtgcatttgaatttccgcactaactgcaaattttatactttagatccaatcaaatccgcatagtaactcaaatcaaatccaatccaatgcgaattaattggatcgattattttggttggttgttacttttaatatgaacttatttaatattattaaaaatatttttacacataactatcaacaaaataaaatactccaacaataaattaaaataaataaaacaaaaataacaaattcaagtaaaaataaattgtatgcataaaaaatgtttgttttgttttagattatattttctttataaataataataaaatatactggtggcattattcttctattatgcagagtagctggtggcttatcgatcaatgaaatttaatatctgtcaaacgaatacatgcttattgtgtgatgttcaggctgaatcatggagcacctttactttaattgtcatttcaacaggatttgcttacaggagatcaaaaaatggctcggatggagatgtttgagcacagatttgagcattattctaagatggactgatagagcaaaaatctctaaattttggagataatgttagtgtatctatagctacctaccacatatatggatgattggaaacaaagtactttggtttcaatgtgtacaaagcatcacggtaagctgtgtaatagaattcagcaagatgtaaaagatagattaaatatggctactcccaaaaagatgaagaaaatagatattcattggctaaagcaattgtaatacctttttattgagttgtttgtatagaatgttttctgtagttgaatatattaagttattgaagctgattcataaaaagaaaataaaaaaaaaaaaagaataaaatatagatttggtttactatgttttaaattattatttttacattaaattatgtattgtatatataaacttttttaaaacatatataaatatttgtggattagattggattggttacttttaaatgtcaatcaacattcaattctcacaaatatgagattttaaatttttcaaaagataatgcagattagattaaaattaggtattttataagtgtactcctactttttcaaacaccaattgaaattattactattattccattgggtagtttagtaacaagaacacacaacaataaagtcttcgtcatgtagacaatttatacataaaattactaaaggtaaccttagatttttctaagtcttccaattagaccaagtccatgagttcgacagacattgaatatgatggtcgactaatattgtaaaataatttagttaggaagaattatattctatcacagtgacattattaattatttttgtccctaaagatagggatttaacaaaattataaataccttatttatatgattgtgtatattaattgttcacattcaatctatttttgaaaaatttagagtacatttattaacactttaatcactttttttttttttaatagtcatgaaaaaactgttagaaaaattaataatatacccaagatctatttgtatataacatagaacac

SEQ ID NO: 123259 - DNA, 1962 bp, Cannabis sativa
cggtttatgatttaaaaatcgtattgctgtgatcttcccgcttttactgggtcaaaatgatagtattttagatcacgtctttaattattgtttctagagatgtctcgacggaagcttggttttagtgatctaaatagcgagttggggccatttttccttccgaagtcaacgatgcatgtctgatgttgattgtggttcttaaagagttcttcgaggctcatttgaatgttatcttctagctcgccaggattgtaggcctcgctaacgccaactggatgaagcttattggaagtcttcctatagcgagacgggcacctcgcttaattgtttttgagccgagacgaccgttgcacttcgtttgtactctaagggctttcccaattgatatatgtccctttcactttccaatgtgttctgtccttgatgtctcgctattcgcattcagtgacataaggtttctcgctaatatactaagtgtcagtttgtacattgattcctcgcctaagaccttacattcagcaggttacaaatatactctgatacttatgtaattaatgagttattccataaaaagcatttgcattgattcacgttctctttatcttggcatgtctccttcattgagatagcagctgaattttgggtataacaataaggtaactaattaagcaaaatatcaaattttattcatttttcaagttcaaaaactactaatatcaaaaattaattaattttattctgataattagatttaaaatttgaaaaataaaaatctagatacaaaattacacaaaaaattcgaattaattccatgaaaaatcaatcaaaaatgaaaaaaaaaacaattttttttttgcattgcgtgcggatggtatgaagtgcttaccatccgcgcgcacaagcatagggggctggccgagaaacctctgccaatgaggctgcttgcagcctgttacgcgcgatgacagggcttcagacacgactctgaccgtgttcctttggtcaaggtgctgtgcaaatgcacgtgctgactgagtgacactcggttctgcgctcgcacgtgggtgtcaccaccccttagatatttttcgatttttcaaaaaatcataactatttcaaataaaatcgaaattaagttctacaaaaaagtgaattgcttagttctttccattatatccaaaaaaataattctataataaaattctaattattttacgtaaaaaatttacaaacctcaagcaatcatcaataaacacatagatcaacatgaatcacatccaaattatacatacatcatttcaagttcaaatttcatgaaagtaaattaattaccatggctttgaggccagttgatggaatatatttttccaggacctagatttactaacaagtatgcttttaacatcataaataaacacataaaagttatgagaaacctttgcagcacaattaaatgactctgtttgctcagatctctaacccttgtatccttctgttttttggattcttcacggtcttacacactatgattgaggactaacttgctataagtggccatgcactcaatcactaaggctcgaatttgatagtgaataagacttagaatttctaattagaagggaggaaagaagaataagaattcttaaaacattagttgttagatagaatgaaaactagttttaaagctttagaagcattagttttgatagtaagaccttactcttctttttatactaattctactagggttaggattgaattatttggaataaaaaatgataaaaacagggttaagtgcccggccccttatgtgagtcaatcactagttaaatttttgccctttttctcaatcatttatctatttttcacaaataccactttttgcactttcaatcctataaatgccaaaactatttatttaataatcaaaataattatcaaataaaattgtcatttatatta

SEQ ID NO: 123260 - DNA, 760 bp, Cannabis sativa
  modified_base (26)..(54): a, c, t, g, unknown or other
  modified_base (692)..(694): a, c, t, g, unknown or other
tttccataaaccttgttgattagcannnnnnnnnnnnnnnnnnnnnnnnnnnnngtaatacgcctatgttagttagggtgttacatatctggtagcaagaactttagccacaagggaggctaaattttttaacaggctcaaagcttacttataaagcatcgctttgttgaagtgagtgagaaatctaaagcccagaccactatcatgtttagatttgtaaagagtagtccaactatgccaatgcgttttgggatggttttgagcattggttccccactagaaatcgaccatcattaattccaaagagtagttaatgctgacaagaagtctgaagcaggacatagcataggaaggaatagactgcatgactgctttgataaggacttctttccctcccttagaacaaaaacttatttttccaattcgaaatgtaaaaccatgctcgatccttaatgtaatgaaaagcttgtttcttggaacgcccaaagcactgagggaggcccaggtatttttcgaattcaatgcgaatgggcatgctcatgtagtcagagataagggttcaatttcttgtggtagtgtttggggagagatagagagaggatttgagaaggttgacacattgacctatcgcgagtttttattgaagaagaatttctttgacagcattgcactgttggattttgtgccctaannnaaatccatttcaatataatcaaatttacaaattaatataagatcagaaatcgcttttatgttgcat

SEQ ID NO: 123261 - DNA, 752 bp, Cannabis sativa
gttttacatgggaagtcaaaatgcgtacaaccaaacatacaagcaacatccaaacttggcatatagaagtccaggggctggttctagcaattcatctatgcctcctagacctaactttctacctagtttttctacacaagtctttcaacaaagaccctaacatgatgtccaaacaaattcttttgagagtatgatgcacaatttcatggtcaagatagaaaatttcatgacaagagctgagaattatatggcaaaaactgacactatgatccaaagtcaagcaacctctatgagaactctagagaatcaagttgggcaactagctagtgagcttcaaaataggccacaaggtactttacctagtgatactaaaaatccaagaagagatggcaaggagcattgcaagacggtgatcttgaggagtggtaaaaatctggggtcaaatgaggaagaggctaaggatcaaaacgagcccatttcaatccaaagtcgagtggaaaaagaaaaaaatattgaacgttctaatttgcaaaagagatacttgaagaaaatactacagcaattcttcatcaaaatgtagtagagaagttacttagcaagccacctccaccatttcctcaacaattcaaaaagcagcaagaagatgatcaatttcgaagatttcttgatgttctaaagcagctccacatcaacataccattagtggaagctttggagcaaatgcccaactatgtaaagtttttgaaggacat

SEQ ID NO: 123262 - DNA, 3132 bp, Cannabis sativa
aaagaaaaaatcaaaatggtagctgtaaatgagatgaactcataaaataacataaagatatgtgcgagttgaatattttaacggctcgcgttgttctagcatatattataaacgaagcagaagaatgtcttgaaaaataatactaaagctaaaatatgaatagaagatctaactattcatatgagcaatcaaaagatatacaaaataattctataagtgaattattcaaactattttttaagtttgctctaaagaaatatgttcacttatagcagattaaaattgctcgcgtataacatgggagattaaaattgctctcataaagtaatgcagatgagaactgctcgcaaaataaaactacacgaagattataactgctcgcgcatatacatagtagattgataactacttaaatatatcaaagaaaaataggtacaatggaaattcttcccaaagtatcctaagttggatcaaaatataaatgtttagattgtgaaataaaatgcaataaacaaaattatttagttcaagcataagatacgaggtattaaaaataaagataaatatataaaaaagcaaagttggccatccaacaatacaaaggtctttacataaataatgccattagggggaaccattgtctcggccaaagggccatttttctcaatataaaaaatatataaataatgaaataaaaaccaagtctacatggtgggagacctggatggatcttcctcagagtccactacttcatctttcttgatcttctcgcagtaagctagaacatccacagcaccttcacccacgaaggtcaattcaatgttgggattggccagcaatgctctgtaactgggtcattttgcaacattttttcatctctccttaacatcagcctcgactcccttaagctttacattcactttattgagctcttcctggagtttttgacatgccttgcgttggtccttgtcttccttttgagcactctcgagatcagccttgtggttcctctttagttcctcggcatcttttgtcaggtagatgttctccttctgggcatttgtccactgcttcgtaagaccctctcgttgttcaatggatttgcgaagattagattccaattgttggattttctgaagaccccagtgttgtgccacatgagatagaaaagatgtttgcaaaaagaatatataagtttataagaaaaatacgggagaacataaaataaaataaagaatgaagaaaggaactaactgaaacactaaagtttaggctcctttcaaataactcctcgaagttgccattgttcaccaaattccagttgccagataagaaagattttaaatggcgccaacttgaagtggcataatgcgagcaaaactgcgagccagtacttcctgcttcacgaggcaaggggcaggaaggttccaacgaccatttcaggttctttactcaaacccttgacttgctcatcaatatccacagtagcaggagtttgatagtgaacctgatcgtcagctggctagatgattatttgttgtaaggcacattttttgttggcagtggtcttccttgacctcttcatgggctctgatttgctcccgatgaagtttttgaggcagcaatcctcttcttaccctttttgccagaggtattgagaaggttttccaaatcaatatttgtgagacaaagaagaagattaatcaacgcattcaacaatggataataaaaaggtagggaataaactcccacttaaagaaaaagttaccgtaatcattagatgatgaagaggaagaactatggtaattactaaactccctagacccggtgatcatgtatatattgtaagggtttattggagacaaatcccaatatgaatccagatgactcaccctatccaagttagtaccatactgctcgacgattctgaagtacgaactagtgcaactaagttggacatgaaattgggggtaccaaccattacacctttcagttatgcaatctatacaaaaattatctcaagtatataagttgtatcggctatccttaaaggttactagcgaggtacgtgcgatcctaagtgtagttggagaccatccacattgattacctcaagatgcttcttctttagcttcccgagggactacttttttgagataatgagtgcgagccacataatctttatcttcctcatcggctagaactggggccctctgccacttagaatatttctaaccttgtagtcgcaggtaaattggtctgaaccatggaggttgatggtcctcaaattggcctcgttcagtaggaaatctactaagcgcagtccaaaaggaagattgaacaaaattttatgtagctcagccatctcgagagtagcgattagccttctagtaaccgctgtcaacaataataaatggaataagtagacgaattcaattttgtaaattcaaaaactcaaaactaaacttttgaggaagagaagacacttccgtataatgaaaaacgcagttctgttgatgggagagagaccagtagtccagaagaaatcgtccttgaactcggtctttttggtaatctcacaatgatcatgcgatcacttgtgtgggtaccgatataataataacctcctgaacaccacttccttgcgggaatagcttttgcggagtaaaaatacacaatttcgaggggagtaggagactcccaacctaaaatgtggtataggaccttcaggcagaccaagattctgtaagagctcgaaattcactggaaaggagaaattatgaggtagttacagaactccttaaaatattcccttaagggaagtactgccccaaccttgatgtgctcgaggctccaagcgccaattcttgacgaggcattagtgctggctttgccacattcctctcaaatcaccctttctagtggaaagcagctaaattcccctagagcaatagatctaatgcgacatcctcgctctttcttgatgccacaaaactttaatatattgccgacataatccccaattgcccttactatggattcaataagttcagcctcaaaggtgacagtaggatcttgggggtctttgatttacgagcttgggtggtcataatttcaaagtctaggtcacct

SEQ ID NO: 123263 - DNA, 939 bp, Cannabis sativa
  modified_base (902)..(910): a, c, t, g, unknown or other
tatgactagcatattgagtataggctaacattatggtcgatggtattgttgtatgaacgttctaaactcagtagttctttttggatctcaccttattttagcaaatctgaatattggtattttttttataaattgtcatttcaagtattgctcccatataaactacacgtgcacttgcatattaaactttcctcaacaattgggattcctccccttgtgctattcagcttgataatgacatttactttgtactgaatttaatttttattgaatgccattttttttttgaaaaaaaaaagactaatgtttttttatggtatataataaatcaatgacatattactctagataataaatctaatttacttgctacttataatctcaattgcaagaccaccatctccatcaccatcattacaaactaaaggatataaaattcaactataataagatatcgaagaaaatatctttaaaaagataaataataaaatgtaagtatatatataaattaatggaacattgaacctgcatgtcatcaatatcgaactaaattattagaataactaattaattattttaaaacataactaactaatttataaaacccaacaaacaagtccctttatgaagacataaaattattattattattattattattattactttatgtgaacgaaaaaatttaactatatgtgagatgtgagtggaagagtaactactaaccctttcggctctaaagttcccgccactaataataatttacagttgtaaaaaagtatgagatatttctacaatatactcttttaaaaatgatgcacttatatatcttttacttttgacatctataagaatttttaagtttgttttttttataatcgtatatattatagttatttaannnnnnnnntaaaattttaaaaaatttaatataattta

SEQ ID NO: 123264 - DNA, 524 bp, Cannabis sativa
aataataataaatatttatttatcaattaaaatgataataatatccaaattctaacaattataataattctttatattattgtgtaactattgttaaaaaattacataataattaaaactataaaatacatatatatattagtaattagtttatcgattataataaaaatacaaaaacatggagcatgaatttgagtgcatataagaacataggttgatttatataaggaaaataggttgatccaaataaatacaacacgaacttgagcaccatacaatattaccgggcttgtaagcatagacccaggatttaaagtgagagggcgatatttttttttttttgtaaggcaagggaaaagttaatttaaaaagaaaaagaaaatgctctcggtggaatttgcacttaaatctctatcttatatgcaatttagtttaatcattacaccaaagataattttatatttataatattattttttattgcaaattatatcgtaactaactaaaatacatatatatttttt

SEQ ID NO: 123265 - DNA, 1556 bp, Cannabis sativa
catgaactatttcatcaaaatctaaacattttaacttactgaatttcagtgcatatgattattattcaacatatatcatgtatcttttaaacacagcaactaaataaaccgattaaatatataatacttacttaaatacttaattttatcatcatacatatatatatatatatatattaaaaaaaagaatgaaaaattttatgataatatacgtacgcagttaattattagattatatagaaagctagaattggaaattaaagtatagaaccgtggggtttttatccatatatatgtaccctacaaaagaatgatgcatatatatgttattacacaggaaacccaataacatgtgaccacgcaagaatccaataatgattattatgttagttgcgtaaaccaacaaaagcgtcaccatcctaaaaaaaccctaattctctttaactagtaaaaaaaattagatgagtattggactggtttggggtgatgatgatcagaggtttagtgtcgtttttgtaaaaggtgtctgtgtgtgtgtgtttttattatatgataaggcagaaagggggaaagggtcactatcttcttgttccttatttctcttccccattaggtggcttgaaaacgacattgcttctctgaataaactactcctgtcttgggcctccacattaatgtatagtactgtttctatatgtatatatatatatgcatgtataatataggcgtatgtatacactacactctacgtacactactacacatacatgcatgtcagccaactagaatgatccatctcatacatgtataattgaggtcgttttatatgatacatggcattctttttttcttttctcgtaattgtagtttgtccttaattatttcaataattaactacagatttttcttcaggaaaatcaaattaaactcaggtgtatcaatgtgtgacccggcatgcaaaatccattatatattgattcatgtacatatgaatatgttggcattagtttaatctttggccaacatatgatgggattgacaaaaacatgagacaatgtttttaattatttgccaacaataatatcagctgatttaatgcataacttatatatatatatatacatagatattgaatatatatgatttgataaaatgtataaatcatcatcaattatgctcagattatactctccttaaaaaaatgaactctataaataagagaggtataagtagtgtcacttgagtgggatcaaataaatccttaaaaaaaataaataaataagagaggccacagtcatgatgaccattttcaaaaccaaagaaaaaatcagaatttaataatgatataagaaaaaatttaagaaaaaaaattggcaatttttactttcaattttaaaattttataaaaatccgaccaagatgggcgcatcataaaattaaagaaatggaacttcacatactgtgtgaagtaagaaaaggccaacaattaagtataagatctaaagtttgaaagagatattttggcatgaacgaacaagaaggctggaatatatata

SEQ ID NO: 123266 - DNA, 1084 bp, Cannabis sativa
ggcgacggttatagaaaccaacggaaaaatgtcgaaaaaatccatttttgtagtagtgtgtttcaaattcaccaagcctcctcttttttgtcaaagtctctttcaagaactttatataggttcgcattttctccaaaacctccaccaagtgaatgttgatatggagcttctttagaacatccaaaaactttctgaattaaccatcttgctactgttttctgaatcgttgaggaaacggtggagatggcttgtgcaaagtctattctagagcaagatgctgatctgatgctgtaacagttgggggagtttcaacagctgcagttgctagttctttactcgtttcctgctctttttagattgaagaggtgatacaaaatttttaactgtaagcgtacaatgttgttgtagcaaagttttaattcaaaaaaaagttgtcaaacccacatggattgattattaaatttcactaattattatactttatgcttaattagggaattcaaagtgaataatgattgtgaatgaaataataaaataactaagaaaaagatagacaaacaacgatttcaatcagatagtaaagacctagagctttgatttccctatttcaaactatgaatctcagcttatcgattatcccaatttattctataatttgtagtttcaaaaatcctaatataatctattaacttctctcgatagatgatagaattaattataattaactaataagatatctctattcaatgttaataaattaagcaatatggttctcttttaataaacttcatagaatttaaaatctctcaatctcacacttttcctatgtcatgcaattctagtctaattctagattacctctctcaagtgtaaaaccttaaatttctatactaattaatggtgatcaaacgttaacaagatgataattagcacaaaattgcataaatagatagcaagaacaaatatgggaattatctaaaaacattaattcataatctaaaaaaatttcatcaacagtactcaagaaagagtgtttagttcataatcacaaacataatatctacaataatcatgttcataatta

SEQ ID NO: 123267 - DNA, 642 bp, Cannabis sativa
aaaccgcccaaaaaccgcccaacccaacccatgtgcaggcctattaccagccaaaatatgacattaaatgaagataggaacgttggtgattgatgatagaaaatcccctatcaattcccaacgttttcaagttaaaaaaaattcccaacgttttacgatattttcttagaaaatggctctaagctacatgtcgcatggaatgataccctcaaatcatatattgatagctaaaacatcgagaaactctcttctaaagtaggcaaaatgtagcctagtgcttaggtgccatgtcacttaggactgttactgctcaccatctttgagttttaatgctcctctttgagccaactcagcacccaacgtttcaaaactcatttaattgatgtaattgaatattttgatagtttcaaacttttgaaaacgtctccatttggttttcacaatatatatacacacaatacatattcaatacaacataaaatacatacatacatactaaaaaagttaaaaattttactttattatcgcaatctaaccaccaataccgaccaaaattcggccaccacacacaactataataacacaattttaataatatagaaaaaccctaaaaaaaatttataaaataaaaaataaaacaat

SEQ ID NO: 123268 - DNA, 1307 bp, Cannabis sativa
tgcgtatacttgcgtagtgtttataaattatagcaacacaacgacttacaatgtaattatactggaataataaatacacaatcaagaacaataatcaaaagaatcacaaagaacaaggtaatgaattaaagtagtaaaacatataagaaatataacaccaggtttaacgagtttgagccttgtgcaatgctctacgtcttggtcggaataataacagtcatatctttattgatatcagtatcttcaaggttacaagaatcctttaaactattacagagattacaagatgaactttctcactaatttaaactctctctctctctctctaaccttacactttcaccattttctctcacactttcaatgggctaatgcaatgaattacaaaggtgatagctatatatatatattttcacagttgttaaaattagctctgattttatcgtgactaattattaattactgtcttaaattctccaagtcatttccatcagcttcaaaaacgcactttttgtacggacaatctaaaaaacaatcacatgctctattcaaagttgacataagctatctagaaggacgtcttcaaatatatgacaagctatcctgaagattctacttacgaaagacaatctatctggaagaaccatccagactagccataattttacgaacaaagatttttggatgaacaccaagctttccataacttctttctggagtaacaactaacttcctagaagacgaaacttgtaaccattattaatactatgaatatattgaattcttgttggatgtacaactaattaaggtgttgcattgttctattatcatcttagaattactattcacctaatagtttaggattctaagcatgataatttgcaattaatagtaatgttgatgaaggtattatttgattgtgatgaaaaatgaaacctagtttaaatgaattatatttttcattgatttgtatctaaattatcttatctccttaaaaaataatgattttttattacagagattgaatgtttaatggatttattctttgataaaaatatttaattattaagtgcttcgtcttgattaattgtaatagtttaattaggaaattagaataattttttttattattattgatcttgaatgattattgaggatggagattaattcttaactgttctttttatcatagtacaatttttcttacttttttatgttatctaatcgtaaacttagggcccgtttggtacgtagggctggattggattagacaggttaatttgtccaatccagtgtttgggcatgtt

SEQ ID NO: 123269 - DNA, 1373 bp, Cannabis sativa
ttcaacatgatttttgtttaaagcgctctcaggtatatatgcttcataagatagggattattgatgtgaatggttttgacaactgacaagtatttataacatattaatcacaacacgattcgttcagtcttcatgaatacttttatttataaaattgtatattatggattctgttataaggtattgaatagatgcatcgtgtaattcaatcatcaaaaagttaagtttgaagaactcatattataaaaaaactattgtaaccaaccaaccttgtgatgttaatgttatgcttatgatcatgagtaaagttgtacatttcggctaggcattctgacactgcacgggcacgaatgacacgagtacggcccgacataaaataatatgggtttgggcttagacactacacaaataatatgggcttaaacacagcatgatacagaaagcacgaaaacatgaatttcttagcgtgtacaacacataagcacgacataaaacgcaaattcaaattcataaataattttttgtttagtaattcatctactctttcatttaaaaatatgacacaaacataatttttcatataaagattatgttgaacattttttttttttaaaagagattatgtttagcattatgtacaactttaggtgaaaattaagtatggaccataattatggtgatattaatttgattattaaatatgtaactatagttttttttttttttttttttgtgattttcaaactaattttaactgaataatctatttgtactttaaaatatagaaactaatttgaaaagtacaaaaaaagaaatggcaatttttcataaccccgtttaggcccatttggtaaatatgggtcagccatttcataaaaaataagcttgtctgtttaggcccagcacaggtccaagcctgacccagcctattttataaaataggtcgggctgggctcacataaaaaaataggctttaataaaaacgtatcgggtcgggccgagccacccgaatatatgttgatgtatttagtaaaatgaatttaaaatgttctttatgtattccatttacatttttttaatttaatgctaatattcaatctaaaacagtttactaatcaattaagttctgtgtaactaaaagaacacgtgctttgtatataaaggagtgatccaacatgaataagacaagacagaaatccttgcaacagtggactaaccagaccgtgatctgactgaaccactatattttcttgtgttcgttatttttttcatttgtctgtgtagcctcatttgaatatataccttgttgggaatattttaccattatctaaatttactaacaagtatgttggattaacatcttaaatatgaat

SEQ ID NO: 123270 - DNA, 1060 bp, Cannabis sativa
aaagaaagaaaaaggcagataaaagaaatttttatatatcttaatttagttttatttattttaattaggattggacatctgtatcgagtttgatctgaaccggtccagtttgatcgggcttggccaaactgaaaaattaaaaaaaaaaaaattgttcagtgcaggcgggtcaggttgaacccgatggatcttttaggtgggttttgagtttgattttttagatcattgggtttcgtgttggacttgaacctactcgcaaacctggtaaaggtatttaatttttcatattttacataacacacgatacattacacataactctaaaaaaatgagataattacataaagtattattttttataaaaattttatattttttacgtgagtttttttttttttttacatttttacggtgtactataaaaataacaaaaaaaaagtacagaaaagtaacagaaaaataacattcagacaatatcaaaataatattaaaaaataacatacaaataatgaaaaatcaatcaaaaattaagaagagtataacataaaattacatcaaaatgccgtatttcatgtaaataaaattataaaaatcgcaaaaaatatttaaaaaattaacctaaaaaatccctctcagccacaagcaacccagtcactccaatttctctctctctcctcgatacataacacttatatttagtaatactatataatttttaatttttattttacagtatatactacatttttatttttattttacagtatataaaatttgggttaaagaaagaaaaagcaaattatctgtatttattaacaaactcactagagagtattaattgggataagggagagtactttgggaaggataggattttatatatattgattctgtaaatcaattaatgctcaaacagagtgaagttttagtaagtatccgttaaatatgtgctggcaaaaatatgtgacgtggagtaatttaagtggcgggaaacaaaaagggaaacgctaagtacatttcttctcattaaacttgatggtcacgaattcaaaatccaacc

SEQ ID NO: 123271 - DNA, 764 bp, Cannabis sativa
atattctgttaaaccaagaatgttaaaccaagaaataccgttagataggcacttttaatatataaagatatatatatatctatctattttgattaattactgcttatatttataataaaaaataatatttataaatataatattaattttgatgtaataattaatctaaattgcaggatagaagttaggttttctttttatgtttactttagcttggtgccttaaaaaaaattatgcctctctagctcattttaaatattaaatttgctattgtatatttatgtatgtaagttattttattcgctgcaaaaaatatgtaagcctacttacatttagcaatatataatttcactgtaaaaataataaagaatgaatattataaatgagaatatttttacgacgaacttaacgctgtttgctagtgaattaatatagaattttttttcaagaaaaaaaaaccttatatagtttcacccctaataaaaaaaattggataagtttagattttgcactaataataaagttatcacaattataaaattttagtagtgtcatagtatatattcattttttaattaagtttttatccatctttttcatagtaaaaaatttagcttttataatggtggttttaataattaacgaaaattttcaaaatgttattattaaatataaggctaattagtaatttttcttctcgaactttgacatgtactaaattgtgcacctaaacttttttagccgttaaaaatttctctcgaact

SEQ ID NO: 123272 - DNA, 1031 bp, Cannabis sativa
actttctttcacccacttcatcccagtgaataggtgatctacatatcctttcatataaaagctcataagggaccatcccgattgttgtctggtagcggttattataagagaactctgaagtccattattttgaatagggatctaaagttcacttccaagttttgggtaagtctctaacgagccatgggtacaaatttgaatttcagtacaactttttgtcctcagacagatggttggtctgagaggtcaattcagaatctagaggatatgttgcgagcctgtttaattgattgtgaaggctcttagagtaaatatctgtcactggtagagttttcatacaacaacatctatcaaagtataatatcttttagaatatcctagaggcagtttttttggggcatttggtgttggttttgggcaaaaatgggaccgtcactgttcaagatgacgttgtagatgggtcttatcaattgatggcatatgggtggcctgttagaaataaccgactatatgacgtcaattttttcctaataactgacactgtagttagttatgccatcggttattaagaaaaaaatcgatgcaatattgtctttaattgtcaaagaaaatccatttattttttttagttttaaaacctagtataatttcacaaatttaatttatgtaaattaaatattatttaaattaattttagataactaaaaaaataaattaaccatatacttaagtgtgtttattctaactaaatatattacacaaatattttaaaattagtctaagtgttaacgaattaatatatctaattaaacaaagaaaaataatagataaaaaaataacaagttaacattaaaaaaaataaaagaagaaaaattattatacaattcagcatcattccaagcctttgtgaatcgacgccagcaagtgttctatccactatcgttgtaacagtaataaattagttttgcatcgtatgtcttcttttctccaaactgtaaaaagaagtaagtattagtatatatatatatata

SEQ ID NO: 123273 - DNA, 1162 bp, Cannabis sativa
  modified_base (1130)..(1137): a, c, t, g, unknown or other
gtgtattttaattttgtattttgacttgtcgttgtatatagtctttttgtaaaacttttataacagggatccctaaaacacagtttagtgtcgttatgatgtccatttttttagatttttattttagtgaaggttttaatattatcacgaatttgaatacttaattaacttattagtactaaactagtttataaaatcacacacgtggcgttcttataggataggtagttacaattcttgtactttaaccatatttgtttgggttaagtactaactgcatagttttgcatttattcaatttcttttccagattactaccaatgcttgagtacacattgtacccaaaggaggatgtggacatgggttctatcctcgtggaagaccgtctcattccaaaaaaaaaaattataatttcctgatgctagagaaattagagcacgccttagggtttgagtccataaagggacgtgtctggaatttgatgggcaggaaggaagataaggctagcaccaacatgaaagggttcagcccctaaactagtggcaacatcaatgttagagcccacttcccattccatgaatacattgctaagtttatcacgttctttgaaatagctcccttccagttgcttctgcatgcccactgccttcttgttggttggctcattttttgcaaggatcaaaagatgaaagatcccacctcgcataagtattatattattattggcttgagccatagcctaatacaaaagaaaaatggagggacaacttctacatgatagtgaatcacaaagttactccgtgtccaactagatcctggaaatatcctccaaatctatgcctttactagctttactcctccaatttccctttggagaaatatcccatcttggtcgtggacttccaaaggatatgttggtgtcgcatcaaacttctttcttcttcaaatttcctttcattttaaactctctttcctctaaatcttatttcttgtataggcagtccttataggtgcttattccagactaagatgaccaagttcatgttgatccaactgcaaaagtataccacataccaaccaagagaactaacaatcaaaaatctttcaagtgttggaaatattttaccagnnnnnnnnatttactaacaagtatgttatttaa

SEQ ID NO: 123274 - DNA, 994 bp, Cannabis sativa
aagaacctcagttcaaattagattgaaaaagcaaaagaactgggaatcacagggggaaatccctccccatttgtaaaattacaatcagccaaacatgttctagccaacttggctaagtcatccacaacagtaaagttctcttttagcaaaaacaaaataacatgcagaaaaaaaggaaagcttcattaaaatcaaagaaaaaagggtagaacatttccaatccggagttttttttgaacgaatggcctccaccaaaaccttcgaatcagagataatggtgaaattatcccaatgttgcatctcggcccactgcaaactcagaagaacagcttgcatctcggcatctaacgcggattcccccacaccagaggaaatgccgtgccaccattccatagaagttatatccatggccaccatagcataaccgtactttccgtccttgaaagaaccatccaccataacagacttgttggttcttatcctcggctgggactccccttcatggttgctagaccgacttacattctccccaactataagttgtaattcggcaactctgctggagatttcccctctgatcatgttcacattcggaacataattctcagtatggtgcactttgttcctagtgttccagatgcaatccaaaatcactccaatgcagttgatgaatttggggcgattagaggaatcaaccgagctacagagattgcgaataacctcctgcatattagcgcccaacaccctctcgatcctaataggccagggactagaaaaccataaagccatagcaagactgcatttggtaaaaagatgtaaaggtgactcaggggcattatggcacaaaggacaggagtttgcttccatagaagaaaatttgtcccccgtaggcaatacgttcgaacacaccctccaaagtaacaaactcatcctaggatgtaccttagaattccaaatccattaccaaagatcgtctttttcaccaaacctctct

SEQ ID NO: 123275 - DNA, 6199 bp, Cannabis sativa
gggcataaaacccaacaggtgtttggatcctgccaagttttttccaactcactatctttcaatattccatgaagacatgaaatatccaagttcaaggcccgacaactaaaaatacaagaaacaacaccccagaagtcaacccggttgcctggaaacctatcacccaagttgacatcccaactatggtttggtttctgggaccgtcttaatgcaaatcgatcaaacttgttactggaacatgaattagacatgtcataaacatatttgaggtattaggattaaatacagagtaactttaaaattgagcacccatagcaccaggtgccctaggcacccaacgcccaggttgacatattgtgaacctggggcacttccaatcatcacactgaagaactatcccaagaattttcttcatctccatcaaaaatatggaaacaaggtctttttagggagaaacaaatcgacttagaggctagaacgaggatctagcgcccaagttgacttaggtgctgggcttagctcctaggttaacactttgtcaacttgggccatatccaaggagttttttttataattattttgggtgtattctcaggttttgtaaagtattaagatacaagtgaccctaggaatcaaacgaagccattttgtggccagaaactggacccacattgatacctggtgttgggtagcgcccaggttgatattttgttaacctgggctatttctaatcattttcccaaaaagtgttttgtgtatttttttctatcataaaaataatgaagataaaagtaaacttgaggagaaaatgagaatcccaaaggtaaaaaactgagcccagcgcctaggttgacttggtgctagcctaacagtcaattgacaatcaacctggtacgctggtttttgtcactcaaatgaaaattctactctaggaattgtcttaggcatggtcaaaaattgggtaggagacctcatcctcaattttgaagacattggaagcatcaaaatgacatcctggaagctctaagcactcaacgcataggttgacgtatgaatagtgctctaggttctgcttattcgatttttattttgtctcaagtgttcgtctagttattcatagtaagcaagagctacgagctcaaacaagttaaatttgcaacttcatatttttactttttcaacaaagtgacataagtagcaaatcaggtaatttcgagtctcttgattccacgaaacaacatctctgagaattggtgaacaacttcaccacaactaataaattagctaactggtgttaaaatatcacttaggcatcaaataattcatcaaacaattacaactatacaactcttagatgaactctaccattattgagctaatttttagctttgaaactcacacctagatcaaatccaactatagccacaataatcactcagtattagctcaaacaaactcaaaactactacaggaaacaaatcttaaacataccaagctcagatagaaactacaaaccaaaattacatattcaaacctagcttttcatccagaaaaattgaaagagaagaagtggttagggtttaccttgggtttctgttactatacacctgaaatccttgctgaaatcctcttattttgctctaaaaaggatggaaaactttgattttcctttggattttccttggtccgaagctatagagtaagagaagaagtggtggctttttgtttaatgtttatcctcgaaacccttttgttttattcagttgaaaaactctaaaaaaaacacttattttactagaaaatccactaatcttatcaatgataacttaggtagcaatttactaaaatgcccttttcttagtacttaagaaatttaaatgtctataggtaaaatggtcaaaaactataatccaaacaatatcgacattccaaatatctaactaacctgccccactaatttaagatactctaccgcatccaagtgactctattagccaaatcgttgtattttacaattacgaggcataaaatatgaaaattataaaatttcatatatattatatatattacatctagaattcaaatatatctctgtaattgagaaattagttacctaaggcctatttctaactttaagccctaatttctactaagaaacttataatcacataataataattaaatctcttaattatctattaattctaatgattaaattatgcggtcattataataatataagactattgtataatattttaatggtgctctttttaaaaatgagtataccaatacaccttacattttttatattttttatgtttgaataattataatttatatatatttttttatatgatgtgtagtttaagacaatcggtaagaaatttagaatataaatttagttagtaaaaagtaatgatcaaagttctattttatctgaatataaaataaagaatgattagtaatattgccccttaaactttcatcaatgttgattctgccagctaaaatatacggcttcttaaaaattttccctaaactttaacatttacagaaatttagtctttctgttaggttctgtcccattatttcatttaaatgttaacgtatctttataaattagtaatttttcctcttaaattttgaaaactatcaaatcatacccccacaaaaaaaaaaaaggattcaatatgttttaataactcttcaaaaattaatttagatcttaaaaacatcatttttaacaattaagaaatttaaaaagaaattaaaattttaaaactaattaagcaatttaaaaatatatttatttttctattaaaaatctatttagatataaaaaagtatattaaaagttaaatttttgtaaatctaaagaacaagtttgagtctatttttttcctccgaaaatctagatatatttaagtcaacataatatttttttttcagtttaatttctaacttttttttaaaaaaatatttttatatattttttttttttgaatttttgaattatttttccttattttcttaagatatgagtttataaatataaataaacttgaattttttttcttcaaaaaaaaaaaatattagtttatataaattatttgaaaatatttttttttttgaaaaatttagattttttaaggaaattaaatatatatttttattaatttaatatttttatcaaatttcttaataatttttattgatttttttaaaaattaattataatttttaataaaaggagacaaaattttgaattggacaaagtttagaaggtaaatatgctaatttttaacagtaaaagaaacagaacataagagaagggacataactatgtaactgttatattttagggaaaatttttaacaagctgtatattttagtgagcaaaatcaaatagtgtcgaaagttcaggaaaaaaaatattaattattttaaattaagagatacacatgtaacttgatcttagccagaagatcgagaaatagtgatcacatgcaactcgttaaattttaattttatcatgctaaagtattctaaatgtattgaaaatcactagtgtcgtaaataattactgtattagacatatttttgaagagtagatcataaaatttttctgtaataatatatctaggttaaatggattgctattgcttttatagtttgtgggatctatgcatatagatagccactagagcatagtgtagtatatataggaattttttatggtgaaattttttgaaaataccttatttgtgaggatttattataaaatgggtcttattatattcttttggatataaaaggaggcacatggccactacaatgtgttatagtgtagaaaattagtattaatttatactgtaggtcctacttatttaatattttatttttttatcttaaaaaatcaattgttttattatacaataattaaacgagaagaatacctaagacgtagctttttggaattgtcgttgaatatatgcagattaattttaattttagttgaagagttattaactaaaaaagagaaaaaaaatttgctcagtgttgaaatactaattttcaaatccagaagaaaatttaataatatgaaaaataaaactagaaggaattggtgaaatttttaaacccatttgtttttatactctctataagaaatgagaaatgatgagatccacatgttagcaattaattttttaccttataattttttattcccaatcatttcatcacaaattaaaagttatcattttacatgatctatatatatattttcccactgtgttttctttctttcttattgttgtttataaatacaaattaaaaaaaaaaagattaacactaattttcaagaattatattaaatctctatttttcactaaactatataaaaagaaaaaagaaattattagaacgatgaagatagattaaaaaaacatctatcacgagagaaacagaagaagatagagaagaagagtgagggcttgaggaggaagaaagagataacggagaagggaggaggagagatagattattatattatagtggagtccattgcattgaatgaaattaaataatgaattaataaaaataataattatacaaaattggttaaatgatacactatatgatggacacgtgagagacacttggatcgggagaaaattcaggccacgcggcttgggtcctatagcatttctcaatcaaaaagaagatgtcagaaaatagagctgaataaaaaaaatattttaatcaatcctagtttaaatatattgcattcaagaccacggtattacaatgtatttacccaattagaacaagctattaaatgccctacaaatagggtatttagaaaatttctcacaataaaagagtcctatatatatgagctcattttcataaaagcgaactttaattgtggcatataaagtaattcaaatttaacacatgttaaaaattgtttcaaatttgacataaaatatatataatatgagtcaaattttacaccataataaatataattttttttatttaccttttctgtgacttattaatgtaattaataatttttaacattttatttgtatatttaataaaaaaaattatatattttcaataaaaattgaatgtttttgttgattgtttatatttctatgaaataaaatcatttactcttgatatattggaatattgctgtaaaatttgagctaaatataatattaatttatttttttgagtctaatctagcacaaatcatataccacccattgaagaaacataaaattttttttttctttttttttttaaaaaaaaagaaagactattatattaatttgaataaattacataacagtccttagtggagatggaaattccttcaaccaaaaacaatcagtatccaccgtaagaaaaaacttagctatagagggagcataagtattagcaataaaaatattattgaaaggcaatgaagaaagatcaatccaaattaattaaggatgttgagcaatatcatcaatgttaggtctattaatatatagagtattgttattggatactagtagtgcttagtacctctctacagatgtcattttgtgattgattattgatattctttaaaagttattatataaaactatataggacttgatacttaattagactaatagtaatattgacacataagagaatactaagcattaccggtaacttttagtatttctctaatatataatactacttaattgaatgctattctggttgaagctgaggaggttcgaaaagctcttctccagatgcatccagataaatcacctggtctagatgggtttaatcctggtttctatcaaaaattttggaatattgtccgcaagggcatcattcggttagtccaacacttctttacttttggtgagtttcctgatcatttaaaagaaacaaatactgtggttatcccgaagaagtctaaacctgagagtatgggtgatcttagaccaattgctttatgtaatgtggcctataagattatatccaaggttctagctaatcgcttaaaagttgttctcccaagtgctatttttgaaactcaaagtgcctttttgccaagaagattgataacttgataatattctaatctcctttgaggttatgcattatttgaaaaggaagcaaacggggaaggagg

SEQ ID NO: 123276 - DNA, 889 bp, Cannabis sativa
aaaaaaataaattaaaaatagatattttgagcaaattctatggatactaaatagtgttgttgttgttgttgttgttgttgacacttttttttttggttgagaagatgagaaaattgaaaagtgtttaatgggtttgagggaaattatttgagtgagaagattgtagttattgagggagacatactagtatataggtgtatatatatatgtggaggtatatacactactaatagaagagtagatgtattttttaattaaaaaaattggtaaaagtattaccaagaaaattgttgtaaatctatacctaaatgtacacgtggtgtgtgaataatagaaaagccaaattaaatgctcttttgattactttattgttattgttttaaaaaaattaccacttggcaagctacactagtgcttttgttattagtgttattattttttcttttatatagtttacttgcgttagttagaagatcataaggataatttgaatttgttacttaagagtgggagacaactagattgaatttacttgggtgatatggattaataaagttctagttctttattatagaatagactaaattaatacacaatttctataagttattactattatgttgttttgagcttaacctaagtggtaaatgtaaatgtaatacaacttttttacttagaaagattggagcacatattgtatttataatgggtgatacaaaaatcaattttacaaataatggtgaactttatcttgaatgtatcatattattattggtataatttcactagttactcgtaaactgttaatttataattttaaacatcactaatacttaataataatgcccctatttgattagacatgttacagtgattttttaattactat

SEQ ID NO: 123277 - DNA, 1931 bp, Cannabis sativa
  modified_base (134)..(140): a, c, t, g, unknown or other
atatattttctatgaaaattcaaataattaaatattcagaaaaatctaattagttataacttctttatttaattaaatacagaaaaatacatgtagtttatcttaaatcaatttcattaaactaagtgtgtttnnnnnnnattaatttcaaaataatctgatgataaataaattttatatatttttaaaattaattatgttaccaatcaattttattagattaaactagtgtaattaacctattacaatcatttaaataaggtatgagacttcacagttggggttattcatgtgagggagtgttgggctcagtatgtcgtatccactactaatggcccctaactctcagacaaggcccaaaagagagaaatttaaccttaattaaaaaattattattcattgaataagcccaatagtaattggacctaaataaatactatcaaagtgatattttcagtttagcaacctagtccattttaatcatcaaaattaaatgggctccctatatgtatctaggcccaaagcaaacatataagcacatgtacacactgatttggatggatcctataatgtaactaggtttatacactgaataaagaagattacaaaatttacctgttataaattatttattggacctattgacaatgggagtatggttaaaatcagatcattggatctgtcaacaagttaaccataacaatttagatcaaacaataataagttttataaaacaagtttgagtaaagaataaacaaaacacacatgtaaaaacattggatagttggttaggatgtatttaatttaaaataaataattaattaattaaattcataaatctttaaatacaaaattattttaattttgaaattttttaaataattaatttaaaattaaacttataatttgaaaaataggtttatagcaaacctaaatatctttcaaaattatcaagtaacttttcaaatttatgttatttttaaaatacaaattaaaaaatctaataaaataaaataataaataaatatcatttatctgattttataatttaatttaaataaaaataacaaactttttcaaaaagtgataaatatctggctatgttcaaaattatctagattattttattaaaatatatcatatatatatatatatatattttaaaattttacataaggtcattttatagaaattatttaaataagcaaaacataaaatatctgaccttaattttttttaaaacaagataaaataataaaattttaaaattaaaataaccatttaagcaaaaaaaatgtacatattacccctttttaagttcaaaatctaataatatctaaaattaattaataaaataataattaattttaaattgataattatatttgaaatttaaaaaataaaaatctacacaataatttacacaaaaaatctcaaattaaatccatgaaaaatttgaaaaatgaaaagattgaaaaaaaataaaatagatttggtgcagatggtatgcattgcataccatctgcgtgcgtagatggggggaggtggccgagttttgatgtacagggatgctgcatgcagcatatccgcgctcggaggggaaatcgttcagaaaaaaatgcctcggacagggcatgtctgaacaagtgtgacacccaagtgaatcttggttgtgcgcgcgcgtatgtgggtgatcccacaccccgatttttttaaaaaaatttaaaaaatcataactcatttaaaatcaaaattcagttttgtaaaaaagtgaattgtttaatttttttaaaactatccaagtaaaataactccaaatcatgaatctaattattttatgtaaaaattcgtaaacatcaaacaatcatcaaataaacacatagatcaacatgaatcacatccaaatcacatattcatcgttttaaatccat

SEQ ID NO: 123278 - DNA, 862 bp, Cannabis sativa
  modified_base (818)..(836): a, c, t, g, unknown or other
ataaaataatatgaagaaaaaaaaatttaaaaaatattaagaatactttttaaaaattatttaagtttatattttttttaataataggatgtatttataagtttattttgaactccccttccccttttgataatatgtgttgttggtgaatcaaaatgtatagtttgcaaatgcctgtattctaaaatttggattattttgaagaaatagtgttgtttgtgatatgtgttcttgagagctgcttcaatatcttcatctctgattggttcaaccttaggcagttctacaacaactcataaatggattaatattagctcttggcattaaaaatgtaatgtaactttgaacggctcgaacgtatggagctcgatcaaaacaaatgtctctctctactccaagtcctctttttacactctaattaatgcttgagattgatgttcttattctctccttgattttcttgcactttctcgattaccaaacggagaaaaaaattataatattcgaaggcagagaaaaaaattataatctaacaagtctctaatccttgcagagccactgaatagagatgctttgtgctcaatcaacagtttaaaaattaaaacaatccaaaaagttatactataaggatgaacaaattaaagaaaaagttagatttataaatctactctcactaatcaacattttcagatctagaattctaagacattaaataaagaaaatactaaaagagaaaaatggagtatgtacgataagagttagcgatgactaccgacatgcaaaggatgattgaaggtaggggtgttcatccgatccannnnnnnnnnnnnnnnnnnaacaacatccaatccgcactaagtgc

SEQ ID NO: 123279 - DNA, 2710 bp, Cannabis sativa
tctctctctctctctctctcaggagtcaaaggcacatacatagtttcgttttttattaagtccataactaagtaatgtcattagtatttttttatgacaaacaaacaagaatttcggcaagttattcattatcattaaaaaagatccaaagggttagtgttttttattttggtttaggtatttgattggattagctaggggtataggattgcttcaaggtacaattaatagttaatgtgagctgaagtttggtgaaaacgtgagagactactgtattaggggtatatatgtgtctagtactactaagaaaaagggatgttccttgtgattgggaagagagctagctacaccaaatcaaatattagtattatttttaatacaaaatataaacctaacatagcttcacagcaaattacccatcatagtaatctatattatataatgtgcattataatctttgttgacttgattggaaagaggtatagaatccttttcttcttctcttgtttttgttttatgtatgtatatatgtatataaaagtatgtagcacaactaactgtagtaactaggtaggggcctgtttgttggccgaatacattgaccataaaagtaaaatcaggaattctgatctttcttctcttatatatatatatacaagtgtgattaagttttgcaaatctttgtgacactttgttctctttcttgtgtaaaagatagatttagttagcatagataagctcctataagaaggaaccaaaaaaattagaaacagaggagacaattgggagacccctgcatgaggtttattttgtttgacagaaatcattgaccacctgaagattatcacaatagaacacaaattcctggtagcccatatgcagagctttgtctgctgccaagcacactgctaaagtttctccatagagacaatctgtgacattaactttgtctgaggagagccagagtatagttcctccatgatcacgaaacacagcagcacttgtagaagagtttgctgtggtgttataagaatattgttcctatggatgtatttctaattttctatacagattttgtcctactattttccattctaatttgagatatattatgttaaaaaaatactattattgtagccattagcgaacctaataaaaaaaaaccagcaatatagggaataggttaattaaattgttgttttgttgtttggttagaagtttcgaaattgatcgagattggatgagtgtgaatatattaataggaaaatataaggaaggtgttgatttcttttaggagtttttttgcaaagaatgtggataattctgatttgtacagagtttcatgacgattgttaatcctacaagttttttgaaaagtcacgtaaacatgaataactcttatttatttagtttttattttaattatacttttaatgtaatgattaatgttttttatcttttgttttataatttaagtcagacattttctatggtaacggggagatcaatgcagtacgggatgagtgaaccgaatttgtaaagcctttgattatagattaagtataaggttactacttttgttataatacatgagtaacaagttttatgaatgttatttttatattatgtaagtagtttatagttagtgcttatgatatacatggaatttaagttttaggatcgtttctattaataattttggtattatgtaattagttaatagaattcatcactaattttatataagttttataaacgttattttaacttttttgtattatgtatttactattatataaaattattttaaaattttgataatgcaggtggggaaaattgcatgaaaatttgtaattttcccatacatacatttatgctctattttataactgacgcaataggtgaaaaaaaaaagtatttcagcattttatgtgtcattattgaaccgacgtaacaagtttttcgtgacggtttggaaatgtcacaaacaattttgtgtcatttctaaaccgacgcaatagataaaaaagaagattgcatattttgtgtcggtttttaaatgtagataattgtttttttgcattatttcaaaaacgatgctaataaaatactatttgcgactatggtatagaaaaccgacgtaaattctttaaatgacacttaaaaccgaagggaattatactttttgtagtagtgttgtttgcaatctttacctcaacgactaaagggttgttatgaagaaaaatatcatggctagcatttgctttggtgaatgttattattggttcccctacacgtggtactttaggttttctttcctccacgaccaggattgcatcattttggtcgtattgcaaggctcgagcatacttttctcttgctttgcctgagtcttcaacaaggtgcgagctcccaatgattacataaagatgcttgtccattggtggaggcatcagttggttttggttattatctgcctgggtggctctttgttctttgtcggccttgacattttttttgaagtgtgggttattttttctacttaggaactcaatctcctgcttcaaattgttacattaatttgtgtcatggtcgctgttatacccgaaattcggcgggaggacacgtgtcaagataaagggaatgtgaatcgatgcgatatctttttatggaataactcattaattgcgtaagtctcagagtatatttg

SEQ ID NO: 123280 - DNA, 1373 bp, Cannabis sativa
  modified_base (878)..(879): a, c, t, g, unknown or other
atttagagaagctaatcgagtgactcatagtttagccaatcatgccttgttaactaaagtaagtgctatgtagattaaaatctcgtccccttatgcaagttaagctatttggtttgagttgccattttcttttaatctttctgctaattattgaattccatttccaaataaaaaaaaaaatagttatagaacaactaataagctctactaaaatggtatatcaattgatacttcactaaaaagaaaaatgttatattacttttttaaaaggaaaaattgtatatcttccacttttattgcatattaatacagctgtgtataaacaaataacatgatagctatataaaatgtagtgtattattatttttttatgttttgctaaaatgtaattttaattgtgatgtaaaatgtgtgataaatttgaccaagttaaaaattgtattaattttagcatagaaaataatttaaggtaaattttaactcataaatactatattttttaagtactttttttatcgttcatttatattatttattaatttttttttacccttttttaattattttttattaaaaaaaattaaaaaaaaatctaaataaattttaataaaggatatttttataacttaaaaataatttatttttattccaaagtaaacaccaataatattttttttctatagaaaagagaatatgatatttttttcccaatagttaaaatacaaaatattaatacaataatggtccacatggtaaaaaaaattgtcaacataatgatgctattatgcatttttgtgtttctatattttgatgggtaattttctcataaatcgtaataaagagagaagaattccactcaaaataataataataataannataaataaataaataataaaaaacaaaagagaacatatccaattccatatttggaaatccatatggtttctgatatttaaaagaaaacaaagattgtttttttcggttctattttatttttttcaaattggaagatttttatttattttttaatataataatatacattaattatttatgtaaagctgcttcctttgttgccttttgatttctttacttccaaacttgttgtggagagagagagagaagagagagagagagaaaagaagaagaagacgaagtgctcttgcttcgcggtacttgctttccgcagaaggttctctgtgttttttttttttatatatatataaaggagaaggaaagaaaaaaacttggtgaggaaggagaagaagattacatggaaaataactttgattattattaaataattagaaagaaaaaaaaaaaaatttcattagagggtttcgtgaagaccttttgctcaatcaagcctg

SEQ ID NO: 123281 - DNA, 2094 bp, Cannabis sativa
aaaaaaatgaacagagaataacacatttgaataaaaaaacacataaatatatacaaaatatcagatcaacaaaaaaaaattcaaaaataccttttgaggatgcacagtcacaaaatcatcatcattatcacttctcttcctcttagcttttctagcatcaccagagatagtagcaggaagcttagatgatggctcaccaacatccaaaacaacttctgatttttgattagggggattcaaatttttctgaggaatagatttctgtttagatggtttaataggctttttttggatttcttaggataagaggacaatgaactcgaacgagatcaagtaacaaccattactcaaaaacaaagaagaaacacacaaaaaacaagagaaagaaaaacgaagaagatggcgatgatgagaaggatgaaggagaaaaaatcaaaataaaaaggaaaaaaagagagagtgatagagtgggttaaagagtgaaaactggcacagaaacgtgattgattggagacaactgagggaaacatgtaagcagttatagatgacataagtaaatcgtataaagtgtaaaaatttaaataataaccgtatattggttttaaaaaaatggcaaaaaagaaaactgaaactacactaccatgaaaaagtttaaaaagtaaaaaagaatagcattttatgtaaaaatctcttacacttttagtttgtcatagaattcaatacatgaatttaattattcaaataggatagacaaagattgattggaggctttatgtaaagtttgtaactaatagttttgactgtaagttgtaacaatgtttgtgatcaacataaattcttactaatttcccccaaaaaaattcatgatcatgtatataaaatatgacaatacaacataaatcaaatccaacctacataacaagaacaagtgttggataagacccaacttgtctatgggccacattattcttgcacgtgtatttagttaagtctagttgttagctttggattcttggtttcttgatttgttagtattctattatattagttgagtcctaacatgtaaagctaattagcctatatacaaagacctctcactctattgaaaggaagcaaactgagaatagagagaagagttctcgaaccctagattatagtgagagagagagaaagagagagagagagagaaatagagagagtgcctactgctaatgtgagatgaatcttgaagttgtatagttatatatgtacagaaaatttttcacactattgtttgattgtcttgggttataacttcagactttaatagtaatagtgtaagaatctaaatctagtatttggagtgctagggttttatgccttaaataaaatatattctatgtaatcttcttttttttatcaataaaagaaataaaaatcattcatgactttatcaaatacttggttcacatgtttattttacatgattatatgtttaatatctaaattctattaaattcagaacatgtagtttataatgccctaacttataggaacatcacaagtgtacttttataaatgaacttataatgataagctcagttttaaactataaaaatatgtttaactaaaaatttgatatttaatataataaaattctacttttattttttgtttatcgagttttttgaaaaactaatgattaaatataaaagctaaataaaatacaattcagagagagatatgaagaagacactcagagtttttacgtggttagagtgttaacgagtcttagtccacgagtcaatattattaaatattttgctagaaaagcttaagggattatagtaagtatgagcactctattcttttcttgagcaagtatatcaagaattttccctcccttgcatccaggtttagtgagtattggtcatactaattccccttctccctttaatggggagtttacaaataatatattgactttgggcttattggtgaagcccgacccataaggcaccttgtgtatgttgacgtggaggccttatcacgaagttagttgttcatatcatatcctatgtgttgggttttgtgccctaaataaaaccctttaca

SEQ ID NO: 123282 - DNA, 910 bp, Cannabis sativa
tggaggcttgaagcggggacgttacaggttttatattccgttttttgggggtttcgtggcttaagtagtggtgctttgttattagttgttgggatttttgggttgtattgtgatgtttattttgtttgggtctgagtgctaagggttgctctacttctggttctcgtttgttggaagcctcgagccatgattggagttgcctagaactgtagaggttcgagaaattcctttgcagttctttcaataaaagccctagttcggtcgtggtttctagatttccagtttcttagggaacttgaatttgatactaccttgttggtacgtatcctaaacaatttacattttcatttcaatatagttgttccttctgtcggtactgctgggggaattcttatggcctggaagtctggttttatctttgaagtgtgagggttactttgaaccagatgtctgacactgattactctaacccgaatcacaactcgtgtcttctttcatgcgtgtatggacttctatattttcataagaagaaagagttctggtctgatatgatgaacttgggtgatttttttggaggtccgttgttgatacttgaggacgccaattttgttatgacggacttggatcaggttggtagtaggggtaaggatcaatttgcccggtttatctctaatttggttaatgcctacgatttaattgaactttttgttaaaggagatcttttcacttgggataatcatagagatggtagttaccatatcaaggccctaaattaagggttggctaatgtcaccctggtaaagccaacgtggttgccgatgcctttgactagaaaggggcagagtcagatgaatactgtgaaacaaatctcccaacagttagcaaatgagatgacccaagctaatatcga

SEQ ID NO: 123283 - DNA, 1226 bp, Cannabis sativa
  modified_base (1177)..(1189): a, c, t, g, unknown or other
tttaaataggatttaatagactcagtaacggaaatataatcttatgtgatatatatataaaattaaaaatattaaatatttatgtcacacaaatatttcttgcaataataataataataataattaaaattaaatatataggaaactggattcatgagttttatctaaacctttttcgcaatactagaacaaccttacatttaattagttacagcttttattttatttttattttactattttattatttcttttatggaacaaaatttctaagtagatataactggcctgccattatttgttgatatgggatccgaattctaatatatctgtagggattgcagcatccatctacaagaagctggtgaaagtaaccgaatggttccctatgtacaatatacagtataaacatacacttgtaactataatgttaatgctaattaataattctctctctatatgtattatatagatacatataatatgattaagttttattttatttgaaggaatatatgaaatattttataggaatatttctcgaaaaaaaaaggtattttatagaaataaagaaataatcatgaaaacaaagcaaagtcagactgagatttagcatgtaaaaatgagatttagcatgtaaatatatatatatatattataataatataattaatatatcaagttttaacttgttacaacaaaacaaaagttagaatcatatgaaaaatgcaagataattaaaatgacataaaacgaaattaattaggtttttacatgatgtataattaatattataaactgtttgcaacatatttaagatagctttagtacttaaatatattataaaaaccggaattagatttaaatgatcgcagatgtagataaatataaagaaaaggaaacgaaatgacaaaaacttcagctataaaagtttcagatggctttaaatatacatagaatataattgatcagattaattcaaaatcatgaagtgcttacctagaacagaacaaatagacaaagagagaggcccatgtgggatctattttcacctttcaaacttattcagcagcaataatgatcagatcatgatacagaatcacagataccaaaaccaaagtggcattcgtctgcaaatgcacctgcacctatacacacttctctctctctctctctnnnnnnnnnnnnntctctctctctctctacatatatatataaatattata

SEQ ID NO: 123284 - DNA, 2102 bp, Cannabis sativa
ccaaccaaatcaactaacacattccaaaaatacctaaatcaaaatgcctaaatcaaaacccctaaattacagtacattccacactaacaacccaggacatgcacgggaggagacagagagaaagaaatgcaaactacattcaacacaaaaccagagagagagagagagaaagaaataactcaacaaagaaatgcacactcccttcaacacctcaccgtcgacacctgatacaaaatggaagatattaagtacacgaaaatagaaaaacaccatattcccttgaaaaatgtatttttttttctgtgaataacgaaatgtatgtaaagtagaacggacaaagtgtaaaacccaccgtcgacacccccctgtaacaactccaacaatggcagacttcgagtaatgtacaccacagtgaacaaaatgtacagtatgggtttcaccacctcaaacgaaaatggaaaatggaaaatgaaaaagaaaatggaaatgaaagaactttagttttgccctagcagagacgaaaatggaaatgacaaaatgaaaaataaaaaacaaaataaaaatgaacaatgaaatggaatagtggaggaggacgacggttgataggttgataggatttgattgatggatgctacggttcacttttccatattttataaatttaaatttcaaaaaaagtaaccggtacccatttatttaaccctacatacccctacataaacccctacatgaaccccagcctttggatcaaagtaactgcccatccgacggttacagtacatcacggattacaatccgtgtccgtacagtgacaggacaaaatctagtccctaaaaaatataatatataaaaagtacttatttttatgaatgatttgcttagcatttcttcattctccacttatatttactacataatttatattaatttaagtgatatatagagatatcattatattttaaagaatcaatatatcaatttatctatctatctacctatatatatataaaagaaaagtatgagacagtgacgtgacggtttaaaatcactcaaaataactctatctatcttctccttaattctctcattttaaattaataaaataacattctaaattcactcaaaatactttatgtaatatctaatatttatttttaataattgattaattaacaaaaaaaaacattatatgtacgaaaccgtcaaaactatggtataacactataattcttttttttcaacccaaaaaaaaattattttttaaaactcaaaaaatctcaaccaaatatgatatttatatatatgtaacaaaaaactatttttcaagactctaccaaatttcaaccgaatataatatatataaaggagttttttaatatctataaatttattttttaaaatattaagaaaaaagatcacataaaaaattagactatatatatttgttaatttatttttaatctatttatcactaatctatatttatcactaaaatttctttaatagtattatttgttctctttaatactctcatttttttttttatttttattagcctcataaatattaaataatataaaatatatatctttatttattttttttctttaattctcttatttttttttaatattttattaaagtataaatttattttactaattattcttcaaaaataaactatatatatttgatagtttacctgcatagcttattatatatatagaaagtgatataataatcctaaaccacataatacttcttaataatgatacgtctcagcctctttcttgatcgcttctgtgtttcgttcggttgacttggatgtgagatacggatagagaatctcagcataatccattggaatgcctctgcagttgtacgcccaacacctaacagaacctattttgagtatttcaccatggctgccgacaatatgcagcttcccacagcagaagaaatagttaataatatgtattctatattttttttagtaattaatatgtattctatatattttcttccagtgatattatttttacagattaaccaataattttttttgtaaggagattaacaataaactttgattctcgattcaa

SEQ ID NO: 123285 - DNA, 1308 bp, Cannabis sativa
aggtgacagctcttcgaaaaagaaaggggtaagaggtaaataaaaaggcaaaaatattgagacagaacttttcaaaacactgatggtaaactacacattcaattgcatgaagaaacgggcaccccagtcggtccaaatggaaaaaatttcaacgacatgtgcgaatagatgatccgcatgtccattcccagtaataacttcaaatgagaagatatttctatagctgacatcaacgcattgtgggacagacttgaggtattcagtaatatatatttaaatttataacttcatatatcattcttaaatttctaattaatgtagtaatgtgaatgtgtaattaatttgcaaacaaagtttgtgcttccacaagacaatcgtgcgtttgtggactatggtgagtaggagatgtcaaagggtttgcgtgattggcgggctgattgtaagaaaatatggatccaaaacattacgaaacttggacaagagagggcggacatgtaatatccagaaggagtaactcaagagatgtggagtgattacattacttacggactcagaaaaacaaaaggtacttaataaaattataaattttagtaatactttacgttatagtcaataataaataattaattgtaacacaaatatgttaatttcaggcaaataaaaaataaaaaaaaagtcaggataagatgaaacttcaaggaggttggagatcaaagcctattgtcgcacatattgtcgatagagtaactttatatatttagttttcattgaaaagtcttattttatttatttatttatttttataaaaggacaataattacattttttttttcttaaatataggctaaccctgagataggggaacttccaactgttgttgacacttttcggaagttctaccataaaggcgacacttggcgcaacgaatacacggaaaaagttcatataagtttacattaatattaatttctaaatatttattttagtttgttttatatccatattaaatatttaatttatttgattaataaggaccaaatggttgaattggctgtaaatcaaccagtgcccactgaggatcaacctgatgagactgctcttgatcccacccagtaccctcgagacttgtctgttataacgcaagtactcaatgagcaatctcaacatgtgagaggttttggccatctccagaaactgaagttatgagtacttttctaaatagattcttggatgaagagatcaacatgaagtaactgttagataaattaacaattaacccaagatctatttgtatataacatagaacac

SEQ ID NO: 123286 - DNA, 2549 bp, Cannabis sativa
  modified_base (2508)..(2524): a, c, t, g, unknown or other
aaaaaaaatgtaatatttctaaatcctaattgagagtttaaactggtattttattagagtgaggactaagcatagttgttgctcattggaaatagcctatgtaaatgtgaatatattaattaattctttgctcaactattgagggattgtaggtctatgtttcttgttggtggaaaaacaaaagaaacccataaaaattagattagattataacaatttaattgcatctaattatcatgcattataagtacacatacaattttttttaggaaaacaataactaagtgaaaattataataataaagaataatttttccaacatttttcttttgtattgtgtgtttcttgggccagttgatcaattttaatacattgacttgttttttcaactatttgcatatcttgttatttggtcttaaaagttctttgtcttctaaacactctatggtttatgctcttttattttaataaactttatagtcccttattcaggaaggtcgaacttttacccaaaaaaactaccaaaatatattattgtttcattctctagctttttaatttgttcttttttaatgctcttttttggatttagtctttcttttaattgtgtttgacttgatactagttgtttctcctttcgttctaagttattttggactcgaaatttgtagtttgactgaacttttgtaccaagttttctctatgtgatgtttaattaatttttgctctcttttgaggcatattctatcaaaacacaatatatataatgtatgaagaaaaatttgttaattcctgagttgtcttgtaagagtaccatatcaaaagtgaaatttgtagtgaaactgaatatattaactgaccttcattttgagagtatataagcttttgtgagctttgagtttgaactcttaaacactcaacattagtagagaaagagagatgggaagttgtttagggatattgatatactttggtgaattggaagggaacccacacatatttgtatttatatatgaataagtcacactgatgagtgtgtgatgactgtaaatttcaatttcattaggtaaccattaaagacaaggccatttgtaaagtttagaaactacaattattattattgttattatggctattagcataataatctactctttttgttatattatccttccgatactcggtaaaaatttcccgatccattttctttattttttatgtcttctttctactcaaaatttagaacatatattatttaatgagcttttatctaaattcaaatttaaaatattacttaatatacttcttaaagcgtgataatagtgttctaaactttagggaagcaatttttaataggttacaaaggtaaaaaactgtatgtggatatagtgttcctctcaatcggtgtattatttcgtgactttcttagtgtacataccaccatacatcgtgtatatagaattagtcaatctagcttttattccttaaaaatatatatacaccttgtttttttttttccttttttttttttcttaaattggatgttgttttgttatacataaatatttgtggtattttactttctcatatcattatatgtttataacatgaataattcttctttaattgattattattttcaaagtaatgattgatattttttatcttttgttttacagtttaagttagacgctccttatagtaacgaggagatcaatgcagtacaagatgaatgggtcgaatttgtgaagcctttgattattgattgagtacaaggttaccactttttattatgatacatgagatataagttttatgagtattgctattaactcttctacattatgtaattagtttatagtttgtttttatgatacatggaatataagttttaggattgtttctattaacaattttagtattatgtaattagttaatatatagttagttttatagttatcgatcatagaattgtttactaattataaaaaaatttatataagttttataattattattttaactttttttgtattatgtatttaatgttatataaaacgattctaaaatttcaaaatgtaggtagcaaaattgcataaaaatctgtaatttcccttacttacacttatacttcattttataattgacgcaataagtaaaaaaaaaagtattttcagcaagttatgcgtcatttaagaactgacggtataagttttttgtgtcagttttgaaatgccacaacccttttcgcgtcactttcaaaccgacgccgaatgttataaagatcattttatattttgcgccagtttcaaaatgaagaaatttattttttgcatctcttttgaaacgacgcaaataaaaaactatttgcgtctacggcttatacgtcggttttgtagaccgacgcaaaatctttatgtgtcacttagaaaccgaaaaaaaatactccttttgtattagtgttgagatcatttgatctaagtttaactaggtgatattgaattgaannnnnnnnnnnnnnnnnttattatatcttatccaagttcaat

SEQ ID NO: 123287 - DNA, 2106 bp, Cannabis sativa
  modified_base (1936)..(1938): a, c, t, g, unknown or other
gatctcggtcacttactatattctggggtactccccagtactttactatatgcttaaagaaaagttgagttatctcttctgtcgaacactgcttcgacattggaatgaagattgcatactttgaaaatctatccacgatcaccaagatcgcattcaagtctccagtgtttggcaaacttgtaatgaaatcaagcgagacactcttccatggcttgcttgggaccaataaaggctctaacaaccttggcgtcttgtgcctctccactttgtcttattggcagatgagacagggtcttgtgtagtccaccacatcctttcgcatctatggccaatagtacccatgctttaaaagggcatgtgtcctatgccagccttgatgacccacccacaatgtgtcataacactcacttagtagcctcctcctcagatcgcctgccttcagaataaacaaatggccatatttggtccacaagaggtcatcatttacccaaatctgagttgtctttcctttccttgcaagagccatgatgttctttgcgactgggtccttctctaggttctccttgttgcgttccttgattggtatacccacttggctagctgacatacccgctaacacacctttagacccgccaactctactttacagctaagggcattagctgcctaattcagacgtcctaccttgtgctcgaattctaccaagaattcctgccatcgggcttgcttggtggttagtttcagctgcatgaggaaatgactgacagcagtattgtccgtcttcaccacaaactttgaccccaacaagtaatgcctccacgtccgcaaataatgaataactgctaggagctctttctcttgcgccgtataccacctttctgcatcagaaagcttgtggttctcaaatgccacggggtgaccctcttccatgagtacccctcccaaagcataatctgacgcatccgtctatacttcaaagggcttgcatatatttgacagggctaatacaggatcttcaatcatggcttctttcaaacttcaaaacacttcttcgcacttatcagaccacgcccatataacacccttctctaacaactttgtcaagggggtcgctcttctcgattagccctccaaaaatcatctataataattggctagaccgagaaaagagcattgttgtttcacattggctggggtcatccactcttggatcgcccacaccttctccaaatccatacagatctttctgtgttccaagacatgacccaggaacttgatactttcttgagcaaatgagcacttctcttgcttcacatacaactattctttcctcaactttcgaaacaccatagccaagtgttcccgatgctcttctaatgtggtgctgtaaaccacgatatcatccagatacaccaccacgaacttatctaagtcttcatggaagacttcatacatgagtgtatagaacgtggctggcacatttgtcaacccaaatggcatgacgtaaaaatcaaatgccccataccgagtaacacaagttgtctttggttcatccccttctgcgatctgaacttgatagtagcctgatatcaagtccaacttcttgaagtattttgccccacttagctggtcaaacaaaccaacaatcaaaggaacgaggtatctgctacacacagtcactttattgagggcgcgatagtctatgcatagtcttaaggtcccgtccttcttcttctagaacaacacaggcacaccaaatattgcctttaatgacttgatgaatcctgcctctaacatcaccgttagctgccttttcaactccttaagttttgagggagataattggtatgctactttcgttaggggctttgcacccgacaccagctctatttgatgatcaactcccctcccaggatgttgggttttgtgccctaannnaaacccattttaatataatcagacttactaattaataaagatcaaaaatcgcttttatgttgcatggttcaaatattttatttcatgattgtttaatgtataaattctattaagtccagaacatatgtgtttgttcatgattatagtgtcgtcagcacagtggaatat

SEQ ID NO: 123288 - DNA, 1598 bp, Cannabis sativa
  modified_base (543)..(547): a, c, t, g, unknown or other
  modified_base (713)..(723): a, c, t, g, unknown or other
taaaatccaatttcattgtaatttatctactttcaataaagaccagaaatcatatcttgactttgttatatactttgttcatatgtttatacatgattctatgttttatatataagttctattaaatcttaaacttatagttattcacaattatagtgatgtcatcatagtaaaagtaattgtgattatatgctttaaattatttagtcccataatttatcagtgtgctaaatttgcactcatatgataatcaacgataaggtttacttacctttaaccgagtgaaatgtctcttccaaggcattggtaaagtaaactaagatcggatatattagctatacatcagactagaccaatattaacagtggaaatttttttatacttaccgttatgtcttttctaagtcaatatcacttagttgatcatagatcattgttctcaatcctgagatggttagattctagatcaactgtatttcacgtgttttttgacttgttcatggagcttacaagtaggatttcccaatacttacatcttgggaannnnntagttcaattgagtgagagcgctaatcatagatatagaatctgtagctttcataactatttagaagtaaaatgataaattccttagagcttggcttaactcgataaatgataaagtatttattttggtaattatatcaatttcccaaaatatcatttacaagtagnnnnnnnnnnnaaggataaaatacattgtaggataaaacagtaattttgtccctactcaatgtaaatcatcaattgaggatcaatgattgttgtgattaaaataatggaaaatttataacgcatctacatttggtatacagagcattctatgtaattaagtatgcaattccaaatttatggtataatgaggaggaattaataagatagtaaatttacttgataatttttagatctacttattagaagcttagttatataggcccatagttctcatattgtttgggataatatcatcttgtagacttgactaattaatttaataagtcaattagaattctaaaatagacaatatcttatttgagaattttcaccaagtttaggtagtttttagaagaaaaaagaaatagggatttatttattaattagtaccatttgtgggtgtaattaataaatatatttaaattttatattatttgacaattatttaacaaaattggtatttaaatgattagatgagataagtggtaaaattgaaaaagacactttagtttcattagttgaaataaagttgaaaaagtccaactctgaagcccataacatattcggtcctatgagttagatatcatctcaagtctttattttagtctatctcatctaaactgagccttatatgaatgcctatataaaaaagagaagagaattgaaaaagataatgtcacttcttcttcttctcattatttttcaaaatttcctaagaaataactctatcaaaattgttccaaaggtttgagtatcaacccacactattcaaggtgatactcaagcctttgtggaagactgtgatgaacacatttgaaggaggagaagatccaggttcacttcttg

SEQ ID NO: 123289 - DNA, 1013 bp, Cannabis sativa
ttttatgaaatatggatttaaaatgatatttttatgatttggatgtgttcatgttagtttatgtgcttaattgatgattgaatgtgtacatgaaaaattgagcgagatatgagtttttgaaaattagttgcaaggctggctgagagacccaacttgcacgagcagatcagacacgatttgtctaacaatctcggccaagcacactcagatagccctagtgcgcgcacagacagtccttttggcctcttttgctctgtcatgtccgagttgtgtggcctcacttgcatccaaacttgattttatcatatcttgagttttaaaattatttttaatgattgaaaagctaaaatttattagtttttttatgtagaatttaaattttaatttaaaaacgaaaatatcagaataaaaataatttttatttattttttaaataataaaagtagttcttagatattcaaaggtttacaaatttgaaaattgatttttccacataaattattggacttttttaagttttaaccaaaacaggtaacaatattataaaaatacttctagccgaccaaataaacaaatatactgcccaaataaaaaattacacaaatacaacttacacacaccttcaacccactatccatgctccctaggattgcaaccttcgtctgatgcaaccttcgagcaaccacccagcaacccaacacaaccgaaacaaaattcaaccagaaagagaactaccattaatttcggtgatttcacctaagaagacaatcgaatcagcgactgttttgcattcatggaaaaaaaagtgcaaaaaaactactacgaaactaaaattcaaccagaaatccaatttaattcgtataaaactaatgtcctagcttcaattttcagatccatgaaatgcagatctcaaaaatttaaacttgagttcccaaacaatccaactcaagtataatcgaaaaaaaaattacatcaatactattgtaaaatgtttatcttggtgtatttttgtt

SEQ ID NO: 123290 - DNA, 961 bp, Cannabis sativa
gtggtattttattattggttgttataatattttttaaaaattattttttaagttatataaaattgatatttaattatgctaaaaataatgttaagtaccaataatattttttagcaattcttcctaaaaaggggaattattctatatactatttttaattttttttttttttcaaatttacagtttggtttttaaaatagttgcagcactagttgcaatagaaatttttatacgattttttattacaatttaggttgcagcgctaattgctataggaatttctaagaatttcaaaaaaaaaaaaaaaaaaaactgtttaaaagtataaaaataaaaaaactcaaaaaaaaaataatattttcttatttcttactaatggaggatttctttgcatagctgtaaataataattattttttgtgttcaatctattttatatgattgacaaatgagatatactttctcctctcaattcagtactttatattttttcttcccaatattgtaaatttaatcaaggtaatcaactagtgaatttcttgaaagagaagttggactctcgttgctttgctaaaataccacaaacaatattaaatcatactaatcatctaaacaaactggtagacttgaaaagaaaaaaaatgtgtcaagagagttagttggattcttctgtgttgcattagatggagaaagcgaaaaggttagagtacatgtaccaaagtacataccttttagaaccagaagaacaatgaaaatcacataaaaacgatatcttccttttgaatggtatacatgtgatgaaaaataaaccacaaaaaaataatcctatataagataccttattataactaaataagttactactagtacttgattaaaaatgaaaggctaataaaatgtcttgtgagaaaaaataatattctcacttaacgaatattttatatctttatacattaaaagtg

SEQ ID NO: 123291 - DNA, 790 bp, Cannabis sativa
taaaatgatttcaatggagtcttttccgtttcccaataggtatctggtcattataactggaactcatagacaacacagtagtagaattattaaggctagaactagaagtaccaccttacgataataacaaagccacaagaagatgagacacagaaatttgagaaataaaaaaatattggaagaaaaccagattcgaaagagtgaacccaattcaaagaaacgaaaaatccattagttaaacacatacaagacaagagaaatatgtaccaaaaaaacgcacctgaaggttttggctttgtttggcaaaaacccaaatcgcaattgttttgtttggcttttctggtgtgagcccctaaagacggtaacgaaatcgaagaagacaaagatgtggttccgcctctggcgttgactgagcaaggcagggctgaggctctgtgattccgtcgtcgagttgactcgtccgtcctcagatttagggatttacgatttacagatttacgatttaggtttgtattaggaatttaggtttttttttaatatttgaaatcgggccgggccggacccgaaataatatataccgggccgggccgggctgagagcccgataaaagccctaatactttgggttaaagtcgacccgccgggccgggggcctggcccgaccctcgaaaatggccttaatttccattcctaattgttcatcattcagggaatgatacgaattgaattcaattacttttaaagattgttcgtattctataaattaatcatgttattatacattgttatta

SEQ ID NO: 123292 - DNA, 1370 bp, Cannabis sativa
attgaaccatatctttctattagctgaagccattgcttcttcataggaaactggttcctcactgtccaagcttaaaatgctgagagcatgaaagaccatatttgcatatccaaatctgtctagaggtctgatggcccttctttttctgtctctaaccaactgatactcttgagtgtcacttgagtgtcatgctcttgctcatctggttcagaaacagtttcatcttcatgtacctcaggttcttcttcttattcctcaatttgttctctaatctaatcttgttctgctggctccacctcaaactaaacttttggatatggttgcttttgtattctgatctcttgtgttttgaagagatccttgtacacaacttcttcatcaaacatgtgatagtgtgagtgcaatgtgttccaacaaaaattttgtgataaattcagcttcagtatttatggctcaagaactataatagttctggtcaaagctagcatattaacattaagtattagccataaataagtgtgagtggtcattaagcacacaacactaaattgaatgattgcagttgcaaaataaattcaagaatcataaaataaacatgggattcagtttttgttgtacaactaaaattatttaatgaaactattatttcgatattttgccatatttatgtgcaccttaatttcatatgagaaaattatcttcataggaccagaataagcatatatatgatttatttgcttaaatatattgtcacattaagtacatgttatataataaatatatcgtaatacataaaaagtaatactcatcatataatgaggacctattgccatgattcatatgtttactatttaataaggataattgttggacttaaatagtaaatttaaatgttatccaagttggagaatatattagaatattttatattcagtaagtcaaatttcaaatttgatgtgatttataaaatatgtaattatttatttgataagtaatttaaaatattctatttgtgattaaattttgtattacctaatattctattacacaattttatttttttgaagtaattgtcaaaatattttaacaattattgtggcacaaatactaatggatatctcacctataaatgaagggtaccaatgtctaagctcactacatattttgtgaaaaataataattttgtctaaaagagttagagagggcttggaagtccgaataccaacactaatgttaattttggttttcatttgtagatccaaagcttgtgggatcgaagctcaaaaaattaacagttgaaagtatttcggtccaatcttcatgtacgttcgatttacagttttattccacattttacattgatcatatat

SEQ ID NO: 123293 - DNA, 1370 bp, Cannabis sativa
  modified_base (1309)..(1333): a, c, t, g, unknown or other
taggcgtaggccatcttcaaaccagtctgtgcagaaaaaggcattaaaacccgaactagttaaagaggaatgaaagggaaatgttggaaaggacttactcgcgaaagctcctttagaactcctcctaagaccaactctaaggacaagtcattgtccgccccagttagctgtttgttcacctctgggatcaaccagctcatatagtggtttagcatatctttgcctctcttggtctccatgcacaataccaaaggtggagcaggagccttaacttgtttaaaaattaggtgtatttttacagtgattttgatgataaaatttttaggagaatggaaaaagttacattctcctcagctgtttttttttttcaaaaaaagaaatttaggtgtattttgttccctttgaattaaaataattttttttttttagaaaccggatggtgcaagtacgccaacacgtgtaactatgttaaaaatttattatgcaaagaaaaaaatggcattagaagtgagaagacaaaagaggctatggtatgatgcaattattttaaagtaatgtattatgtcttgttggctactttaatttattcttaattgacatgtctttttaaattcatgatagctacaattacaagaaaaagaaaaactgaatgaagatgcgtcaatataaaagactatgaataatactttctctgaagtcatgggcagagaaaaacatgggtcaatacaaatgtatggatttggagtctgtccatcagatgtgtggaaagataaatcaacttggaaaagaaaccaaaataaatatgtagatgctctggaggcaaaagtagatgatttagaatctgaagttcaaaatctaagaactattttggacaaccaaaacaatggcaatgtcgtaccttcacttcaggtcaaagttaaatgactaatttttttcttcaataattttaaatattaacccgtaagatgtattaaaatttatttatttataggtccatgctatacatcatagtgacaaagctacatcttcacatctggttaagttcttcttcttattattattattatattaatttttaatttactataacagatcaactatatactgaatttgctaatttattgtatatttgcaggacacaaaggttagtaccgcacttacaaaagaaactagaagtcaatggttctcatcttcacaatatgatactccaattattgaggtaaatggtattacatactattatatccatgttggaatttattttaccaggatcttagatctacgcacaagtatgttgtttaaacacccnnnnnnnnnnnnnnnnnnnnnnnnnaaataaacacatataaagttatgaaaaccttacattg

SEQ ID NO: 123294 - DNA, 3028 bp, Cannabis sativa
  modified_base (1362)..(1362): a, c, t, g, unknown or other
tgtttcccccatttcatcacgagaaattcatctataaataccgtgcaaaaagaccccaaattcctcactgcttaccaaaaattctttctcattctatctgtgtaccccttctttcatctatttaccaaacagaaaaaattaagatgaagaacacgtcctttgtaacagtgtgtgcggtggcgatggtagccgcagcagtgctgttgtcggaagcgccgagtgcagaggcagtgacgtgcagcccactgcagatgagctcatgcctgtcggccatcactagtggatctccgccgtcgagtcaatgctgcgccaagctcaaggaacagaagccttgcctctgtgggtatctcaaggaccctaatcttcgccagtatgtcaactctcctaatgctagaaatgttgctgccaagtgtggtgtttccttacccaaatgttgatccactactagtcgtgaacatcatcccttccatattattattataaataagacacttgttcactcctcttcaatactgcttacggaaaataaaatatatattatttgtgtttgagtattttatatcataaacaatattaattatatatagcaatcctttcatttgaatatgatgggtttaacaattaatatatgtagtattgtattgcaggttcttaattatatataaaagagtacctttttattagctttcaattatataaatatatatatatatatttgtttctgttagatgtttttagtgtgatatattatgaatgttttaaatagcagtagtatagtggtgaattaggtatcgatacatacacacgcgtaaaccctttattatctaactaataccactacaacacgagtaaattcaactgaccactcatttcactctattaaagtaattaatatttttttattatttattttaaatctgattttcagtcaattatgaattttattccactcgatcttttgggtcagtttttcaactacttagcattagaaaaaaagtggatttctcaaaaagatgggttctctttatattacgactatttataaaagtataggaaaaaatggtgtaaatatcattttgaatcttgtaaaaatgattgattatatattttgttttgttaaataacaaaatagatattgtatttttgaaaatagtaaaaataggacttgagtttaattttttataatttttttttaatataactaacttgaagataatttttaacacgtacaaatacaaaaaatgtaaatagttttgtcataacacatttagatcaaattattattaaattttattttaataaaaaaatcagttcaaggtcctatttgtattattttggaaaatataagatctattttatcanttaacaaaacagagagtccaattggttatttttgcaaaacacaggatccaaaattgtatttacaaaaaaaaagtgagatggaaaataatctaagaaggtggcgtttggttgaaggtaattaaatggaatggaaaggaaaggaaacaatctctattcctttgtttggttggttgcatattaaagtgttggaatatcattccaatggaatgacctttccaccactttggtggaatgacaattccattttgaaatggaaagaaagaccattccaatacattatgagaaaaattttaataatttttttatcattttttttgatgtatttttaaattttattctattcctatttccattcccattcctatatttttattcctcctaaccaaacgccacctaagttagtaaatgttttttaaaaaaattaagaaaatgatcaatataataaattagaaaataaattgcgttttgcatgcgattttattttattttagagataattacataaggtatcattttttgtaaaaaaaaaagtacatttttccgtttaaataattttttttatacttttccgttttttatagaaacaacacaataacaataagaaaactacataaaagtaacatgaaaataaaatcaatctaaataaaaataacatcaaaacaataacaaaaaagaacatatagataacaaaaaatcaacaacaaattaaagagtacaacataaaaaaaatatcgtattttctataaataaaatcaaaaaaatatcaaaaaaatcataaaaatatttgaaatcgtatttttgtaatttttttattatttttatatatttgtgaaataatccctttattttacttactgataattaattcattaaactatatcaaatttcaatttttttgtatgtttataatttttttttgaataacatgagtaaattcttctaaactttcttcttttactcttaagaacccaaaaaacataaattaattttttatatgttttatattttttttttaataacataagtaaattcttctaaatttttatttttttacttttgataatccaaaaaaaatattaatattgtacgattagtttttaaaatatattttgtttggataaattaaattggaataataaataaaataattgataaatgtataaggcttatgatttcaaaactattgtatgtaataattgtatctcacttgcagttgtcactatattcaaagttgttgtcattaccgtatttcttaataggtttgctttgtgtataaaacaaatcaaaaaatgaattcactacttacttttatacataagtgaatccatatagttttttttaaaaagacatataccaaataaaattcattaattaataatgtgaaaataaataaaattgtatctgatcaaatttaaattcaaatggtatggtttagatatttttaattaacttatttaattctaatttttttataatcatttaatcaaaaagatacctttaaattttatattaaataaaaggttagaaattaaaaaattctcacataaaatagaaataaaaaattattaaaaaaaataacaaaatatcagtcatcaactcataattattgttgaccgaggtttttggcaaccaattaaatgacataatgatgagagctttgggataa

SEQ ID NO: 123295 - DNA, 1306 bp, Cannabis sativa
tggattttcaagaagaagagaaatcctaaagggaaggtagagaattttaaagctaggcttgtagccaaaggctacacgcagcgagaatgcatcgactacaacgtaaccttctctcctgtgacaattctcaaatccatttgtattcttctttctatagctagcaattatggctatgagatatgaaaaatggacgtcaagcctgcttttctaaatgacaatcttgataaaattatttatatgaaacaaccagaagggtatgtgttaccaagggaagatcaaaaggtgtgcaagttgcttaaatctatttagagattgaagcaagcctctagatcatgaattatcacctttaatctttaattgcaagcaaaagaagagactcgcatcattgaatattttaatcagtggtattccatcttttgcttagtactgtatttgcagtgttgttcttgtatttttgcaccccaatgaagtaagtagtatctgtaatagctcttcatacttgtaatctttttgtatgaattctccactagcctcataattgacataattatgttcttcttcccatcgtccattgctctttaacagaactggtatagattccataacatgtaatttttcacagtatttcattaactcgatcttttttttttcaattaaaacaacagtaaactaatactaaaaaaatataacatgaaaattgtttttctattgtcctttttatgatttggctgattcccctaattagcaataaatttatggttataagccaagaacgactgtagaacaaccttaaattttgtaatgtacattattaatcatttctcacgactgatctatatgaatatttttttttcttttttaaatggcatatataattatacattttcagattatactctttttaattttttaaattctaaatctagttttgggtgtattttttttattttttttaaaattaaaatactgtaggtttaggtgtatttacctcttttgtttcctttgaatctagcttaaatgtagttgttgggtcttaatttgtcgtcaatttactctttttcgagttcgccataatttttaggtattttcctggtgtttttaaggttccggtattgctctgtccatctacaacgaagaaggaggcgtcattgtccttttttactgttcacagtataaaagaaaaaaaaataggccagaaaagtataaaagttatttttaccgtgtgacagtatttctaaagattaggccaaaagtcagtatttttgtaagttttccaataaataaatggattatttcacaaaaacat

SEQ ID NO: 123296 - DNA, 751 bp, Cannabis sativa
aaaaactattataaaactccttacgagtaagcttatagttgtaactagggcgtcatatttacacttgaaaattcactcacccgataaactcactcaacttgaaacaaaaaaaaaaaaaaaattaaataattataggctgaggtcaggttacacccagtaattatccattaggccaagttcaagtttcattaatttaacactaaaaaaaaactaagttatacttgaacccacccaaaacccaagtttcattattttcgtctttgtcttttatttatttattttttttatgaaaaagtatataaaaaagtaatattttaaaacaaaagtcaatctattgtaaacctaacccaactcgcaccagggccggccctgatgaaagtatatgggcccaagaccaaataaattttagggtcctaaaaaatatataaaaaaaaaaatcagaagaaaagtgttatgagatttgaacccatgaccttggacattatgtcatccacctcaatcaactaagttaggaatatttgttacttataatacacttaaattttacttaaataaaaacctaataaatttttttatttttttattttggactcccgaaaagtgtgggccctaggcatgggcctaacctacctatgcctagtgccggccctgctcgcacccaaaaccccgaaatacaatcacaaaaatatgcaagtttagtatactaattctaggggtaagttgaaaaatacctcttttattaatcaattaa

SEQ ID NO: 123297 - DNA, 1701 bp, Cannabis sativa
gtggtttcccgctttcgtaaatttataatttttggccacgcgtcacgaggaatttaagtttacgcgctccttttcgaaatccgggctttcaaatctaagaaaaaaatctaggggtgtggtagtggtggtcacggactcctatgagagtgtgtgaaaacgtaagtggattttaataaattatttttaaaaattatatttgaaagtaattagtgaaagtttttatgttttatcctaaaatgtcaaaagcgcgtattattacctcataatctcatagtaatatacagctggaattaatttatttagctgaaaatataattagtgtaattcctatttagactaattaatttttttttttaggcttttatgtttattctggaatctttttctttctcttattttaataccttttttgttttcggtggagtgtgaattgtgctgtatgaattattagtatggtaagaatattaaagtaaatttgttctagaagctttcttttttggcttaattttgaatcttttttggcaatcatcaattagagtcgttactaattgtgtaaagacattattatggtactgttactaatgataatgataaaataataataatcacctctacaataagttataattatttatatattcataatttttttttctctttttcccttaagaatgttaggaaagaactgccaaacgggttaaatacgataacgtaatttaaaatcatgacaaaattaacgagtttgagtttgtcttaaataaatttggatcatccctcttatccgtttactatacggatcatgtttgagttcaagtaccacgaaactaactcatatattaatgacttacttaaagtaacattaggactttaagagattataaataggttaatataaacgtattgattataccataaaagtattacacaagtaattaatagattaataagttgacttgtttaaacaatatacatttataaataaattaagtcgaagcaggttcgctgataaatatgttgtatttaggtcaagcatatatacctattataaattgatacatactaatatatttaaccattaaagaaactcactatcatttttctaatatttttttttttcaggagttgaacgcctaccctgggctctacgtgggtccatttttggggacatgcaaagccggcccaagcatatggcagcttgggccattacacaatatcctttataataaaagtctcattttttttatcatcaattttgtatacataattttttttataacctttgacattctcggttcgtgggtggcactcggtggttggggaattccattggtggtgcgaggtggttgggctacttggcactcggtgttgaaattggtggtggtttggtgtcgtttcaatttagggaagaaggagaagagagagaaaagagtgaagagacatgagtggaggggtttcaaaatggagagagcatttttggaataagggaaagttgacctattcccccaatatcggtacacataggtttagggaattaatttactcctaatgtatgcatagataatcaaatctccctttttgagatgtaatctcatgcttcttaaaccacattttaccaaattttaacatggtatcagagccgtttgtgatctattgtgagcttaaagtgttgtcggtccgaaaagacgagccaaaactaaaaat

SEQ ID NO: 123298 - DNA, 954 bp, Cannabis sativa
gtaaaataatttccaacatggcaggccccagcctctaagggaggaccctctataggcgcctccaactgaaggaagagtccttgagggcaccccctaagaacaacaaccgagtttttcccccggtactatgcaggatagacgagaccaggaattggcaagccccgcgtggacgtgggagaagatctcgagttagccaaacttaaagaggtcgtctgccaaacaggcttaattgaagaaccacatgctgctgactgcaatgtattcactcagcagagacgtgaattccttgaagaaccacatgctagtgactctgatgtatgccctcagtagagacgtgaattccttaaagaaccacgcattgttggttacgatgtgcttgctaagtagagacacgaactcctgagatgaatggatgaccaagagtacatccttcgatcttaccaagtagagttaaattatcacaatagagaggccagtgatatgataaggcggttcaaccagagaaccaatcgaagtggccaggatctcatcagaaatccacttcaaggaagacttgctaatagatcaaggaaggtctatcaatatgctgagcaacccagatcctcaggaactaggacatatcttctcttgcaagaggaaggacagatctttcctcaaaggtcaaacatcaaaaactgtcagatctcggcaactagcgacatgggggaccggccagggatttcaagctcaacaacaggccccactatccatcctgtggccaactaaccacctctaggagtccccatggctggccaaactcttctagaagtccgtatggccggccaggcgtacaggcaagtaccaccaactctgcccaaaccttagatggcaggatacttaggggtcgtcattgatggaccccatattgcaagcgagaccaacaaagccagagagcactatgctcggacactccgt

SEQ ID NO: 123299 - DNA, 647 bp, Cannabis sativa
  modified_base (66)..(70): a, c, t, g, unknown or other
tattttaagcccaatctcatataacctagccctaagtgaagcctgttggattttatgccctaaatnnnnntccatttcaatgtaatctttattattaaaatataaccaaccaaagcttcgaaactaagacgaatcaaaaacacgaaatttttggggaacccggcagcaaattcagttaatcgatttacaccagaaaacccaaacaatttgaaaacctaaccaattcgaatccaatctataccaaaccttgcatacctgcatattatacccgaatagacatatcccaagtaatagaataacatagcatgctctaaaacaaaaatcaccattaaacagccaagcttgagttctaaaactcaaagcttgttcaaacctaacaacagcccataaaaccagcacaaatcaacatatctaaacataattcaaactcagaaaacagcactaactaacagcagcagctactgaactcaaaaacacaaatcatgcaaaacgaactcttacttatagtttaagaaactaaagagggtgaagccaagaacttacctagagcgtgagatcacttaatccttggtgtaaaatacttgaattgatgaaaagaaaacatcaaaaccctagctgcctagggattttgagagagagagagagag

SEQ ID NO: 123300 - DNA, 1234 bp, Cannabis sativa
aattaattttattatataaaataacttaaagtaaaaagtttataatttaatgctattactaaatatatactactaaaataattaaaattgcacatatgtaaataaaaaagtagtgatgcaaaatacataatatgtgtcaaatgttatgtattattattgaattatatttttttacttaataaactatattttaactttatatctattgataattttatgacacatttatcaaaaatatttgaaaattttatattataaaaactctatttgtgtgtactctaattgagtgtagtacatacatagtaaattttatataatagattatgtgtacatttgatgaatgagcaaagcgttacctcctaattgtgcaataaaaataataattaaatcaatttattaaataatataagtaatacatatatatatagctaggaagccatttcccagacaatttcacaattctttcaacatgttctcttctctctttacgcaaagaaaagaaaaaaggcgtagcagctttgaatcacaaagaatataccaattgatatttgatagggaaaatcaaatattggcaccaataatttatgtcatactgttttcggtattgggtactgatattaattaattaaattcaacacatgattctcacctattaagtcgcaattcctgtaaatgctttatacacatacatctattctttaagcatcaaagattatgactcttcaaactttatcttgtcccaaatatttgtttgattcaccaatcaccactaaaataaaactaccttttatatatgtgtatattaatttcctcttatattatatataagctaattgcattaaagtcatgcaattgtataatatgcaagcaaagcaatatatcattttcatatcaatttaaaagtgccttcttatattaagcatccctatcactatcactttttagaagtgacactttataattaattaacgatatttttaaaatattatttttcaagttatataaaactaatactattaattataagcttgttcggtaactattttgttttttgtttttctttattcaccttaacactacctatattaataagaatataatcagggacggactcaagtgtatagcccccactagtaaaaatattgcctttaaaaaaattaaatgtaattttttaaatttgataattatagatcaaaatcgtaaaaaaaaatccccataaaattaaataaatcta

SEQ ID NO: 123301 - DNA, 1020 bp, Cannabis sativa
  modified_base (81)..(95): a, c, t, g, unknown or other
  modified_base (461)..(474): a, c, t, g, unknown or other
ttttttgcattattttttagcgcctttttgttttaaaatattttaatgataagcaactctaaaaattattaaaataatatnnnnnnnnnnnnnnntatatattaaataattaaattttcactttaattaagacaaaataattaattaaaaaaaaataaaaaagaaaagatattaaaaatgtcattgtatgacattctgttttatgttagcatttattaaaaatgtcaaaaatatattcatataattaagtatttttaaaaatattttcgttgggcatactttcacctactacgtaacttatttcacgataaggttgaataaacaaaataatgaaaaaaattatattattgtaaaaattatattttgttaaataaatttataaaaatactggaatttaagcaccagtaaaacacagaacaaaacaactcaaaacaacagtagaaaaactataaaacaccagnnnnnnnnnnnnnnaaacttaacacagtatactgcaatatgaaacttataaaaaatacagtaaaaaagtaaaaaataacgtttagcaatatttttataaaataataacaaaaattagtatagtatataaatttcgcaatattattaagactcttatactataagatataactttggtacctcgcgtaaaaagttaagattaccaaaatactaattattaaaaaaaaaaaaaaaaactaaatgatatagtgatcatgtcacatgttggtgactcatgctgtactatagactcatagaggtcatcagaacagtgacacggagacagctcaataattgtagatgaatctgaatcattgattttcaggatttttttttaatatttatattttccagtcattgttgattgcatttttccaaacaaaccgataatagatggtctccatgctataattcggcccatgatcgatattacggcccaatggtaaaaatgagctccgagcctcctacccaaatcttgatatatcttcttatcttctttttttttttttctacactgtatat

SEQ ID NO: 123302 - DNA, 737 bp, Cannabis sativa
aaccaggctcggtcctgagcataagtgggcaggaacttaaaaaaaaaaattatacttttttattaattttaaaaaatatcacattttttttaaaataaagattcaaaaatttattattttttatgatttattatattttaggatcggccctgcatacaaccaatgttaggattcttaagctaattactgtttttatgttttttttaacagttgtggtgctagagctatgaagaacaagttttgaagatgatttgcatcaacttttgagaaattgtaatataaaattcttgaagatttttgttattaattagtttttgtttttttaactcttttttttagaggttacagaggatttgaatgtaaactttaatgtaaggatttcatgtgtacctcctgcacagttaattaacttcaacatcaatgagctatttaataaaaaaataataataataattgcattttgtgaattctaaaatgtgattatgttacttagtgtgtgaaaggaacaaaaataaagaatgtttgagctttcaaattatgagttgggaaaagtatttaatataaaatttatggcaattcaataaacacaaataagaacaatttttaggcctcgaatgaatgttaaagtgccacgttttctttttaggaatatgaaatatgaatgaacttttattcaattattaaaaatggaccacaattttataggcaagaaattaataaggtgtttttatatttta

SEQ ID NO: 123303 - DNA, 1287 bp, Cannabis sativa
tcctgagaaactggatgcatatcattcttttatacagcaaaaaacaaaccaaaacttgttgaagaatggagacttgaactttgttgaatttcactgctacttgagagctcaaagaagacagaacagaatactttctattgctgctgatgatggaaccaagatttatgatcctaaggaacttactgccactttcctcgaataatatcagagattacttggaaacaagatggttgacagaaagagggttattaatagaatcatcaacactggcctgactgttacataagagcaaactaatatttcggttgctgatttttcttttgcagatttgaggcagcaattttttcaattcctggaaataaagctcctggcccagatgggtacaatagctttttcttctaggacagttgggacctcattggaaaagacatttgtgatgcaattatttctttttttgcattcagggcaactactcaaagagttcaagtcaactattttgactttgattcctaaatcaatgtgcccaaacacagtttaagaatactgtcccataacttgctccaatgttgtttacaaagcagccacaaaaatgattttgttcgagactcaagcttgtgctccccagcttgattgctcaaaatcaaggggtctttgtgcaaggaaggttcattggctacaacattattatttgccaagatctcatccgtcactatggaaggaactctactaaagctaattgtatgatcaaattagatctacaaaaagcttatgacacaattgaatgggacttcattgaggaaattcttgtggccttcaagttcccaagtaaatttatgagtatgataatgaattgtgttcacactcctaaattctcgttgatgttcaatggttcattacatggattttttgaggaaaaaagaggcttgagataggggtgacccaatctccctccttctatttgtattgggcattgaatacttatccagaattatgaggaaggtgggacacaagtagggtttcaggtttcatgagagatgtggtgattgaaaatttgaatcacccaagattttctcatgatgttcttctattttccaatggagactataaaagcattctctacatgttacaaggcctcaagttatttcactttcttcagatttatttcctaaccctgctaaaactgcattctattgtagtaacatggcagatttagaggtgcaaagaatcctagatgcctcagatttcagaagcaggacttgcctttcaaatatcttggtgttcccatat

SEQ ID NO: 123304 - DNA, 1223 bp, Cannabis sativa
ctttaaaatttgattggattgtacggcccatacaatattatatttttctaaaaaaaaaccaaaaaattgatgcgtagaagggtatatagctacacaaaaggattttgtggaatagaacttctcaagaaatatctaaagagtataatgtatgtacctgccaagagtatataatactcaaagcaatctgagtatgaatacaatagaacagatgatttgtaatgagctatatttttttacaaataataataatgattttctacagaaaccaatgacagcctaccaacacaattaatattttatattattttattcattactaaaagggatttatgggtcctaactcttgagtacttgaatacttaactatcaacttcaatctgatccccccccaaaaaaaaatctatcaacttcaatcttgttcaattcttgttcaggactacaaaagaagagaggcaattgaatattataaaattttataataacaaaaacaagaactttttttgtcttttcatttgaacaaagagtcaacttaataatctttaccccatcatttcatatattgcgtacaacatattacctaattctaataaacaaataaaagtaatggggtagccaatgattagttaattaattgcatttaatacaataattatagttatttaggatcaaatgacttaggagtgtacctcggccagtttgatcagtttatggtacattttattcaacacaatataaaaattgggttacgaaaacttaactgtaacttgctcgattaaaaaaaaaaaagaaattagtaacttgcctaataaattggtcggtttggtcggccaattgacccgcccaaaccaaacatttatgttatttttttcacattcaattgttatattctatttaattatgataatgcgactaatatatatatatatatattaatatatattgaattcaaagttcaaatcgatcattattaaaaaaaaaatatagtagttcaaaataaacgacaaatttgtccatgctggagcttgccttctcattcatccatgtcaatctattccaaaatagacacaagttatttttggaatctgcacaaatcttttgatttcagcaatatctggtagttgcaaaattgttagggatgttgtacatctcccaagcagtgaattctacctaggcttccccccgtaagtacgggtgtgcgtaaatcattcaatccaatgacaatc

SEQ ID NO: 123305 - DNA, 813 bp, Cannabis sativa
aattattttaagaaaataattatataattaaattaattattctaatctaaataaaaaagaaagttttacctattggtaatctgcgtgaaagaagaatgtaatagttacaataaaaatgtaatcattgagtagttatataaaccttggttttctgttttttcttaaaggaaaataattattttattacaggcgtttttgtgtcataaaccacatactaatcttaatctaatcaactactcaaatataagcatattttatttaacaatccacaaaagatgagaacagtccaccaaattttcctttttaattaaccattttccctaacaaaaaatggtacaaaagcatgtgatagtgtagtttgataaagaaatagctaactggttttggttgttttctctttcatggttggcaaagacgaacatggcccataagaagttaatgaatttggtcattgtagctttaaaatagtcaaaatcatgaaatgatcactcttctttaatatgtttcatagaaatacatgtgtgtattaaatcatgtgtttgattactttggttttggttattcctgaaaaatgatgaagagtaaaaggttaccatattccatattaaagtccatataataaaaacaaaaaattgaccaatgcaaattgaccctaaaccctaaacaaccgtataattagttttattgttttaactagggaactaagccgtgctttcgtgcggtgttgttcaacttttttaattattacatataccatatacagatatatattttgtacttatattgagtgatataatctaaaatataacaatt

SEQ ID NO: 123306 - DNA, 970 bp, Cannabis sativa
  modified_base (374)..(375): a, c, t, g, unknown or other
aagtatggcaaaaaagaatatactagaagacatgggagaatcacagaaggaggctacaaagatcttttgcgattgcaaattggctatagcaatggcaaagaatctcatatttcaaagctggacaaagcatataagcattaagtaccactttatcagggaagcaaaaacaaacaataaaatagagcttaagcactgcaaggctgaagactagttagcagatatatttactaataaagcactaccaagaggcaagtttcaattattgtgagacatgatcggagttatcaaaatgtgtactaaggaggagtgatgaaaagtgctacatatttctacactttttttatttagaaaattctagtattaactatacaaanntaagaaaattagagaaaactagaattacctagaaattatatttgtaaactaagaaacttagaaaattctagaatttcttaaaaagttagattgtaattcaaaataaaaaaaatatataaaaatttgtagtatcaatcttagctctctataaataccaagcttaggttaagtggaagtgtaactaagaacaaccaacatttaaactatcaataaaacctattacttttttatacaatcagcttctaataagccaaaccattctctactctatacacagtcaactatcaagttatcaccatactaccatcatcatcatcatatactacactagtcactaaacacattacaaaaatttcacctaaacaaatcacaactatttacactattctaatttaacaaaccatataatcaaaatcaactcatacatttatatatgtgaatatattgaatctaactcctcctcgtcaaaaccataaaaattattggtctttattaaaattaggataaatgttattttggaccctatattttgtaaaagttaccgattggatcatctattttgttaaataataaaatggaccctgtactttctaaa

SEQ ID NO: 123307 - DNA, 1831 bp, Cannabis sativa
aattttcaaaaatggtagaacacaaaaatgccaaattttacactcattgaaacactcctgaaacctatccaaatcattccaaacttcacaggacattatataccataaatactaccatccttgcgtaacagaatttaaaattgagtgcttaaatgaaaaatgtcattaatgtttggactaagctttaaaaagtttcaaactctatttataactcaaaatcacatcaaattcaacaagtaaacatcgaaactagtcacatagctaccaaagaacaattctacgaagttagaatctccataacctctctaattcataaagccactatataaaaccaattgtttttagcttaaaacgaaattaaaccataccttaaactttctttcttcaagaatttgttatcctgctactaccgaagcttagattgctaagttttgagtttaaaataaaagaaaatggataaagaagaaagtgagttttgttcgtacgatggaatgagggtttcattttgtaatgttaagtttataaacttaaaacatatatataagtttattgtataatgataagtttttataataaaataagtattataattatattataacaataataataacatgttaataatataatattaatattaataaaaactttattattaagtagttatcttattattttttagccactaagaaatctttaattctagggtatttggtcaacttcgagtaccccaaaatactctgatatttctaaaataaactaatttcaataattccatcaatatttctaactaaaaccgttatgacatgtttagcctcaaatcgggtctctagggtcgccgaacttaaagatatttttatttcacagataactcatattatatccacgtattttaaataaatctccgtaattaacaaattacgcttatttatccacttattgggtcttcaaggtccccgaacctaaaaatatttttatttcacaaataacttacattatatctacatatttcatttaaatctccgtaattaattaattacgctcatttattcacttatagcaaaatttataatttatgctgaattaagttagcaagatcataatcctactcattactacttaattaacccataatatataataaatcttaattattcataattaggttttcagaatattacattattacatatccaattttttcaaggtaaagtcactttttttcatcttcttcttatcttattttttagtattttatttgttacttagtatagaattcttatcaaagtttggcgcccaatatgttggtggttttgggagatgtttcagccataggttgggaattgaataggccaaaaatggtagttagtgctccaccagtttgactagctgttgggtctttttttgaatcttcctcttcacatcgttcttggcaaccgggatctcaggcgctgcggcaagcttaatcaaaaatctattaattgggttgcaagaggtttttgggtctggattcggcaggttgtggcacttttaaaatcagtaatgtcagcttcgtttccctcaatgtcatggctctgctttgtggtaatgatggtttgaggcttagtgtggaaaaggttatcgagagggagaatgtggatgtccgaactgaaaggggagcattttgaggaagtggtgatcaatgtgttaaagatagagaaagaaagatgctagaaaagattaattaattggaggaggttagaatatattagtagtacgcagaactggattggattagacagactactttgtccaattcagtgtttgggcatggtgttggaaattattttac

SEQ ID NO: 123308 - DNA, 570 bp, Cannabis sativa
aatataatacatgtatataagatagtgtaaatataattttaagttataataaaaaaacaattttaaattatctcctaagtagtgtttgcccgttattccaaggaataaagaacatttagtgttggcttttcatcaatgataaccaacgagccaatcattgtgacacaacgtcaaaggattgctccttctctatatcgattaaaccgtgcactgcgagaagctccaaatcgtaaaattagaaaatttgtctcaaatcatgtaacccctcacaaatgtgcctatattaaattgttaagtattaaagttttataataatttcaattgaaattgatatataaggctaattaggtcaaagagggtatacatcattccaaaaaatattttatagtttttgatgaagtcacacaatgccacctgttgtaaatcttctccaattattgtgatctgggtacgaggcgctatgaatccacgtggtactggaattgggattatagtatttttctcctttattctcaaaaattcttcaaccatccatctgattgccttggagatttgcgccatgatctctcg

SEQ ID NO: 123309 - DNA, 2164 bp, Cannabis sativa
aatgacaatgagtgattaacatataattacatgttagattaattaaacttacaagaggccttcagctgagccaatagcaaccttcattctcctcttccaatcaagttgaacttctttagagtattgaccatgtaaatgagaaagtaagctgagattaggcatgtaatcatacacaattagtctttgatcagtcccgacgcaataacctcttaaccctaacaaattcttgtgcctaactctcccgagaacttccacctcaaccgcaaactccatttctgcctttgaattcatcgctttcaattttttcaccgctatctgtagcattttcacacaatcatattaaaaaaattagcaaaataaacgaataatatctaaattacacgtttttctttttttcgtcacttgaaattcgacaaatcaactatttatttattaaaatcgaaaagagaagtgctaattatatcatcctgttacaatttatttctcaatctttgcgtctaaaattacatgttaaaatattttttttcatggcgatgttcattataattattacaacataatttctgtaaaattttttaatagtttacagtgctgaaaatatatttgaaattttttacacacacttggtaaactgttgaaaaaaatatttcaacttcaaacgccgaagttaaaataactattataataaaaaattgtaattaacaatctcttcaaccgaaaattagtagatatacatacctgaagaccatcagtagttttaccccaataaacacttccaaagccaccttctccaagcttattatcatcactaaaaccattagtagcaatatgcaattctttgtatgtgaaaatcctccatgtattgctacctcctcccattgtttgtgacctaattaattgaattaattcataatcaaaacccaattaaaacttaaaaattattaattaatatctaataattaatcatacccttcttctactttctcagagccacagcaactgaaaatagatcccatgctcaatcaatgagtccaaaactaagaaagaagttatctattttagatttggagagctttaataataatctcttaattaatttgctggattagtattagtacttataatacatagtggcattttggtcatttcccatctcaataatgttagccgactttggccggatgattccatatatataaagtgtaacataattgaacgggtataaccaagtgttatataataatattaatatttattataaaattaattatttagttttgttcaaaataataataataataattaatagtactaataacaatacaaaggtgacatttgtagttaaatggaacatgtatagtttaatgtagttgtattttgttatgtataataatatatatcattatctaaactcatgacttatgattatctaggatatatataagattgaattaattaccacttagtaactaattaatttatgggatgctccgtccacataataatacacatctttaagaataatagttttgccattttaagaataatagttttgccattttaaaaaaaataaaattgccattttaaaaaaaataaaataaataataataataaaaaataataactttgtatttgtcctctttcactaattaactatggatcatataattttatagggaaaaaaattacattattacaggtttagggttttttttttaatatttttacagattttaatttatttattttataaaaatataaaatgttattttcatgctagggaaaacaatactgtgaaaacaacgtttttttaaagaaaaaaaaaataagtgaaaaatctataaaataatagaatatataaaaatgtaaaaagaaaaaaattataaaaatataaacaacagtctcattttatatccattgaattcgtttatttaataaatactcatcaaaattggcaaattaaattacttaaataaataagaactagttaaatcaaaataatagatccaaaatgtttaacatttaaaaacattaaaactaaaatgctacgccagccccctaacatccagtctacgcctcgagctcttcacactcactgcttagctttacccttacctgcacacagagtacccgtgagctaacgcccaataagaagagctatgta

SEQ ID NO: 123310 - DNA, 1689 bp, Cannabis sativa
attcatatgtaattaccacctcatatccaaacacaccttgcattttaaaatataatgtaattactaaattgtgtaattactaccctaataattatcctaagtattttcatagtaaattacacatatatttatacatcagtgttgatgttgttttcatctctctttattgcggtggttgggaaattatagataaaattagagcttatacatttttttcgaactataaaatttacacatatattgataaataaagtgaaaaatgcaacaactttgactaatattaattattgttagaggaatgttaatacaacctcttattacaatctattagttaatttcaatgtccgaaattatatgccagattattttttacaagaatttttaaaaattcttgactatttgaaaatttttaaaaatttacaagaatgatgttatgagtataacgaatatcactataaaaaaatttgaaaaaatattctggtatgtattttaagtgtggaggttgactaagaaattataatagaaagttgacggtaacacttctctctttttattacagagcttgtacacttttacataataattaatgggtgtaggaaaaacttgatacattaattaaggtttttaggctaaaaagaatttttgctctttgaattttgacatgtaccaaatcatgttctttgaacttttttaactgttaaaaatttctcctgaactattgaggctgttgaatttaaggatttttgtcaaattttatttaattttactagtatgtgattgtccatatactaaatcatcctctttagattttaatatctcaaaatcatgctcctcaaactttgccacgtaccaaatcatgctcctcaaactttgatatgtactaaatcatgtcttgtgaaatttcatttatgttagattttccttactaaaattagacaaaaagacattaaatcaaataatctcaacaattcaaaatgaattttaacactttaaaagttaaatgtgcatgatttaataaatgtcaaaatttggagcaaaaaaaaatcataataagccaagtttgttaaatgctatttatatagtacaaagtaattaagggcccgtttggcacatcttttaaaaaagttaaaaaaaaagctgatttttgaaaaaattgtgataataatgtgtttggaagccgtcaaaaaacggcttttcgaagaatttttagagaggctaaagctgctccaatccaacttttagaaaaagttgttttgattaaaaaaactataatacattttttttttactaaaactatatttacttatttattatatattcaaaaaataaaaatatttaaaataaactaattttaataaaataaataattattaaatctattatttttaaaaaataatttatattttttttaatattaaaccaacaacatcaacctaaaatttttcttatgtatttgagtttctatttttttttatatatatatttgataaaatataatataaaaatactataaattatttttatcaaatacatataaatttatatttgcaaaaaaattaaaaaaatataaaaaaaaaatattatataaaataagtttttacattatttgtgattattgttaggtccttttttggcaatttagttgtcaaaatattttttaattaatgtgcattttattgagcattcaat

SEQ ID NO: 123311 - DNA, 2820 bp, Cannabis sativa
aaaactattttctgttttttaaaactggaaatagtttttaagttatgaatccaaacaacccctaagcctctcgatgctctccctgaaaatgagcgagaatgttcttcaagtcatcaacaacacgatcatctctccatttctcggagagaacaagtctgctacgccacgccgaggcattagtttggtaaagattcatcggggagcataagtacattataggtcctttggctcctgccagttcttcagatatttttgcgatctcgacacgaagctcctccatactcttcttatcagcatcatgtgaggggcaagaacgaatctttgttaagagaattatggcaagtgtattatcagtcatagttttctttcctgaactcatagaagaagacatatcactacaataaaagtatgcctggctaaacttctatttatagtagatcaagaagaatatttgagaaactgataaaattgaaacgtcagcagacaagtctgcaagaacaaatatatacatatataccttagacatgagaataaagtgagttgatagaataacaaaatttatgtattacatgagtatacttttacttagagtccacgcactgctaaaaataatagagatgtatataatattatatatatgttacaaatacataaaagaaaaaaggataatattatatatattacaaagatctaaaccaaaaaaaaaaagagaaaagtgatacaaagtagcaaactacgtgctactattaaaaacgtgcagagtatatatacttaaaaaaacaaaaaaaaaatattattaaaagcatgcatggcaaaaaaaaaaaaaaagcatgcatggtacatatattttaaagaaagaaaaccaagtacataaaaaagggacgtataattcattctagtgtacgagatggctcgactcgtactgcataatctccagagaacatgtgaacttcatacatgttatcacatggagtaccccgattattaaagatgggggatattagcgagacaagatgtctagcatccaaatattgacagaaccatatttggatttcagtttttaacatctcaacatccctattaaactgatcgcaaaggatatgcataattttgtcatgctcgatgaggacacgcctcatctcgacatctttctggaaataatagtcgatgcctgcagtagtttgtttatgagaaatagtgttctcaaagacagctcttcgacacgatcagttaggtcgtccagttgacgtacatgatcatgacactccatagcccattcttgattaacatcctctaaattagaaagagagtgatgtaaacaatatactttatttcgcaaatcgttaaggtacgaaagagcattaggagggagttcttttagttcagtcatgagattcatgttgtgtgcaaagtgaggagatgaactgtggcctccagaagacatacctcaggacagatattcaaaaaaaaaaaagcaaaagggagatttcatgggaagaatgaaggagatgcatagaaatgaaagaaaagtgtggtaatttataggcagaatagcttccttcacagacctccacgtagtaaaaagttgaagagatgagtaatcatctttgaacagtaaaaagattagtatgatgcatggaagtgaaaagattaatgagtaatcatctttgagcagtaaaaagattggtgtgatgcatggaagtgaaagaagagcatgatgatctatagacatgaggaaaaccaaccctccacgtaattaaaaatagagaggtgagtaatcaactttgaacagtaaaaaattgtctatgtgaagaaaaacattgagcattttttttcttaaatacaaaaaagggggctaatgttgatgagtaaaaaaaattataaattgtgtgtaataaaataaaacaataacagtaaaagaagcaaaatagtaaataactgtgtataaaaaaacatgattagtagccgcacaaaacttgaaatgaatatatacatgggtttaggtttgtatgcataaacataaaagcagctgccacttgattcttttacgaagataaagttcacctcaaggaggcacgataagctacctctaaaatacattcacccaagctattacctagggacatacagagataagggaagagaaaaagaaggcgtctagtcctatcaagcttgtcttatcaatctttaaagaaactatcctttcttcatctttctctacacaggctgcttgtaaacaacatgcttgtatacaagctaccaacctcatctgactccattgaatcctccatctcaaatccttcagaaagataaacttcaaactagtgtgtttatatgcacactctttgtttattttatcttttctttcttcttcatcttatttctctctacacaagcaaagtttacgttaatatcgcttctatttactaaaatactcatttacacacagctgagaccattgttaagaataaacttcttaaaatctgtagatctctattttattaataaaatctaatcatagcttaaatgctaccgtagacgtaggcaaatgatattctgtcgaactacttaaatttgtgtgttacatattatatatatatttatacttatatgtgtatctagcaatatatacacatagtttatttatatacataatatgttataattatgtttatttatatattttatattaagtttataattatttattatgcgttatatcataagctcttatttatgtataatatttataattaaatatttagcgaaacccctaaataatatatatacatattatataggggttttttcatttttaca

SEQ ID NO: 123312 - DNA, 1086 bp, Cannabis sativa
taaaaattaaataaaaatacccaatttattcaaaatataataaagaagaaaaacacgacaaaccatgttcaaaacatatttagtaaatatatgaaaattgtatattagaaaaatgtattctaacataaattttatgttataatttttctgcatatatgatttatttttttatctttaaaaaataattagaaaaaattaatttaattttactcatatttttaatcatcaatttatttttagtttaatgattttctaaaaatatatacataaaaaaaaaaaagtatgttttaaataacacccgcaacactaattataaggtaatagtacaaatatttgtgtcatcattatttatcgtgtgtaacaaaaactcacataaaaatcactttacaatattgtgaatagtttgataatcatttttaatgatctaaaaaattcaaggaatatactaatacataaattatagtttgagagacaaaaacgctgatacttgttttagatatataaaacatgtagattacacaattctctatcccacctctaatgaggcatacacaaggatagaatgatagtaaggactcgaataattattagaagagtgttaattattatttcttaatcaatttttatgtctgaaattacatactaaaatatattttaattttttttttcatagtagtatctgttatagttacaatattattcttgtaaattttttaaaaattttaaatagtttacactaccgaaaataaagttcttgatattttagtttaccatacttgtttaaaaaatttcaaacttttggcacggtaaactatttgaaaaattttaaaaatttatagggatgatgttaacactataatgaacactgtcatgaaagaaattaaataaaaaatatttcgacatatatcttcgaacattgaggttgactaatagataataaaaaattaacatagcactcctttaataattaataaggatgagaacagaagaacactccccgcttattacagacccgttttacatccttacatccaacatgaaagttcttttttgggaaacttataaaaatattggaatttgggttaa

SEQ ID NO: 123313 - DNA, 832 bp, Cannabis sativa
  modified_base (792)..(794): a, c, t, g, unknown or other
tcacttaaagcttaagaaaacaaagaggattaggtctaagaactttaccttggattgaatctctaagaaccaacaacaaatcaccaaaaactagctgaggagacactaaatcttgctggttctccaagaaattcgagagagagatgctatttctcaataattctaattttggttttcataaataaaacctaatgtttatctaatgcgaaagaggaaaagaactttatttgatgaaaagaatgtaattattacagagaaaggaaaggcagggatatatatatacaagagagaaggaaagactttgactaatcataacagactcaacaactaacttaaccaaaataataacaaactcagctaactctaattaaagatcaataaccgaataaacggctaactgaccaactagtctaacagtgagcagagtgaatagcagacaaagtgaatagcagagttcgtgttattatctatttatttaactttacattcagattataatacaaataaaaatccaactagaagacaaaactatcttagggcataaagaccataatgcccttgcccacactaaaagtcataaaatcacttaggggtattttggtcattttctaaaaactctactattcctgacattcccattgtctaaaatctcttctattcccgacattcccaatgtctaaaagtcataaaatcacttaggggtatttcggtcattttctaaaatctctactattcccgacattcccaatgtctaactatattgcccgactatactaaaaatactaagatgtnnntctaatagccaaacaccgcgttctaatgttgtcgggca

SEQ ID NO: 123314 - DNA, 549 bp, Cannabis sativa
tatatgagacctgatacttagttggaccaatacgatattgacacataagagggtgctaggcaccactggtgccctttaacatttctcaatataataatagcattataagacaaatggaaatggccagttaaatagcacaattgcattaattaattattaattagtaactttaattatatgattatgtttttttttttttttgagtgtatgataatgttaatgttaatgctgacagatgactacaaaattatttataattaaagccacaaagaaagatgactaaactatattttgttttgcattttgaaccgaatattcttcttaaatctatacatctatactgaagttttaataggtattacttaggtaatattaagaaaatttagtaaaattttgtgtaaaatcttatttttcaattaaaatttaattatcacattaaaattattttttattaatttaagatattagatgttaaccgactttaaatttaaaaaattaatttctcaacaaatttgctattatggttaattttgaaatttgattattttt

SEQ ID NO: 123315 - DNA, 1373 bp, Cannabis sativa
gtggagatatttgaggaaaatatctctgaagatgcttactcagtgtatgcttctatccaaaaagtgacacttgtctgacatgcctaatctacttggagtagtgcgaggctcgaggcctgcccggatggtaaatatgaaggttcaaacttaactgctctgaagtgatctgaatggaactataagtgggtatccgtcgaagtccaaaatgtacttctagaaagcatatcgttccatttatctagaagatccatacaaggagcttgttcctgtctgaatattcttcttcgtaatatctttatggcttcccaaaagggcacatggcatgttctggatgttactcatacgatatcggatggataatgtatgtgtataatttgtgttacctatttttgagtagactatttatttatctttcatgcacccattactaaactatgcttaacacgtgtcatatagcatcatgccacgtcatcagggtagtttttgggataacaactattttttttttaaaaaaaatacttaatttattttttaagatattgcatttgatattttattaagaaaacatccccaatgatattttcaaaatactacattttagatttttaccaccatatatacaaaagaaaaaaaaccataatttttttcataaaataaaagatcaactaaagtttttggtccaatgcccccaattagctcgagatgggcctgctaggagaatgtctaaataggctatcaaactctacgtttttgatatatttcgccgtattaaagttgaagaaatgacatatcatttaaattttttgggagaactagaattcttagaggagctcaaaatattgaatgaggacatggatttggacatgagcatagatagaaacaaagcccatgtagaatgcgtaggcataatatagagagctattattagttaatagggaaagttacgacataagttcccaaaaatttaaatttgatgtcgataactcttagtccccaagctcactattttcataagttcactataatccttttttctaataaattcatttactaattaaaaatgtgacatgtcgacaattactgctccaaattatttcttaaaaaattaaaatgatttaaaattaaaaacaactaaaataaattatttaaaactaaacaatttgccactatttatttatttatttttattttttcatctttttcttttcgtttttcatttttttcctacttgttcacactccctgtccagaaatcacccctaccaaaaaatcacgacccaccaccacactactacaaaaatgagtttttctgacgtttttaaatagtcgtttaaagtattcccgtcggtttctataaccgtcacctatacgacc

SEQ ID NO: 123316 - DNA, 1387 bp, Cannabis sativa
tctctctctctctccctccctccctccttttttcgactcaaagaacccagcaaacccaaaggaaaaactcagctcaattcaacaatctcttgtctatttcatcagccctaagacttatctatcttgaggtaagttgttcttggtactcttgatagtttttggagatttaaagttaggatttgaggaagtttttggttaaattgggttctatgtatgttgtttggttagatcttgcttttagatgtttaattaggattttttaagctttaatttgatgattttaggtctgttgtgctaagagttgggtgagttgagttcaagaactcaaaaactcactcaacaatggtgaattttgtaattttagtgtaattttgagttttgaatgtttggttatgttgattttgtggtattaagctgttctggaaagtttcaacatgtttggtggagctttggtttggttttgatgcaaaaccagggttttccaatttctgcagtaggaaccggttctacaggatactgtggaatcggtcaaccggttgaccagtaggggaatcctaatttttctgaaaccggttatccgtgtagggtatttttccaaaacttagttttgggtgttttatcgatgttaggctatttctaagtcagtattgattaggttttgtccggttttaagtgtagggccaattttgggatttgattaagttatttatcaagtttttgttgtcgtgacataggacctgaaatcgtcaagcgttattccactcaggtcggcccgcacacctaattttggatttgaggtaagaaaagtcatttacactgcttagcatgacaaataagatacgattattatcgtttgtgactcgattatgatcgaagtaaagatacgataattatcgttgtaaagaatgagttattactcacttctgaaactgttgataagttttttacttattggttgcttaattaagcaatgatcataagaaactcgttggtaacgagtttcttagttacttaataaaaacataataatataactaaaataatcaaaagataattgaagcacaaaaattagttactttataaaataagacatactctatatgaattcttaacaaatgacctacggaattaaatcataaaaactaattacgtttgttagctacttaaatatctaacacaaaaaagactagttaattaaagcaatcaaattaaaaattaacacacaaaaccagttacataaaatagataaatcaaaaactagctagcaacacaaaaaaaaatacattgatattaaaaataataaaaaaaaatagttactattagggttgtacaaaaatatttgtaaaccgcgcaaaccgaataattcgcccaaaccgaactgaaaaaa

SEQ ID NO: 123317 - DNA, 731 bp, Cannabis sativa
  modified_base (684)..(693): a, c, t, g, unknown or other
taggatgttaatcaaacatacttggtagtaaatcgagatcctggtaaaatatttccaacactaaccgccttccaaagtccatggccatttatgaagtggggaatggaaatagtaggccccctacctatggtgcccgcccaaaagaagttgatgctagccctcacagactacttctcgaagtggatcgaagctggctccttcgcccaagtcagggacagcgaagtgaaaatgtttgtgtagaggaatatagtgtgcaggttcgggttatcccaagagatcgtggcggataattgatctcaattcattagccacaagttcaggaacttctgcgagcagtggaaaattaagcttgtgttctcaacgccacgctatccgcaaagcaatggacaagcagagtcatcaaacaaagtcatcataaataacataaagaagcggcttgaaaaagctaaagggagatgggcctaagaattgcctggagtactgtgggccaaccgaacaacgccacgcactagcacaggtgaaaccccgtattcactagtatatggaatggaagcagttatcccgacggagatacaagtacccactttgcgagccgagttaaactgcgaggacaatgcttcccttttgctacaagcagctgacgatgtagaagagagaagagaatgttctgttgggttttatgcnnnnnnnnnnactcatttcatataatcagattttcttattaataaaga

SEQ ID NO: 123318 - DNA, 1067 bp, Cannabis sativa
ataataataataataataaacgtgtggcataagcataattatatatatatttttgttttgaaaaagataattagtttatgttagttagataattgatatttttatggctgctatgcttggctggccagacctgcattgggaagggtctagccggccaatactcctccatggccggctagacctgcaaaggcatggtctggccactcatgatgcttccttggccggccagacctgcattaggtagggtctagccaaccgtgactccacggtcgactggtgctggatgtgtgttgacagggggtagatcacaccaattgttggagtttggtggatctagatgcctgaagtgattggtttcacttatcgaatcgttgttttggatgtttacacccactctgagtcctcgtcagttgaagattgacctctgtacacctcgctccccttagggaggaagtgctgtactctggccgaccatggttactcctgttagtggttggctggccagtggctgcacaatggggggtattgttgagctagagatccctggccgaccccttattccgctggttactgggatctagttgttctcaccgtttgacctttgaggaaaggtctgtcctccctctggcaagggaagatttgtcttagttcccgaggaacttggcggcggtcttccttgaagtggatctctgagtaaatcctggactcttctatcggttctctgattgaaccatcttattagattgttggcctctcggttccggtgatctaactccacttggtgagatcaaaggatgtactcctggtcatccatccatctcaggaattcgcgtctctcctgagcaaaaatatcgcaatgagtagcgtgtggttcttcagttaggcctggacgacctatagcttccttgagtctggccaactcaaggtcttttcctaggtccaggtgaggctcgccaattgctagctcgccaactccagagcctgtctctcttgcgtagaactggagttgagatctagttgttgctcttgggggctatcgcccttgggtccttccttcagtgggaggc

SEQ ID NO: 123319 - DNA, 3015 bp, Cannabis sativa
  modified_base (1135)..(1137): a, c, t, g, unknown or other
  modified_base (1844)..(1847): a, c, t, g, unknown or other
agatcccaaaccaccaatgattttctcagcaatcggagacagaatcaactcagttgccatggcttccgatcagattgaagagagtagtgagtagtgagagaagttctaagagtaagaataagtaatacagagaggttggtaagtagctaataataattaatacaattcatacagtagaatactgtatgttcacgtgctggtgcgacatcctaataaatgattgtacattcaaccattattattttataatgagcattgctattgggtgttagcggggcctaataaaaaggaggcattttactattagttagcgataatttctaaaagttatttgcttaagttatataggactcaatacttaattaaaccaatagtagtacgacaccaaagaaggtgctaagcaccagtagtacctttaagtatttctttttttaaaattgagcgaaaaataagcgatcaataggataatatgtaggaatatttgcgacataaataccataagttttcagttttatacacttaaataccataagtttcattttacctttagttacatttccgtgacttccgtcattacttttctgttaaatcatatcaaacataagatattttcggcataaatatctgatgttttagatttcatacacttatatatcccatgttttttcttttgacaaattaaatatctaaagttacatttatgttacttttttcactaaaatcttattaaaatatactaagatgacacgtgtcaatatattagttgtttactcatattttcaataaaaaataattcctaaataattaaaaaattaaaaaataactaaataatgacctctctcaccattcaccatgatgttgatcaccacattctcattccccataaatttacattaaaaaaattgctcaaacaaaatggatacatgtgattagggtgggcatcatccaatccaatccaattgaaccgaactgattcaatccaatccaattacaaaaaattggatatccaattacaattagatcggattggatgctaatagttagattctaattagattggatcaattattgaatgtcaatctcaaaatctaattaaaaaccgttccaatctaattacatttatatatattaaaannntatttatataataaaaaatattgaaaaatataatatatatttattagatttttttgtatgttgaatgtgtaacacttgattattttttgtatttattttcatgatattttgttctattttattacttagaaatattgttgttttaattatttaaaaattttggctacatacattacactttggctacatacattacacttttaagaattacattacacttttaagaatagcattacacttttaagaatagtatgttacttttaagaatagtatgtttatgataagaatagtatgtttatgaagtattaaacttaaataaaatgtgatacttagtttttacgtatttttcttcatatttcacatgttgcagagcgaaatcgatttcattccgaaatagtcgtttgttgtaggggtgtatgtcggtcggtttggtcggtttatgctatattttattcaacccaatgtaaagatcgagttacaaaaatctaaatgcaaaccacccaattaagaaaagagaaaatagtaacccgcccaatgaaattggtgaccactaatatttttttaaaattttttgatttttatattcaattattatattttagttcactgtaataacgagacaaatatatatatagattcaattcaaattttaaatcaactaccataaaaaatcatattagtttcaactttatattttttaaatagtnnnntaaattatatgatatataaatatacataacaaaaacatataaatatatataaaaaaaaaaccttttaatcaggttggtcgggttagttcgtgttgattaggcggatttgtattatttttaacccacccaatataaagattggacgggttatatttttgtcgagttttttggtttgtattttttgtcgagttatctcggtttggtttgggtgggttattcgggttgggcgatttacaaaagtttatgtacaaccctagtttgttgagtttcttagagtggtcatgtgtggtttggtactacacaggttgttgccgaaatcaagctttcttggtaaaattagaattttaaccaaggcacgaagggtgatcttcaagtggtcggttgaattaaaaaacttaacaatcataattacagcacgtggttgatgcacatggaggcatatctctaaggctaagacttgtgagagattgttggtggtaatgaggtcacacaatcgaaggacacaaccactctgaagaaatggaagattagagcggacaaagtcatgtttatgattcagaccacagttgaagataaaatgttggagcacatcagtccgacggagacactaaaggaagtgtgggatactttcgcatcgttgttcactaagaagaatgatacgagactataaattctagagaacgagcttctctcaatcaggcagcgcgacatgacgatcaaccaatacttcacaaagtaaaatctctttgtcacaaaatttctacattagaatctgttgttggtatgtcatattgtagaattagaagaattattattcattcattaaggccaaaatttagaacttttatctcttgttaaattagaaaacttgctaactgaccaaaaagcgttagctaagcaaacatctagagtctcatcaaagagtgatgaagaaacactctttagtagtgataagaaaggtcggccccaaccaaatgctagtataagatctagaaaatatgatgactaggatagtcatcatggaagctcccaaacaggaggagcttagaagaaagacaaacagggtagccagtcaaagattaacaataaatttgatggacaatgctgctactatggaaagttaggccacatggctaaaagttgctggttcaagaagaaaactgcagaa

SEQ ID NO: 123320 - DNA, 2411 bp, Cannabis sativa
  modified_base (1698)..(1703): a, c, t, g, unknown or other
  modified_base (2294)..(2297): a, c, t, g, unknown or other
gtcatttgtcgtcgattttttggcttagtcgtggctcgaggttcggagatggttgaagaaaaaaaatagcaaaccatttcggaggttgagctgcttgagaatgaagaagaaaaaaaatagcaaagagaaaggttacaccgccattaagagagagataggagagagagacggctaggagggaatgaggtgtgtaaatgaaatcctaaaacctaatgttctttttatatgtgtaaatgcccaataacattaaaaggctaagatattgtgggactttttatccctgggataaaaagttccacttaaaaactaaagttgtgtttggcaaatgcctggaattggccctttcaacactgtttttatccgtttgccaaacaaggcccttgttccaaaattttttagggctccaaatgtacaagtgggatcaaaagtttttatctcactttttattttttttcatgtgtaaaaactgggataaaaaattccttttattgtagtgagttttttgaaaaccacataatattagagcttaagaatgtaatgaaggtataaataataaaataacaaacaagagatttttacgttgtttaggcgttaattatccttagtccacgagcccattttattaggctcatcggtcggtggttgtttataaaaatacaaaagggatggacttttaccccaatcccccgtgtttctttgaagaagaagaagcttagtagaatattctgaagttgataatgggcttacagtaggatgcttttacaatggagttgtctttgatctcaaggtgaagagctaaaggatggaaggtaaagtcaggcctcagaatttttcttcgtccctcccttgtgcgtctttgggggtatttataggtcgatcccctcgcatgggccacccttgatggatcttcatggggataaacccccactggttggattggtaggtgacatatttttcatgtggtctttaccaatgttagattgtactagctgtactggtgggtgctttggacgcgtgtcgttcgagggccgttctcatttgaattacccttatccctagccattggatcgttttgcacagtaacaaggacacgcataccttgcacggtggcatggcgtgggggacaacttctgacatcgtattaaaaagagctttgccattgggtccatagcctatcatgagtgggttgggctttcgcagcttaaaggcgaccggtgcatcttggttgaagatgcatgttccttgcggaagcatagggtctcggcttctagagcggagtgagtcgctggctcacatgcatctctcttgtggtccgcatccgggaagacttatctgcaggaacctgttttgcatgattagggctcctaccctcccggagcacggagcaaggtagttgggcagccttaatgatctcttgactttttccttattaatttttacgtgtcacgcttaagaaaatacggataacagtttctatttaatgttacacaactataaatttcaaaaaaaaaaaaaagttagacaattataaattaagttgacttatatattacaccaatttttttttatcaaaaccatcttatgatcataaatatatgtatatttgtataataattttaaaaactcattacaatatatccttttacataagtaaaaaactgttggattatattttaccagatctagatttactaacannnnnntttttaacatcctaaatatgaatctctaaaatgatgaaacttaagcacgtataaagtatgagaaaccttacattgattgcagtgcaactaaatgactttttccgctgagatctctaacccttggtcctttctgtcgcagagtataatcaagatttgagcctgacactccttcagttgtttagattcttcacagtcttacacactatgattcaggactaacttgctatgggtgggcaagaactcaatcactaagctcaaatttttatgtaaagaacactataagattttgaaattagaagagagaaaagaagaagaagaagtctcaagttctctagttgtctgacaagatgtaaactaggtttagagtcattagttggattaagagactattcttttctttttatactaatttacttagggttaggattgaattataaggaataaaaaaaaataaaataatagcataaataggactatagtggccgaccatatgtgagcccaacactagttatatttttgctatttttcttaactatttatctattatttcacaaatatcatattttctaattttaatcctataaatgtcannnntatttatttaataataataattattcatcacacaaaattgtcatttatattatttattaattagactccacaaaatatcttaattaacaaataaaccctaaaatcctatttctt

SEQ ID NO: 123321 - DNA, 916 bp, Cannabis sativa
ctatatccttaaactaattacaacaataggcataacaaaaaacagaaacagatctattagaattgtaaactaaaaaaacaagactattggtccatgtcatctttttacttcttacttcttatgtacgtttaatactctcagtttaacagttggttaggtataaactatttccaattctaataaatttactttacaaatttggagaatgagattttattcttgtactttttgatcaacactttgctgcaacaaactcaaaacagtaggtaattgctcacacaacaataccaatacagtaattaatagaacagtaacaaacacattgcccaataatctaattcaggactctgttttcggatatcattaaattaagatataaaaaaactaaccttaacatattggaacaaccttctctaatgaccatgcactaaaagagtcgacaacttcttgtatagtgatctttgagtggctgggacgaaaaaaatatgtatttggtgagataacattgtcaacccacacttgcatgaattcaggtccaaacgtaatcccatgaacctctatgttcggatcgctagaacaccaacaaaaaaatacaatgcctccacttgaaatccaagcaaacagaaacaaaagttatttaccatgaatggaatttcgtttatcaattaatttatagttgaatttgacatataagaaaaaaataaaaaaatatatattcgtaacagaccagattagaacaaaatctcatattataaatacatgattattaatacattacaagttcatgttattataacgtttaaaaaatggtaataattgtacacaattatagaaataataataaacatttttataaactaataattatggcaaacctgagtaatataaaaaagaaaagagaattggataataggta

SEQ ID NO: 123322 - DNA, 608 bp, Cannabis sativa
aattgaataaataggatttttgtcctgaactatgaacctggcagagttttgcctcctaaatttttctctattgcaaaaattccatgcgaacaatgcaaatcgttgcaaatattatctcccttcaattatattttcctcatcttttaaacaaattacttatatatggttataagtaacaagtataacagcagtaaaatggcttatttaatagctttaaggctacttaaatgcaattaaatatcaagtcccacttattttactttaataaggttatagaaaactgctaattatttataaaacgccacctcataatggtgctagacacctttgtgctaggcaccaagtacaaactctccattaatcaggttacctataattaaccaatactaggcttgaataatccaaaccctgagttcctatagttattttcttcatttgcttaaaaatcgtagagtatttttcactaaaaaaaattgttgtttggatgataaagtagttatattatatattaaaaaaactttattattatttttctagtaaaaaaaacaaaaaaaaaatgaattttctatatatatatatttatgccctcaaaaaaaaaaaaaaaacct

SEQ ID NO: 123323 - DNA, 1378 bp, Cannabis sativa
ccacgcatagaacttagaattacgctctcagctatatagaacgctctatataatccacgctttattattatttatatctttttaatttaatgtctaaagccatataagttacataccaaaaactatattttttacaattttatagaatcatattaattatattaattatgtttattctcgttaattattttatttactattaaaacattttattgattcttttgattaataatatatttttgtataaatatattttattaaattaatcataaccattcatgtattattatatatttgtataattaaaagttattttatatatattgttattgttcggctttattttgtttaagttaaattttgttagttatgaaaaagtttgatgttgtgatattgttaaagatttaatattaaagatttgttgtctatcccaaaaattttaatgaaaattcggagatcttgttgatgagataaatttttatattctgctttatcaaatcaatttagatttattaatctatagtgtgtattttagtttgttggacttttatttttgctataatatttttgtaggggctcttacaatcattcaaacaaactttattgatacgagtttagagtagatgttcgttgcctggtctataaaaaccctttaagattgattgtaatttggcattatgctttgctttctcataacaatgttcctgcaatatccatattccatgatatctcatacattagttgtgcatacattcagagtagataagacttgatttgatagacttttttccatcatttttgtaaactccaattaatatctgaatgataagttaatttttcaaaaaaaaaatatgcaaagaaaagtacttactatttaaataatggagaaaaattgtaacaatccacgtattacaataaaaatgaaaaaaaaaatgaaaaattcaataaaattcagtagaaagtcatttaattgatgatgttcgttgttttttgtcttttttctttagttactattactcatgttcataagcatgttaatcaagctgccatggattagcaaagtacgctctagagttggatgaagatgtcttttggatggaagaatttctacatcctatttttcctattgttgtaaataacttttaacctataaataccatagaagagtgacaaacctataaatgccatatttttgtaacttttttacaaaattccatattttatgtaattttcacataatagtaatagcaatttctcaacaaacaaaaaaaaaaaaaccacaaaaaaaaaaaaatcactatttacttcattttttatttttttttgaaatcttgatattacctacaagtcaaaactcaatttaaatttttaaaattac

SEQ ID NO: 123324 - DNA, 925 bp, Cannabis sativa
aagcataaaaactcaaaatattctaattttactcatccatgagtaatacccattaagagtgcacccatatatatatatatactaatttttctgatgtgccattgcgcatttcacttgtggcttttttctgaaaaaaataattttattaaatttatatattttaaatgaccatataaaaatataatataaaatgaataaatatcacaataaatgtatattttaaaaggaattaattatatttaataataatttattattattatatagttttatattataaatcatttgtattctcattaaaaaattagatgaaaattatttaaacaattaataatacttttacttattttagaaaactaaacaaattataattttgttgtttaattattagctataagtataaagtagtaaatttgtatttttttttaaaaaaaaaatttatcacattctaaaatagtgtttcattatagaaatattaattttttgattccaaagatatataaattagtgactgaaataaattaaatagttcatcataaaaaataaaataatacagacaaattgactggtttgttaaaaaaatacaaaaacaacagcaacaaaaattaaactcactcaattattattattttattttattgaaaaaaactcaattattatttatataacaaaaggaaatagaaaaataaaaaataagtaatttcaaaaaatgataaaaaattattatatatctatgtgaggtacctgagacaaaataataataaaataaataaatgaaaataatcttttatcttatatttctctatttaactatagataaataggtacataatatatatattgtgcctatagatatatctttatatattaaaagtgcctatctaacggtatttcttggtttaacattcttggtttaacagaatat

SEQ ID NO: 123325 - DNA, 2258 bp, Cannabis sativa
gaatgtcccatgatgccgcaaataaaacagaaggtgggaactctctcatacttgaaattggcatagaagacctctccatttttcttcttgaacttcatacgcctctttaatggtttttcaatattcaatcggacacgaacacgtaaatattcacgccaaataccttggaagttgttaggatccgattcgagaaacattccaatatagttccctgcttgacaaacaaccctctcgattttgaatccagtctgtaaatcatggacttgcacccatatatcaagattgttgagagggatagttctcggattgtctccttatttgagccgttcaataataagttgcttacgatcatacgtccacggatttcccgtaagaacacgcttgatatctatttcatggtaaaactgaaatagaaaccggttttgctcaagaatcttgatatacatgcctttcccgggtttccataaatccgctatcatgttttgaaatatctgaaaattagacactttcccagttaataatcgcccaacaagaaaccaacgatcatcaaattcaatctcttcgacttcctcctcctcgtatgccacttcattttcttcttcttcttctaaacagatgtctttccattgctgttccaacccagttgtggatcggctactcgacgccatggtgaaaatcagaaaaaacaatgaacaaagaaagaaaaattctatagaatagagacaaatcacatgtcagaggacatgacacaaatagagaagctagctaagtgaagcatcattagtacatattattttagccacgaaccttttagtcacaacataggaatgataatttatagtaagttacaattttttcccttttagtcacaagttttgttgtgactaaaagtaatattttttgtagtgattaaagaaagaaaattaaggagacaacaaataatacttattagaaaaatttgagagtgtcacgttatctctcctttatatatatagatatattaattttcagtgatacgatatatcaaatactgttgtatatatttcatgatctaatatatttattcgtttttgttacaatgtaacaatatggagaaaatattatatattaattaaattattatatattttttttttaaaaaaatattatgtagtaaatgtatatttataatttttattagctaatttattatatttggcaattttcttaatttttttttaaaaaagagatatttactaacttagtttctaaatttaaggtcatttgacatctcaatcctaattggaataaaaaatctagctaacaattttttttgaaaatattcttggaaaatacaacctaaaagcaaagacctgaaactagaggtgttcctccaactcaattcatactattttgctaatagtgtatccgatctgaactaagtatagatttcatattttgaatctaatgcaatccacacaatagttcaaatctaatccaatatgcagaagtgtagattggattggttattttgaatttgttattttttaatatttaactaaacatatattttttttcacataactgacaacaaaattaaaaaatttattgttgttttatatctccaacaataagttaaaataaataaaataacaaataataaattcaagagaagaaaaaaaaattgtatgtcgaaaaaaatatttaattttgtttaatttgtatgtacaaaaaataaattatatgtaagaatggattatacatttgatctattaagttttgaaatatatttttactatatgtattacatttaaattactatttttttttacattaaaatgttacttgtatatataattttaaaaaatttatataaatatgtgtagattgaattggatcggttacttctgcatgttaatcaaaatctaattcgcacaagtacaaatatacactctttacaaaaattggattggatgagttattttataaataccccaagcaagatatatatatgtatatatatatatatatacatatcattaattcaaaacattaaccaatacactatttaaggaaatatgggccacccattaactaacaactattgcatatatagtagtacatgctttttatattatcactacaagaaaaatgagtattaatgagaataaattttcgttggtaaaaactcctgttttcgtcagtatttctcatcaatgaggacatttcgttagtaaaaagtcgttgggaatagctcgttggtaaaaacgattatcaac

SEQ ID NO: 123326 - DNA, 1845 bp, Cannabis sativa
  modified_base (864)..(874): a, c, t, g, unknown or other
aatggtatcattattaactgaaaaataccccctcttcttatagagtagggctatattttatggttagggacaatcagctttttaagagctaatactaaagcaacataaatgaaaaaaaaaaataaataaataatttgtgacataaatacttaagtttaactttcagttaaataaataataagtttaattttttgcgataataatacttaagttataattctaaaatttttgtaagtatctgacctttaagtgttaagtaaattattacgtagcaattcttaattagtttaggtcattaaattttttaaaaatatattaataagaaaataacacgtggataattactggatatttaacggctaggtacttacagaattttaaaattataacttaggtatttatgccgcaaattactttaaaaaaaaaaaaaaaaaaccccaaattatacgattggataggatcattcccaaaattatcatttcattcttgagtgttgtcaccttaatgaacttaatgaaactatcgttttattcagaagatgaaaaaattaaaggaagcttataataatatatattttttgcacctgatttataataataacattatttatatttatgatatgtcacgtcagctaaatttaacgttttttttatgttttttcttttatgttttatttttttgcgtttttaaaagtaattttttagttactaatagtgttgataagaaactaattagttacatttatataaaaaatttatttttatatcatataatctgatatacattttagttattctctaaaaacttatttctatacatttttgtaactaattaatttataagttatattatggtagattatannnnnnnnnnnatttaggtaaccttaaaaaatattttcgaaactaatgagctgccatgtaatagaacaagctaccatttttatataccgcttatttaaatacatttttgttattttgaaaactaattagttattatataatataattcaattaataaaattttaaaatcaatgttaactaagattttaaaaaaattataaaatagtaactaattactatattagtaatcaaatggtttcttttctggaaataactaaaaaatatatacttctcacttcttaaaatgttcatattaaagagtaaattgcaatattatctttttgggactttttcatttttacacttcaaaatagttttttctttttcatttttacgaaagtctacatagaaacatctattgcaactaacagagcaacctaaatcgtaacccaaatcgtatagcaacgcatatagaaactaccggagaaactactttagaaacacaaaccgtaaatttgaaaaaaaaaataataaaaaaaatagtatatagagtaatttctctatcttttttagtctcatccaagtaacgacgtgatcagaaattatttttaaaatttcaaaaaagatagacgaataagaaagagagaaagaaaaaagagagtaatgtactataagagaaaaagtggaagaaaaaaaaaataagaatattgaaacatatccaaacaaaaaaaaaaacgttatagaaacttaataaaattatttttgataattaaattaaaaataaatcgtaaattatttttgataataaaagtaaaaataaatcattttgacaatttttccaaaaattaatatgaatggattataggtcgttcctaaattgattatcatagggtgaatcacttttttgttttttaaattagaaattaaatattttaaaaaaccatgtttaaactttttaattttttaattaaaaattaaatttaaaaatataaaaaaaaaaaaa

SEQ ID NO: 123327 - DNA, 2658 bp, Cannabis sativa
  modified_base (26)..(26): a, c, t, g, unknown or other
tattataattatattttaatagttgncgaaaacctcggtcaacacaatcaaactgtctaaaattttatgaattccgaattgaaatttaattatttgattacatataattgagatttatttgataaaatgataaaattatattgattaaattttattttaaggtactaaatatgtataatttaaaaatataaagtatcgattaagtattattgaaaacacatagtaccgaatatatttttcataaaaacacaaattactaaatagtgatattccctaaaaatattaaaaaaaactctagatgcgtattttcgtaatacttttattttttcgtttattttgaaaaagtttcatttttttttttaaaaaaaaaagaaacaaaaaatgaaaatgaaaataaaagagggaattgtgcaaagcacgagacaatgatgttgggcttttgattagcggaggctcagagttttgcatcactttgttgttcacttctcaccttcccaaactcaaaacccaaagccaagcttagagagagagagagagagagagaatggcgctgagagcagctgtacttcgccacatccggctacccattcaaaccctaaccctaactcctcgaccattaggggcttcctcttcttccactcttgttcgatggatgtcatctcacgacgatcatatcaccaaagaggaggtcatcgatagagtcctctccgtcatcaagagcttccccaaagtcgatccttccaaggtcttgtttcccttttcgatttcctgatggttgcatataaaattagactcttttccaatgtttttaaggctaccaaacaattttttttcttgggtgtttctgtgatttgtgtgtgtaaattggtatattatgagattttttttttttcaatttttaacattgacatttcacaatgatttgggggtgtctaatagctttgttaattgagaaaagcaccattctttggagaaaaaaaaggagctcagatttgggaacattggtagtagataggatctatgatctagtttttgtgttgctttgagtaactgtgtggtttttggtttcatttccaaaatctagcatgggaagtgccgaactgcttagttgctagagaagttcatagtaaaatcgacgcagactgagatttttgacccatttgtcttcttttgtttgagttatgttcataatgaattggcttagaaactgttttacaagatactatgaagttgggtatttggattgagtttgtatgttttcttagggaggctattctggaagttgggattatggtatcattttgttttgttttggtatctaattttgtctgtgatttcactgtgcattacacatcttttataactctttccagtctagaaacctaagaatgtggatgtagatttaatatgtgatgtagagttgtgtgctagtaaaatgtttgttagaagcattaagaacaagaacagaacatttttctaatttaactcactgataacattttgtcttactgaatgaataggtatctcctgaggtacattttcagaaggatttaggattggatagcttggacaatgtggagattgtaatggctttggaagaggagttcaagttggagattccagataaggaagctgataagattgactcctgtaatctagccattgagtacatctctaaccatccaatggcaagttaatattcttctgtggctttttctcttttttaaaaagtaatttatctttgtttcttttcttcatctattgggtgtttgtagaaatttgatccagctttgttggaaaataatctgaatctggttgaaaaagaacagacatttcagaactaatcttttttgatatttcttttttgccatgcttcaattttaaactgttgtaaaactatttatattatgccatgtctggatttgtttgtgtttatcttatagcctgttttaataactcgactttcttattttacttgttgcaagtcacaagttacataatattattatgttggacaatatgttatatggtaaaataaaagtatctgataaaatcttataggtgatattgaatctcatttatcatttgaatcggaatttaccacttcaatggagtagaaattacacacaatgtgggaatatgaacaaaatttgacaaagttggcatttttttgtttatccacctattatgggattacactttttttttattataattttttcaaataccataaacaaaagaaagaggagtcctcttgccaaccctaaagcagttccaacgtcaaagctccaccatcgtccgcctctgtctaaccttctccatcggtctgaccatcatctcaaacctcccgtcttaagaaattagataattggtgccatgttacacataattgaagccatatacagtacacgatatatctaaaaatacacaaattaacaaaaatcaaatgtatcaaaacaaaaatcaaaacactaaaaaatatcaaatgttacaatcataacaataaattatttttactcctatattatagtaaaattatttttgagtaaatatatctaggggaattactccatatgttgtttttttaactttttttttttttttttttaaatttatggtttggatttctaaagtggttgcaacgttagttgcaatagg

SEQ ID NO: 123328 - DNA, 3022 bp, Cannabis sativa
  modified_base (2981)..(2996): a, c, t, g, unknown or other
tcaatgtactattaccctaaatgctaagggaaaccaaaccatgcttggaaaataacacatatttggagaagttgtgatttcggggccttggcatgtaaaccaattaaccggttttacagaccctgtaaaaccggtcgaccggtttgcaccaacaaaacccaaaaatcgcataactcgatcaaatctttcccaaatgcaaccatactcaccagaacacctgaaaacacattctagaatagttcccacacaacagtagtaagaaaaacacaataagaatcaacacaccattgttgagtcaagtttgagctccatgaactcaaacttgctcaaccccaaaattaaacatcaatagtagtacaaacaaccttagaatatcatttaggacctaaagaaactaaccctaatcgaatttcacccacacagaaccagaagtaccaaaatcaactctaaacctaacaaaacttcctgttaacatatataaatccataatagggcaagcttagggctttaccttagattgagtcttcaaattcacacctaatagcctaaaaaattgacagaaaactccaccctaagttggtggttgttgctggccgaacaaagaagaagaaggacaatggaggagcttttccttctatttcctcatttcaaaaaatcaataactaaaaggttaattaattaacatttattctcttaaatggcagttttcactcaatggttaagacacctatccaaaagggtgaaatgactaaactacccccacctttaaacctaatgctataatcagactaggggtaaaatggtccaaatccacaacttcgccaacactaaccatttgagcttacatgacatattccctatcactacaaagctctatatttccccaagtgactaaaataacctccacagcattttccatcatcgccgagctaaaatcacaaagatagcatatatttaacatctaacataatcatttacataaaacatcaatattaatgataataataataaaattagtacttaaatttccactaatccatgtttaaatattgcagtcgctacaacgctactgacggtgccaccagaaggggcagtactagaaattttgtcccacctactaacggcacgagccaagcataaattggccgaggccctggcgtctttaggtctgtaaatatcgagggaatcgaccccgagatggatcaattacgagatgcgataggctgaatgtaaggccagttctagactatgcaccaagagcaaactcaagctcgggcggccttgaccaagagtcttgctaaccaaaggagagaattccaatcttggttggaagatcatgctcgtggaatgaggaggcactaagacgaccaagactgtcgcacccaagaggctgtcgacttaatacgaaggtacttcaatcaaaacactcaagggttgggtattgacacccacaatcaactgatacctcaaacctatcctcaggaagtccctaccccaaggaaccagcgggagagggtggtctatggacctgaagagcacccaatgaaccaagagagggctaggagtcacccctccaataaggttcttcacaacaataattgaccgctcccgaccgatgagcaagttctacccggtcattatatgggacgtgacgactcccataatatccgtctaaggcggagtggtggaggaaactctaggaaccacaatggtactgtggcagaaacgatgcaaggacaccccaacattgggagtggaaaccccatgaccaacgcggccaacaacgagagggggatgattgcccgagaatagtaggtctaaggggagaagagaagacctcgaggtcaacagtgattaccgcccaaactaccctgacggtcacgatgatgatgaagctgaaaggtcgggccaacaaccaaccaaactgagttgggggttatcaagctggagggctatatgcccctaataggcaacatcaacctgagaatctgccccaaaggggtagggatgaccaggtaccacgcctagtcgatagaagggctgatagtcaaaatgtaggaggaaggccaagaattgggtcagtctttgaacgtgtaggccctcgagggggtagagacctttgggacgccctcaacagaaatagggacaaccacggttccaacatagtaaatccatttgagtcggttcaaagagaccaagcgaatgctggcgttaatgttgctcaaccccaaacagccacatattcggtgatccaagctcggtcggatgagttaacctaattggtcaatgaccttgctgcaccaaaactcactgacttggagctggaaaggaggagagggtgtgccttctcccaaacgatcaatgacctccccattccagcgaaattcaaaatgccacttgcaagtaaacaggtagtgaagaccctctaactcatgttgaaaacttcaaaatctaaatggaccttcaagggatcatagatgacctcaggtgtcgaatcttccttgcaaccctcacggacacacggaacaatggtttactaaactacccccagggagaatcacttcttaggatgagtttgaagggttattctatacccaattatcttcagtccgacagataccagcagagttgggtgacttggtcgccatcaagcagaagctcgatgaaccactaaaagactacattcaatgctttatacaggaagcaaccaaagtaaaaataaaatctaagtgacgatggcaaacatgccgctatcatgtggggcattctggtgggaagtcggctatggaaggatataaggtggaaaccaacccatactatgagagatttccttgatagagctgatgagttcatcaaattggaggaagccgagcgaaatgctcaaggcttcaaccatactaagagcaaaaagaatgaaacgagctcgaatagtcaaagctctcaaaagggaaacggtaagaatgtgttggaaatattttacnnnnnnnnnnnnnnnntaccatgtatgtttcattaacatcct

SEQ ID NO: 123329 - DNA, 2257 bp, Cannabis sativa
  modified_base (1208)..(1225): a, c, t, g, unknown or other
tattttacccctcccactaaacttaaactaaacacaacctagggctattttgatcatttctaatttccctgatcaaacctacttctcaacattctaaaatagtctgatataactctaatataatgcaactttagttgccgtgatatttctaaccaatctgtcgagtttccacagtgccgaacccgaaaaatttttattttgaaaatggtatctctacaatacccccataatccaataaattcttcgtaattaataaattacactttatttattcctttactcgtatttcactttatttattcctttaataaaatatgtctaattaaatatcattatattttttagaatattacaactatcccctccttgtataaatttcgtcctcgaaatttatctaaacaattcgggatacaactttcgcaactgcaactctaactcccaaatcgcatttcaatcttgctgttcttccatagcaccttctcttttctgttcaaattttttgtactgactgttcctcatacgacaagtctatttgaaatttaatattctcataactctgtatatggatcgtacgtacctcgtacttctaaaacattgaaatacatgttataaactccatataaaacatggtgtatacctcacctaccttttccaaaatttccaatgggccaatgaatctgggactcaattttcccttcattttaaacctctgaattcccttcattgggaacacccaaaggaggacaaaatcctcaatttgaaattcaatggcctcactcattctttggactgcctcaagtccaaggtatttccattcaccggcttcatcccaatgaatgggtgaacgacactttctaccataaactatctcgtacaataccatgccaatagtaccctgaatagttctcttaaactgaactctagtttggtatccattgctcgttgtagactctcccagtacttggatgtaaacttcgaatcttgatctgaaacgaccgactttgggcaccatgaagtcgaactatctccttgacaaaaagatcagcatactggtccattgtatacgtagttcgtactgataaaaagtgttctatctttgtatatccatccataattacctagataggatcgtagaactctactgttcttgataattcaaccacgaactccatggccatttcttcccatttccactcaagaatctttannnnnnnnnnnnnnnnnnctggtctctgatgctctaccttgacctctggtaaattaaataattgacacatactccacaatgtcacctcttatacctgaccaccagtacaagcttttacattgtgatacatcttagttgtccctggatgtcgtaaatatggcgtggtataaagctcatccagaaccttctatctaatatcatcattagctggtacataaatcttgtttctaaatcatactaattcatctaataaaattgagaagctctatgctgacctagcttcaagctttcctttatactcttgtaattctagatcactctattaggctgtcttgattcttcctaacaaatgagactacaacgtaatattaactagttttctaactatatactcaatccccactctggtcaaatccttagccaactttggtgagatcttcttcaattcatactcttgccttggacccttttaacttagaacatttgctaccacattttcttttccaagatgataaagaatctcttaaccataaccttttaccaattcccaccatcgtcgctgtcaattttacattatgcgtaggacactgatgtttataatccttcaattacttagatacataagcaacaacttcccagaactacatcaaaatgcaatctacccctgtttaaaaacgtcacaataattcacaaatttcttattactgattgataaggttaaaactagtgcaataattaacttctacttcaattctttaaagttacagtcgcatttgtcaatccaaacaaactttcaattctttcaagttaattatgttaagggcgtaaaaatcttagcaaatccttcaacatatcttctgcagtaccccgctgatctcaagaaacttctaacctcgattgcagacctgggttgatgctaattctgaactacttctttcttaactgaatctacaaagattttgtctttgttcacctcatgcttaggaaacttacgtggggcagccataactcgtgtttcttacatttagcataaagcttatgctcccagag

SEQ ID NO: 123330 - DNA, 1200 bp, Cannabis sativa
ggcactatatatacatatgagtaatgtgatatgtgatgtggaattcatcatataacaatattattttggaaaagtagtttttcagttttacgaacagtacgtgttataaaaaactatatataatatatgtagtagaaatattatattaaattcaatttattaattagtctctttaatttattggacaatattaaaatttctaatatgtcttcttaatatgtgtataatgtcaactatactggcaatgaaataatatgtgtgcatgtatataataagtttgataggactgtgttatacaaacacaatattacaataggatttacatcaacatcattgttgataattgagcattttgtcggtgttgtattttggagaaagactatttatgatgatactaattacacttaattattatagcaatgcagtacgtacgtagcaatgactcttcgatttaatctcttagggcccgtcaactgtatttcccatacttgggtccatggatcatcctctcaaccacctatatatatatcgccccaaccattcatcaccttttaattttaaagccatcaatgatgatgattcatatgtgagtagatcataaatttggaggctagctacatttcattttgaataaaatggaacatatataagaattaagatcacatgtgaaaaattggtgtctaattatataataactcaacacgctacttttcttaaatgttatcaaccatatagatagtttttttccataaaatactctaaataaattgtatatatatttaaataatttaatacattatggtataatattttttaacaaaacatctttattccatataaaactactatcttttttataaaaatttcgtgttaaaaaatattatctcatatcatactatattaaacaaatttaattctgacaagtcagttaacttaatttatattaaacatgctaactacttttattgactcttttcttaaaaaatttattgacgtgtcaaacttagaattgtttaacacattatgaaacactacttttaaaccggggatcttgattaattcccttttttgtgggacaaaataaaactatacatattgttttaaaaaaaaaaaaaaaaaaattggggcaaaatttataaaaaaaaatatttttccattttttaaaaagctaatagccaatatttattataaaaaaaatta

SEQ ID NO: 123331 - DNA, 765 bp, Cannabis sativa
agtgtttccagcgtactttgtcctcactcgcacacttcttaggaaaacttccgaggaggtcactcatcctaaaattaccccaggtcaagtacgtttaactatggagttcttttgtgatgggctacaataaaacaagatacaccttgttaatataggtagtaccattcaatccatttaagccctcttcaactatgtaatcctatacctacacagtctcataatcattacacatgaccttcctcaagcgatgtgggattgtacatgtaaagaccgcctatgttgatatgttggattattaaataattagggtttatttatgagaattagttatttattatgatttgtataattatggaaatttacttaattttatcatgtggtaattatgctatatgtgaatttctcgttttctgtgtttgtattcggtagcagtgggaagcgacattgggccaatagagagtcatgctttatatggtttagagttttggtaatgtcggcaccatttggttgattcggtagtattgggaatttgtcgggggttggtaatgaccaaactaccccttgaggggcatattgttatctttttgtgttaagggggcaagttggtcattttagttaagtttccatgtcttttactagatgattataatctgaaaagaaattatattttattaatgtaaataaagaaataaaaagggttaatattagagaaaaccaaagaagaaactggaatacacatgtcctctttctctttctctttctctc

SEQ ID NO: 123332 - DNA, 1592 bp, Cannabis sativa
ttacaagtgtccaagttccattagctttgagagcagtgcattcagtgtgcattgtagcattccatgtagggtcattatgtgctgctttcaaggactttggttcacgaggcaaaagcaacttagccaatttgtgcttgattgctagatatgctttaggcttgaaaataccatgttgagacctggttgtcatggtatgagtcttttgtggttctgcaacatcaggaatagcagaggaggaggaggctgcagaaccagttgcaatagtgttgactggtgaaatagagttcttgctatcactggattaaggcaatttagatgactcaagggaggcataggatgcatctgaggaagatgagtcttgtgcagagtttggaacaacaacttgttgagttggtgagatgtgagactcaaatacaacaatagaacgcacaagtactagtatgaacatcagtagtaaaaaattgagcagttggaaaagaggttgagtgaatagggatacctgttgagtgctagacttagaagaggcatgaaagtaagtatcattaaagactatatttttggcaacaaagagtctgtctgcaacattttcacacaaatatcctttgtgctttgaagggtatcccaaaaagatgcattcctcaaatctgaactccaacttatgatgagcataaggccttaaatggggaaagcaagcacacccaaaagtcttcatgatagtgtaatctggttgttgttggaacatgcactcataaggattgatgtttccgataacaggattgggcaatctgttaatggagtaaacaacacattaaaatgcatgccaccaataacttaatccaaatctgagtgagcaagcaaggttaaaccagtttccgtcacacgtctgtcacaattactttccagtgtgatgatatcacagtaattgtgaataactatatattcgagatttaatagaacttatatattaaacctataattatgtgtaaaacatgtgaatcaaagcttacgactaagtcatgatatgatatctaatctttattgcaagtaaataagattacaatgaaagttatttttatttagggcataaaatctcaacaattattgtttcacatatccaagtcctctttgatgaattcaacaaaatccagcagactaccggtttaaaagagaaatctaattgtacatcaacgttaaaatggatcactccaccacttagcacctttaaattaaaatgtggatggatcattgaatgagaaaagtgctacaattagaattggagcaattattcagaattcacaatgacgggtaatggcatgcatatcgaaatctttatttggaaatggagtccttaattaagttttactgatttaggaaaatcttcttatgatttttttttcttcatgtttttaaataataaaatatgacgtcaatttcaaatttctatgtgagtataatttatttatctttacttgtcaaaatattttaacctcatacttccaaatcatcttttcattaaatgaataattttatatacttttttctaggggtgttcacagattggtttggtccggattttcataagttttgaacca

SEQ ID NO: 123333 - DNA, 1504 bp, Cannabis sativa
gtattttgggcataatagaaaaattgtcatatattttaaatatagggtattatgagttttgaggataaattttattatttattaagcatacaaattcaaatttccctaataaagttggatttggtcatttttttttattatttgatttaatgtggtgaacatagtatatatgtatatatttatatggaatatttttcctatagttagtaagaatatttctaatccgacattaaaaacataaatttagtgttttctcactaaaattaatctaaccagacactaaaagttatgatttatatgagattatttatattatttcactattgttattgggacactataaactacaccaaaattattattttttttattttttaataattaaataatagttaaatgattaatttttattaatgtatatgtattatttatatatgataataataaagaatatatatttaagtgttgtgattggaccagggaaaaaaataatgctaaaattatacttttactattggttcaacactaaatttaacttttattattggagttagcttaagaaaaataattataaatattaattttaaaatattaaattattaaattttaatccaatgataaatgataataaaatgtgatttggtatttattaaaaattattctaggatttgataataacttataatcattaaaataattagctgcattaaatagttcatgtattatgtcttaaccatttgaagtatagtagtgataatttttagtacatgttacatttgaataaaatatttaccttaaaattccttgaagttgattgcttgatttgtttgtttttgactgaattatttgtttatgctcaattatttagccatggctgctcttagcattggtagttagagttcttgtcatcatactatttgttttcaaacaaataatgtattatagtatatagtaaataaactatatcacctatagttaattataaatcaaaagttatagcataaataagatttttcttaaatggtaactataataggttagagaaaaaacgccataaggtaaaagtgaagagattctttcaattcaaaaaaaaattattgtgtatactaagagcatgctaaactaatctcataaacattaaagtatttatgaacaatcctatgaatgcgtaataaagaatatagattgaacatatacaaataaatgatcaaatatttgtagacattgattctttaagattcaatcccatataaactttagatcttcaaaagaaaaaggaaataggttagtatgggtaatcaggctttcaagctctctttcatcaaggtctctgccataattaattgtcagaatatcttgacaaaaactaaatcgagaaatcaaatatttaaaaaatcgtaatctgaccatatatagaatattaacaaattaattgtatctagattcaatgaatactgctttgttggaaattattttaccaggatgttagatctactcacaagta

SEQ ID NO: 123334 - DNA, 1794 bp, Cannabis sativa
aaaaaaaaaaaaaaatattagttatattctaaagaacttaaaagaggtgggagttcacaattattcttgattggttgagtcaaatctcaatattagtttgagttttaagctaatataaaacaacactacttttatagtttttatgttttcaaatcgtagtgtaaagtctttttcggcaaattaattaataaaatattatttttaattaatttaagtttttattgagcaattaaattaattttattgtgataaattcgtgctctaattactccaattcttttatagaaaattttattcccaattggttgtaattgtttaggaaatttctcctacaaattttctatatgaaaagttgtctatttttgagagacttgactttttttttttaattttttttttttattgatgaattcagtttcgacatgtttttagacgatcgaacaaactttattatttggcaaagattgaagtctaagttcatgatcttagtccaatttgaaaagttattttctttctagtaatctgctactgcagaatttgattttgatgctacaaattaggaaatttttgaagaaaattttgtacaattgggaaatcgtgtttttagctatctctagggttgatatgttctatcaataggacttagagagcaacgaaacaattttgacttattctagtttcattattacatatttttttatttgtaagaagggggagttctttttgtgagaacctagtgtttatgctattgtttttatgctcctcttaggattggttgaagaatttgagtgaacaagagaaaggtcttcaagagaagactagtttaagccttacttcgggaggaagtaagcactcacacatcaaagacaatgggagttcactgttaagtctattgtatttgtaattaattgagactttactaattgattttatccccgtggactaggaactgttttgaaaaaatactgatagcacgtataattctcttgtgtcaaattttttaaattctgaatttatttatttttggttctagtttaattctacaaatttgtgttttgcagtgacaagattgcaatatgttgttacaaactattacaattgagtttttactaaaatttaataaaattatcggtatttgtacaaacacaatttttcacgtagaatataaaactctctaaatatttttcaaccaatcacaaatttaattttttaaaattcaaaaatattaaattacaatatcacattacaacaaatcaatacaaatttaaaatttttgtttccaaatcatttttttttcagaaaaaataatttttcaataacaaaccaatctaactcttattgaatgaaattttttacacaattttttcgtttttattttccactttttttttctcatatatattaggaccatttctctttccccaccaagatccaaaaaaaaaatgcaatgacaaaccaaaaatagctatgaaaaacatttgaagatctggtgtgagagaacggcagtgtcggttgcctatttggacaatggtgtcgttgtttggtaccaattaataacataaccattgaacgacattcacccatataagcattgcaactcttctattgcagttgctaacatctatagcgttttttatggtttttttttcagatttcaaacaatactaatggcattgatatactttaatttacatcttttaatagatgctcatttattattcgagatgcaaaaatggaactctatttgtacaaaaaaaatagtttttgtgatatttttatattaatttttattat

SEQ ID NO: 123335 - DNA, 1103 bp, Cannabis sativa
tttattggccacttaaataaatatttaaaataaatgaattttaaaaataaagtaatctaaaataaaaaataaaaattaaaaaccctaattccctaaaagttatttctcttcttctcatgcttactctcattgctcttaaccaagctgtcatccaccactattctcttctgccccagacatcgccaccatcttacgacccaaacctcaccacctaagcatcgctccctcccttccagacccttcaccgtggagttgaatccaagccatcgcgagaccagaacgatccatcctagtcgcaacccaaatcgatacatccccgttaaagtcgccaacatttcctccttcgagtagcgagctaggtgcgaaaccacttagggtgtcatcctcatcgtcggtggtgcccgtgatcggagaagcacatgtgagtgtggcgtagatatgttgttcattgacaaagtgggtttaaatctgatctctcccgatttcccatctcattctctctcagatctcctagctctctctctctctctctctcaccaaatctgtgtcagaggtgcgtcgttctttgataaagtttagctcgttgacgtcgatgaacaactagggtggcttagggtataggcgatttctcttctcgttaagtgtctcttctgatctaattcccatattattttttaattatttttttgtgtgtttgaatctaattttgagattgatatgagttttgttgttgtttttggtttttttaattgaaacgtgtggaatatttcatatatagatttgttgttttagatatgggtttgttgtttcaaatttgagataaaggaggcattggtggttctttgtaagggtttcgaggtagacgtgagcgagacaggagagtgagtgaaggaggagaaagggttttggggccaatgggttccgtcagtagcaactggtggccggccatttagttggcttgcttggcaaagatgagagagagagaggagagagagggaggcatattttgttagggcagtttctttttctttttgtttaattttaaagttaattgcggcaaaacccccaatagtttcattttacttgcaattaacccccaaaac

SEQ ID NO: 123336 - DNA, 1660 bp, Cannabis sativa
tcatccccaaagtcaggaacaaattgagcaacaaaagcctgagggtcatattcgaaactttgttcagtgagattaacctgtggctgagcagcagaagccttaggtgtaacccaatttctatcaaaacgatagtggcatgtaatagcagtgtgcccaaacttcatacagacttgacataagggtctgttattattgataggtctagagccatttgtccgattgaagaaccttgtgttttcagaaccttgtcccttagcagagccattaaaagacctatattgaccatttcttgaaccaactgtgagatttgctgccatttttgcataaagatccatgacagatgaatgtttttccagtcgagactcatgggatatcaacagagcttggacttcttcaagggataaagtatcactgcgagaggtgatgctagaaataacagagtcgaactcgggaccaagtccattgagaagatgtaaaacaagatcaaagtcatgaacagggtgaccagcaatagccaaagaatcacagatagatttgattttatcaacataatcagagatggacatattacctttctgcagattcgttagttgactcttgagttgaagaagtctagctttagattggctagcaaatttctgctccaaggctctccaaaccgaattcgaagtgttgtaacatgccacagtagccaagatgccttctgtcatagatgatcgaagccaagacaatagtaattgatctttgtgtctccactgcaagaactgcggattttcaacaacattgatgagtctttctagaggagcttcattgctgaaaagaagattgtcgaggtcatgaccgatgactgtaggaactacttgcgatttccaggagagaaaattcgtgcgatctaatttcagagtcagggaagctgtcaaagaatttgaaaatggattccatggggatgccgtcgaggaggactgagctggcatcacaacaggatcggagcctccagcttgcgacgagtggtcaccgaagaaagccattgacacaagtcaatggctctgataccatgaaggatttgagtagaggaagaaagaagaagaacagagtttgttcaaatagagagaaaaatgaaaagaagctcaactttattaatgaactgaaggtgtttatatacaccaagaattacaacagaaccaaaacaatacaaccagaaatttaacaaacaaagtaatagaaaataacagaactgtaactaaccaactgtcaaaacagttagttagttaacaattgtatactcatattattttatctattttaatttttacttttatttttatattctttaaagatatatctacttttatagatgacgtattatacttctatgttaatataaattatatgctagaattaagtaaaagataaatgtatattgagataataattataaaatataggaatatttttaattaatggattttttttttggtattccttaaggaaaattatagtaaatggccccaaatcataaaactatgttagtatatgtcctcatttaaaaaaattatagcaaatgcccctaaattataggactatgttagtaaatgtcctcatttcaaaatttgtagagaaattaaattatttattatttatattgccttttgtcacataa

SEQ ID NO: 123337 - DNA, 1147 bp, Cannabis sativa
  modified_base (41)..(61): a, c, t, g, unknown or other
  modified_base (107)..(127): a, c, t, g, unknown or other
cgatctatagaattcatacattatgtaaataatcatgaaannnnnnnnnnnnnnnnnnnnncattaaatgttatttctgatctttttaataagtaaatctgattatnnnnnnnnnnnnnnnnnnnnnggcataaaacccaacacaaaggttaaaagatacctggctcctcctctagatgacactctagatggctcccatagatttgaatgtatgcagtcaagagttccctttatgctgtactttctaacccctaatctgagtcttgttaccttccctaacacacattgctcacataattccatgtcttcaacaatactttttccaagcagcctttccgttgtcaagatctcaaggcccttcatgctcacatgtccaagtcttctatgactaagcatattataattgatcattgtctattatgccattgctgattgatcctttgttgtgttccattgcaggatgtagaccccatttattgttgatcctttcattacatttattgaccctttaagaatcttcacaatacttttctcaatttttattaggtagccttctttgtttagcataactactgacatgagatttctcttaatcttagggacatgccttacctgccgaagttcaatcaaactacctcttacaaactcgatcttcatagatcccattccaactactggacaagatctattatctccaagcttaactgttccaccctcaatttccttatagttacaaaattgaaatttgtctagatagatgttgaaggaataacttgagtcaattatccaattgagtccaaagtatttgttatccggatttttgccaaaatggcacgtggatactaattaaggaaggacgaggagattaagccacctaagtgtcccgccttgcgctccgggaagaaagcatcataaaactcgcacaacaagcccctacgagagaagcctttccaggaggagaccacgaaagagatgtccgcgggccagcgacattctccattctagaagacgggccccttttgttcccgtgaaaggtacgagtcttttaccagggtgtgttcgtctgggatatgccttcgacccgcaagagtgcagcccgcggacccatacacctattgagactgtgtaggtatgggactacacagtt

SEQ ID NO: 123338 - DNA, 850 bp, Cannabis sativa
tgccgtacattacgaattacaatccgtgaaagtacaataacgggacaaaatcatatccctatgtttatatatatttattatgcatgaggaagggggattgagaaggtggtaaaagaaaaattaaatgtgaagtctttgaactattattaaagatgataatataataaatcattttttttaaaaaaaattaatataaacaatttcatttcaaggaacatataaatttggttaaaaatatataataattctcttcaaaataagtatattataattatagatatttataaggataaatagcggtatgagtacttaatgtttataaaattgtaatttttctctaattttgttaatataagactttgttattattttacacagagcacatataagatccagattttagatcattaagtttggatagaaacatgtagaatccgttatttttaaatgttcttttaataaatttaaaacagagtctatacggacaaaactgaaagaaattgaattacaattttacaaatattaaatacttatgtcattaaaaataaataataagttttaacctatttgtaatatatatatatttataggtttgaaaattttgttttgaaaaaaaatataaaaacataaaaagttaaatcaatgattaataaatatgaacataaatatatactattttaagttcaaattttcttctcctaatgccaataacaaaaattctataatatatttattaggatatgctaaaatgaaaattatcctatgtgtttatagaaaacattattatccaaatatggttttgtaaatttaggtgccgtttggtaacaattttgttttttaattttttaat

SEQ ID NO: 123339 - DNA, 1058 bp, Cannabis sativa
atctacaaggagtaagagatgacgtccggtgcaaaattttccctaccacgcttatatgcttagctcgaggatgatatctaaaggttcccctggatttattgaatcatggaaaaaactagtggatgtttttggcaaccaattcactccttcttgacagtaccaaatcgaacccaatgatttggtagatgtgaaacaacaagaagatgaatcccttaaggactacatattcaatggttctcttagagaggcaactctgctaagacaaaaatacttagcgaagatgcaagggtaatgacacttgcaaccaggctcaaggagattagtcctttgtggttcaacctttgtctcaagttagtctacactatgaatgactttcttgatagaccaaatgactttatcaagcttgaagaagctgtcacttgagccaagggctcaaaaaataaaaagaagaaattgccaaactctccaaccctgacactgggatgcagggcaatggggggcggaaggaggtttaaatgtaggaaagagagctaacaacgtaggaaacaaggtagctcccttggcataaagaaagccaaaactggaagcaagccccttcaggagtatgaacctcatttcacaacctactctattctcctagtcccaagagaagagatctatacagccacccagtcaatggtgtcgtaccgcaaacctcatcccttcaaagagtcagggaaaagagacatgactaaattctattgatatcacaacaactacgatcatgatacaagtgagtgtaatcgattacaagatgagatagagtttctaaacagacaaaagcatgctgctccttagcgatatgtacgacctaaatctctagttgagggcaatgcaactctctagcttgcacctatagcaggcaagctcaagatcgtgattggaggcccccacctagttgggaactcgagaaaggccttagaaagatacgcaaggtctttacaacatgagccaagagcagaagtattggaggttgtaaaatgtcctccgaaatatcaacgctacgagtatgatccaat

SEQ ID NO: 123340 - DNA, 994 bp, Cannabis sativa
tacataccacgaggtcaacaccttcttgactataatgccaagaagaatcgatcttgatgacaacaaaagaaacatgaactgtatctccttcatactgaacatcatgagaaaaacactcttctctatcaacaacaaatctaatccccaaagttgtttccacactcaacaaaaaagccaccaaaatccataaaccccatttcatcatctgcacattcaaacacaattcttaaatcaaaatcaaatcttttttcatttccccttaaaaaaaaaaaaatcaaaacccataaaataattttatgaaaaattgaaaaaggggaaaaggggatttcaaaaacctaaaatttcgttgaatttgaattgggttttttatatcaacatgcaaatataccagaattcaattaaggagaggaataaaaattagaactttacagaaatgatttacctttggatattttgatctcgaatgctaaagatgtgatttttgtataattatatatacaataagtttatgtatgtatatatgcaattgaatcgatcttttgctgtggtgataagctattggtttttggtaaacgaatttgataagttaaacgacagctcatagaaactggagtttcgatcgaagtagttttgttaggattgattgattgaggtgttttgagtttgagatgtcgtttattattaaaaaaacagtttgagatgtcgttttttaagtgttgggccgcttttggcaattggtttgtcggcccatataaagagttcatgggcccaattgataatgggctttgattcaatactccttgcttccaaaacacatgtcgttttaggctggatgattgggctaagtacttctttctatatttctaacctctttctcaaaatttgcttataaaaattagggaaacttacaaaaatactgtttttttttcccaagttttacaataatactgccacacggcaataatttcttttttactgtccaagcccctttttt

SEQ ID NO: 123341 - DNA, 877 bp, Cannabis sativa
tatgcccagggccgggcctggttataatagagtagtcagcaaatatatatgtatataattatcaagagtaagagtttatagtgaaataattatgagattaataaattatttattatgtggttataaacatagtttagtaattctatacatctcacaaaatgaaggtactgtatgaagtttgaatctctcaatataaaaaaaaaaaaaaagaataataataataataaattatttatttatttatttttgtaaggatacgtttaataaattatttattatcttttttaaagatgaatgtatagtgtttggatgattattggatttaaatttaaatcaatgatctaaatttattgaattactgttcttgggtgaaaggtaaaaaatgaccttgatatactgatacgagtgttttgatggtgtgggttagagtctgtctaattgagtgtcaaaaaaagtgatatatgaccatattttatttttagcacacttaaaattttttttgctaatattttacaaattgtgttaaatttgacacatcataaacgttgtgctaaatttgatacacgagataatattgtactaaatttagcctacaataaatattattttttcatttaaattttttttcttcttatttttgcacttcaaaacaagttcttttgcatttatacgaaattccacatagaaaatcttattgcaactaatggaacaacctaagtcgcaaataaaattcgtataacaactcacatagaagccaccaaagaaactaccttagaaacccaaaccgtaaattcggaaaaaaaaattaaaaaatagtatataaggtaatttccctactaattattataatttattaatggctaattaggattttttt

SEQ ID NO: 123342 - DNA, 1408 bp, Cannabis sativa
tattgctttattatattttcattataacatatcgtttatcgcttataaaaaagactcattgtcgttggcgaaaagcgaagtcaacaaataccaaccaacatgagcacagaaaatctcttcaaatttgcaatattaatcgcacaaaaattgcataaacattgcctaatgtcacacaaacaaagaaaaccccaaaaaaagttatatctcgaaacccagattctttcccaaacacaaaaatttataaatcgaaaggttagtcaccacatttcaatttaatcacagattgcaaatttaaagtagcaattaaagaaaaaaaaaacaaacctgggttggagttggtgtcgtggacggaggcggggaaggtgatcggagactggatggagctttgtctcgtgggttgttgaggtgtctcgtaggtctcgtgggtctcgtctgtcgttgggggatctcgtgggtttcctaggtcgcttgggtggagtggtttcctgggtcgtcgtgggtctaatgggtttgaatggtcgattggtgggttcgagtgggttcggttctagaggggatgggtttgtgcggtgggcttgaatggtcactgtgagtttgggagagcgaaagaagagagagaatggagttagagagaatggggggagttgcaaaaatgggtaattttggaaggaaattgacagattggaatatttttcctatgtgtaataattggatttaattaaataccataattaattttttagcatagattatcaaattttctttttaatatttgttattgttcattcattgggcttgtttgaatccatgtgtattatataatgatatatatatttgaagaggagatgacgcttttactttttaaaaaatatttgtagatgagtggtactatcaatcttctattacaattttttattaattttcgtacacttaaacatatgtcagaatatattttttttaattttttttatatcggtctttgttatatttacaatattattcttataaatttttaaatttttttaatagtttatcgtgtcaaaaataagcttgaaatttttttaacagatacggtaaactaagaattctatttttagtattgtaaacaattcagaatttttaaaatttttactagaaattaaagtagtaactataatgaatactactataaaaaaaaaattaaaaaaattctaacatataattacatcgcaaaaataatctaaaaaattgtaattagcattcttttacttttgtatagtctaaagttaatctaaaagccgtgtctgaattcagaaagtgacattgcaataatattcacatattttaatgaaagccgttttctatatttcatagccattaggagttttttttttatttatttatttttttattaattttttttatttaa

SEQ ID NO: 123343 - DNA, 1278 bp, Cannabis sativa
aaacaaaaaaaaaaatgattaaaaaaaaaaactaatcatcttctacacaacctcaacactagatgcaatagagactatatttacaaactcagtcctagaaaatcagaataaaaaaaaccacactcttatcttcccaaatcttcttcttcttcttctcacaacatactctttttttttttttggttacctactacaaaaagagagagttagcttttatttgactaatgttagacttagagaaaaaaaaaaacaaaaaagaatatgaacagagaaagataataaaaaaatagaaagaaaaaaaaactaatatactcacaaataaccatatggatttataaaaaaaaaaaaaataaagaagtatagatttataaacaaaaaaaaaatatagatttgtaaacacaaaaagaaaaataaataagaagatgaacagaggagagagacgaagaacttaaggatgaagatgatgataaaaatataagaaaaataaaatgataaaatgtcaaatagaggtaacgtgtgattgataagaaaaaaaaaaacctaaagtgacaagtctatataaaagaaataaaaaaaaaaaattagtataaaaattatatgttcagtataaatattattcataccgatatacagtaaaaatataacatttcataaaaattacaaaaataaaataaaaatccaatggcatgcatgataaaaattgtgtgaaattttgcacatgttcaaaatttgtgtaaattttgaacaaattatgccattctaccaaacttagcacgattataatatttatttagattattgccatttaacataatatgtgacttttttttttttgaaatatacatcatgagtgacgttagtacatatttttaattataatatgtacgtattgccatgttttaaaaaatatatatttcataatgactttttatgtcaatttacatattaatttactatagcaatctagcaaagcataattacaaaagttgtgcacgatgtaacatttacttatttttttatatcaaacttaaatcttttacatcatatttggagatgatcttagcattcttttagataaaataacttataataactgatataaatatgacatatcttattaaccttgtttatatatatactcaaaattgtagtcctttgtaaaagaacacctatgtatcactcatattcttaaagaaattaaaaataggctaattagtaatttttccttccgaactttgacatgtattaaatcatgccccctgaactttttttgccgtt

SEQ ID NO: 123344 - DNA, 738 bp, Cannabis sativa
ttgaggcaagtattgttgaagtttgctaatgtcctacgtgttgtcattgctgataaaaaggaaacaaagtgatcatcaggtttaaagttattcaaaaaagtgagggagttcaaacctggaatccaattggagtaaatcaaagagatggacttgccattacccactctctaaactaggcctttgatcagcaaatccctaccccagaggtggcttctccaagtgacagatgagtagtggcctatttaagcactaagaaaatcattgtatttgaaatatctgactttaaggggacaagacagaagagaggaaggatttgtccaaactctccaagcctgcttggcaagtgaagcctcgttgtgatggatgatagattgaaagcctagccccaaaaaaatttagaagcacacagactagaccagcttttccagtgcattttattcttatcgttggaggatccccaccaaaaattgcaaataagtctttggaggttttcacatgtagatctgggcagtttaaaataagactttgcataagaggatatagcatggactacagccttcataagggtctttttctagtactagaaaagaacttaccattccaaacatttatttttgaagaaacattttggactaggtaatggaacacagaactatcaacccttcccatgcattgggaaacccctaagtatttactgacaaacccctcaatattaagccccagggaatttctaaaatg

SEQ ID NO: 123345 - DNA, 1597 bp, Cannabis sativa
tagcgactgtttttattaaacgctaatagtatttgcgtcaatttccaaccaacgcaataattattagcgtcggttggtagatgacgcataaaatatttttctaaaaaaaaattaaagtttgtcatcggtttaaattttagcgtcgtacaagtaaccgacgcaaactcctattcttttgcgtcggtttccaactgacacaacaacttggcttccactttttgcgtcggtccttgctgttgaccgtcccgttgaccgacgcaaaatgtactttttttagtggtcttcatatttacatataatatatagatgagttgaagatataaaaaatacaaatactttgacacatatatgaggatggaaagggaaaaggattttaagaagatgattaaaaagaatggaacaaattgccatggatgaccatatatgctaaaaaaatagcattttatatgaggtgtctttctaattatttgttttttctaatttttttatatttatttcattttttaattattattttcatcatcgttctataatgtcacgtattcatacttttctcttctctatgtaaatatctcaacaacatatttgttttctttgttatctttttgtactctattttttttttatacatgtataaatattacacacctttgatgctatatataaaatagagcctaaataaaggtaaggtatgatattttaaatttatttcattctaaattatttcatttgtccttttctctaacttctataattttatgtatctaagttattttagctatcaataataatggaaagcaaaaaaaaaaaaaaatgttattgataactctattttgttggctatatgacctttggaattctaaggctagtattttgttattattagtggaaaaaatgtaagtgataacttttacggaaaaaaaaaaaatagttgaccctaattatatattgtagaggtcaatagacttttcctttttatttgtttttttctgagatttttttttatttaattatatataatacatatcaccttaggacttacatctacatatactattaaaagaaatattttgtggcttatcattctcaagttccttacttttattgttaattatttttatatattaatagctctatgatattttatatttttagctgttttttttatatatgttatgtggatttatatttgttttgacaggaagatttcaagagaattggtgttatgggctcactcaataaacatgacatctcacaaagtttttatacttgaaaaaaactaagaatgatttttagaaagaggttgtttgaatttgaacataatacagtgacattatgtagcccatgatttatgtatcatcttaacattaacaatattaatttatacttattatatagttgacttttatattttttgaattatagcatgtaattgattttaattaaataaaattttatttaattgattgtagtaacaattcttatttatttagtgtaagttttaaaagatgaacttaaaaaaaatcctataaatgttattttaaaaagaaaaaacaaaagattgctagctctctttaaatatgagtccaaaaaagtg

SEQ ID NO: 123346 - DNA, 704 bp, Cannabis sativa
  modified_base (102)..(102): a, c, t, g, unknown or other
ttaaatataatcatgaagtaaatcgtgtgaaccatgcaacataaaatgttatttctgatctttattagtaaatctgatcatattgaaatgagttttatttanggcacaaaacccaacaaaaagttcccaccaaaattttccccctactttttcatttgggcgggaagttgaccgccaaaaaattttagagctttcgttggcacagaaatgtgccggcaaaagcctaaccctgatgcaacgtgtcgatttgtgaaatgttaaatacttttgccggtgcaaatgaatgtgccggcaaaagcttcacctactttaaagcacacatttttttcactgcgagggaatttgattgccttttcactgcgaggcaaacctacatgcgctggtaaaaggtaattcgaaccgccaaaaatttccacatttttgcagttcgattgccaacatttgtgggtgaagttaaggttcttcgccggcacaactcactattaccggcgagaagaggcaccggcaaaacattggactggatccaatttgttgacctcttttgtcagcgcagttgttgacttgcgccgacaaaagggcacattcttgtagtgagtcattgctaagtgaaaattcataaataaaatatagtctaattttagaatcataattgattagttaaaattaattaactgagtcttacaagcagtattgtctcaactact

SEQ ID NO: 123347 - DNA, 1433 bp, Cannabis sativa
ttttagggagtatcgctagacaatcgcaacgcgacatgtcgagaaggtgttaggcaccattggtgcctaatagcaatgctcgtcaaaaaactcaaagatgaactcaaagtgtcgactaacctttaaagaaattgtccctcatagaaaaaaaaaaaaaaaaactttccttttttaattttttgaactttttttttactaaaaaagacattagaaaaggaaacaaatgagtaaataattaagatatctcacaatatttgcaataagtgctgaaatggaaaaattaaggttaataatctctcaaaacacagttaataagaaataatttacaatagaaaacctgtcaaaaattaaacaaacaaagtacaattcaacacttaccaaaagaaagacaattgactaccatttttaagcccacaaattaagatacacgactcccctcatttttttcgaacaagaaatgtatatttttaatataataaaaacaaaaataaaaggaatctatcatattttatacaaaaatcaagttactctaaaacatgtatgtatatctctaagtttcataaaaatgacaaacaaccaagttatgctttcaaaagtgataaaaatttagtgtctcaaatgtaaaccaatcttaccaggtgttgtgaaaaaataaacaagttacatgacatattatgcaaatcaagattttttttatttgaatagaggagacttacaaatttgtgttagactatatataacatgaaaatgaagcatatatgaacaatatgaaaggcgaaaaaactataaacatatcgaaaccgtatatgcaatgaagattgaaatacctccagctattgatgtttgagcttcaatcccagcaataactttggtatgagaatttgggcttcttcactctctcagctctctttagatggaattgtgttgtttgcacaaaatgagtgaagagctcagggaccgagatcctatatttataggtgagatactccatcagtatctgtgccacattaattatcagaatattttgacaattaattagaaaatcaaatcggatcatgaatatcaaaatttggccatatatataatatcacctaattaattttgtccatattcaatgaatataaaatatttatttatctcaaaattaattttttattttattctataaacgtttctcattatataatgaacatatgaatcatagtgatatgtcctcattatatgtcgagtattatcttccatgtattacaatatatttactatataacaatgtactttatgtggcaatatacttaagtaaataaaccttaaatcttatgtttattcaggtcctcttaaactttcttaaatgtaaaattaagatgcgcataaatatgagaaaatattaaaataagagtttcattaataataactttatttgtacaaattacata

SEQ ID NO: 123348 - DNA, 838 bp, Cannabis sativa
aaaataataaacggttcaatattcttttatttgttttatattttatttatagctgtcatgtgattgatttttttattgttttatagtttatttatagttgttgtgaggttgatctattgttgttttcttatatttttattttttgctaaaaaaatttatttttgtaattttaaaattttactatcgtattttaaaaaaaaaaattgtataattataaataaaaataagtacagatcttaaaaatgtaaataaaatttaaaaaacaaataacaaaaacatatttatgagaaaaacccttatcatatctagaattaaaaatatttttttaatgtagaattaaaaacatgtacttgaaaatttttagataattttaaagatttttctagtgaatttggatctcctagtttattcctaaaaattgttttaagaagttatttttaaaagtaagaatttttaggggacttttattcacaccaaaaaaaaaaagtacatctcaaatataaagttcacctaattttatttttcaaaaatcttattttttataaaaccacggaaattttattgcaaaattagatgtttaaataataataataataaaaataataataatagtttttagcagcaaaaccttcctaagtgttgtttcaattgtatttaactttttaagctcaaatttttagctgtaaaattctccaaattactgagctagtagcaaatttaaggtgtcattcggttaactgttactataggctgcttatatgtacactcttgtacacatgacacgttcatattggtacacttaatattattatttaaaaattatttttaaaatttattt

SEQ ID NO: 123349 - DNA, 1442 bp, Cannabis sativa
gaattacaaattagcctttcaagaattatgggcatcaccagcgacactattattaacgccatagagtcttcactatagtaaaagtatcaccaacgatatttaagtgtcgttagtgataaaaatacattttttgtttgataaaataataaattaatggagacaaacacctaatggtaatattatcatcattgataaatatattaatgacgacaatgtcgttactaaagctttttttttttttttgaagatggacaattgcaaaggtgggttttttctctctaaaactgtcgttgtttgtagtcaatgatggactatgcctacactgttgatatcaagcccttcacagtctaataatgacattaatatatacttaacccctctagttaatgattggagtcaattgtggtatgagggtgttcctgcatacaacacctttaggaaagaagaattttatcttaagcccatattactgtgaaccattaataattttctaattttcagaaatctttttggatacagtgtgaaagggtataatgcatgtcctatttgtgaggagaaaacatgttctatgtatttaaaaactcaaagaaaatgtgttacaagggacaccgaaggtttttgccaatcgaacatgtgtttcagacttggaaaaaagcatttgacggtaagcatgaatttgaatttccaccaccaccttaatttgcatgggaaacaagtatttgaaaagttgaataaagttcaattccacattggaaagcaaaaagcgacttcaatgaaaagaaaaggtcaccgtgagaaaagtgatgttgttacaaatgaacctcaagggccatggaagaagaagtcaatattttttgaattcgagtattagaagcatttattgttacgtcataatttaaatgtgatgtacattgtgaaaaatgtgtcagacaacttgcttaataccttattcaatattcctgggcagagaaaagatggaatcaaatctcgcctagatttgaaagagttaggtattcaagccaatacacacccacaagttgttagtggacgaacgttcttaccaccaacttgtcatgctctaactaaagtaaaaaaaaaatctttgtgtggttctatctcctaggtgaaggtactcctcaaatgtctcaaattgggtagatatgaacatgaaagtaattttgagtggtctgaaatctcacgatcatcatatattgattcaaaatacattctactgggtgagagtatccgttctgtgttgcctaagaaagtttgatatgaaatcacaaggttgtgcttgtttttcaatttttttgttgtaaagtggttgatgtgactaagttagagaatctcaggttagaaattgtagaagttttgtgttatttggaatattttttctcgccatcctttttcgacataatggttcacctaacaattcatttggt

SEQ ID NO: 123350 - DNA, 1615 bp, Cannabis sativa
atcttctttctccattcaaccatttattaatattggcaatagtttgactattttcatcatcatctttcctttgatcaactctttaagcttgaaaactaattcaagggaaattaaatctaaaaagattatatcctatagtctttaagaagtttccatttcatatttactattacatatacttagtttaattagagacaaattgtgtattgaaatgtttggtttttttgttggcttttaatttcacaagctaataatttttgcctaatatatatttatgttatatatacacaaatagaattgtgtaaattctagggttcattgtggttataaaggtgttgtatcatgttggagatcttccaactcttatttggttagaggctgtctttttatcttgtgtaattttgaattttcaatatattttgcttgcatttaattaatattagactgtatttttataatttttttgttatctttatgttttttatttttgaaattatgtaaaaaaataataaaaaaatgttgtatgttagaataagaaagagtcatggttaaatggcgagaaaattacattatatacctcttttaaattgatgtctttaattttttattcattttttaaaatttattatgtttatcacttttcaattcttaaatttttactcttatcatttcacgatagtctcaatttttctctaacaaaaattttgctctaactttcccacaaacatccacatttgtctctaaataaaacaatctattacgtttgaaattgtgttttagttatgtgagggtgtaaaagtaatttaggtacgtacaatacgagatatatttgaattaaattttatttggatataaatttagttaatgtatacgacaaaaaggtattcttcaatggcaatccctcaacccaaccatcagaataaatgggtcgaataacaccttatttataatattttgggccaatattggagttggttgcacattataagatcattttccaacctcaaaatatatacagaattatcattttcctgatttttaagataactttgtaaaaatatggctttttctctactaagttatttacaagaaaattaataaaaagttaaaaaaaaaatgggaaaacagtaaaagtaggggtagtaatttagaccagatacgataatacaatttaaaatccgcacgaaataaacgggttagggtttgccttaaatgggtttgggttatttttgggtcaacgcaactaactcttttactaatctgatcattttttgagttgacatgcttaatccaaaaatgatatctaataatctatgtaagaatatacacttttaaatttattatatttatgtcatgtaaattacattctttagttaaataagccataaacatattaaattgctcatgaatgtgtcataacaacattataatcatgttaagcttgttataaacatgttaataaattgataagttaattaaaattaagtatgattccctatataaacgggccaagtcaggtcaatccgtttgtaaataggttgggtttgagtttcagtttttcacacgatttataaatgggccaggtttggattaaatagtaaaattaagcacaaaa

SEQ ID NO: 123351 - DNA, 1648 bp, Cannabis sativa
  modified_base (26)..(28): a, c, t, g, unknown or other
tatttttaataataaatcattttatnnntaatataaataaaaagtctcccacaaatttctcataaaccaagaattcggttatataggcacactttatatagaatagatacaaacacacatagaggcggacctacataaatgagtcgtcctctctaaaaaagtcaagaaaaaaaatatatatatattttaattaattataacatatattgtaataaaaaataatatttacaaacataatagtagttttgattttggtgtaatagttaaactagattgtatataagatagaagttaaggttctctttttatgttcttttgtcccatgtcttacaaaaaaaaattacgcccctactttaatgttaggtctgtcgtcttaggtctgtcgtcactccacacatatatatatatatatacatacatatacattattatatatacaattacatatatatattaatatacacgattcacaaattcacacatacacatatttatatacataatacatacatatatgtacatacaaatacaaactatacatattggatacacgcatatatacagatttaaagtaaaaaattataaaaaaaaaaaaaaattgaaacaatatatatatatttatagataaaatactcacataaaaaaatacacaaataaataatttaaaaaatttaaaacctagaggttaccttgactaaaagagagggaggtgtgcgattggaggcggcttgagcgaaggctcgccagagatggatggtgttaggcgctagaggatttttcaggagattagatttttcagttttgaaaatggggttattaggggttttggggggtttaaagggtagtggacgtaggtaggtggggcaactttcttcagtcttttgttggtgcaaatgtgcactgaaaaaggtaaatgaactcgtgaaataggttaattggaaaggcggttctatctatgacttttgtcggtgcaattcgtaaattgtgccagtcaagggtagtttcactgacgcaaaagtgcgctgacaaaacgttataacctgaataattaggggctttgttgcccctcttttgccggcttatttagccatgcactgataaaagtgaaaattcttgttgcgattacataattgtcaaatgtgatatcataggttacatattttatattaagatatgtaagttctcatgttacaattcttatgtatttattacattatatcttatataatataacctccaagcattttcatatatattattctcataataatatatttatcacaatttaatcaatttattataaataatataacaaaataaacaaggcacaaaaaccaaccttacattaaatgcataattaaataagtgcatatgtcttaagtcaaaaatcacattatgattttcacatagttgaatcatgttagatatttatagaaaattgctaaaaaaatatcactaatgctagacctttttcagtgtcatactattattggtgtcattaaatatcaagtctcatataatttaagaaaaatagctcttagaaaacgctaaccagggccggccagagggtggggcagccggggcctcggccccaggccccacaattttggaggccccgaaaaaattaaaattaatatatatacatata

SEQ ID NO: 123352 - DNA, 1545 bp, Cannabis sativa
ggaggcggatgttgattcgagacttgaaccggaggaaagagttcattaggattcccttcttcctaaccttatccgatgtgacatatatacccactctgttcgccaacagaaccgcagcttcatcagtcataagttccaggggaatgccgtgagcttttacccagatatcaagagagtccaggtccgctgatgtccattgcccatcctccggcatcgcagcaaccatcataaagccatcacacggagaccacggaccattggagaggatgaaacgagcctccccctcagaagaaagacgaaagatgaacgtcttggttttacgatcgaccatttgaaatcgccatcctctttggagtctccacatcccagtcagagctcctctcatggtagcagtagaaaaatccctcctggaaaagaaacgccccaccacggaagaagctattgtgttctttgccgcctctgaatcaggtgccagttgaatcgagaaatcttccaacgagaaattttccacttcctcagccacttcctccaccctaacattcgaagacttatccatactagctgatgccatagaaatccaagtcagttgtttctggtaaaggcagagtttcactcgttttttgcaggtctgaaaatggtagatgttgatgtaatttcgcagagcaaaataagggataataaaccctaggaccacaatgaattggtcaggggatagtcggccactacccctcttcgccgtaccggccataacgggcaaatcgtacccaggacacgtcctagtcgtacaccgcgtacgccattacacaagaatttcaaaagttgtacggagagaattttcaaaagttccaaatgatcattagttactatcttctcacgttaattcaatgaatgcttagatatatatatatatatatatataaatatatataagttattaatgttattgttgtttggaattggatgtatgattggagaattattaatttgcttagaaattggggtgtccacagttatgtcatcaatgaattaagaaatgttacagattctcatgacgtaattaacatcatggtgaagaaaggaagccaaagaatatgatctggtctcacaccaagtatatatatctctgcatatatatatatatatatatatcacacaaaattatattcaaagtcatcaaatggaagacatggccgatgatgctgaatatatatgagacaaggtatatgttatatatattcattctcagttatatatatacgaatagaaatattttccattatcgttatttcatgattaaaatggaaatttaatcatcaaataacgatattcttatatatcttaaattcatttttagatttaataaattagaaagattaagtccaccaaatttttcaaaacatatattatgttgatatttaatgagatattaattattgtgttgttaattttgtatgttaggtaaaagatatttttttttttaatatctaaatttgaacaggcgtcatcacctaccaatcaaacggtgggggaagcgcacgattcgaa

SEQ ID NO: 123353 - DNA, 1769 bp, Cannabis sativa
  modified_base (1726)..(1739): a, c, t, g, unknown or other
atgggacgccttcccattgagggcgttgattactagtctcgagtcactctccacaataacataattatatttcaaatctaaagcaaccgacaccgccaagcaacaggcgccgcttctccacaaagagcttccgcgaaatccaaacgggatgtgtgaatagaaaccaccctccccagatgattcctagccactacagctgtgcacatactctccaagcccacacgaacatcacagtttaattttacccaatccagaggtggaggcgtccatctatccttcaccggcggcggaggacaaggcaagagagaagtatgtgcctctgcaaaagaagaacaaatatggtcaatacatttaagaacattaggagggcaattattgtgtacgacgtcgttacgcagtttccaaatgttgtccacaacaagcgaggcataaagaaacacttcctctactcggagaccccgcctattgaggctccaccaaagtcaaacatagtaccaagtgtatagaatttgttaataaagggcaccaagtaattatttttagaaacataaggtactaaacttgtattttgataaagcacaaggtactaaatatataattactgtttgtaaataaataaattaaaaatataaaaacaataataaataaacaaatttaattaattgaaaagtaaacaaatataaatataaaaaaaatataaaatatctttttgtttgaaaaaattaaaaaaataagattaaaactttttcaacttaaaacaaataataaatttaatatttatgtttatatcgtatgtgataaagtagaactaatatatggatctatttcttgccgatctcagtgatttaatagtgttgtgagtatgaatcttggataatttttattggcgggggtagcgattttgattaagagagcacttaaggaaatgagagaaaaaataagtcttcatatttatttattttactaattttatttactgaaccattaaaaatagttatggagatggtggatgataccaatcgatgaggaagaaatagacgaaactgacacatgggtgtgtaatattataaaagataaaaatacgttgactctagctaaaattaataaagttataaattaaaaagtaaaatgaaatataaatatatcaacttataaaaaaaatagaagggtacagtctacctgagcgttctctattagttttataattatttttttaatatttgctaaattttaaacttgtatgcatataatttttaaatttttaaataaattattaaataaaaactaaatatttaggtgtaataatttaaaattaagattataggtgtaataatttcaaattataaaattatatgtgaaattatttcaaagtattataatttcaaattataaggattgctacaaatattaaaatgatttaagtgcaaaaaaattaattgctaaaaaaatcttgtttactaacaaattgcaaaaaaaaaaaataataattaataagtataattaatttaattttaaaataaaattattcttaattaaagctttataaagataaaaaaaaatattaggttactatcatgttacatgttattttttatttaatttgtaaattaatcagaattatacaataatgattaaatggctaaaaataaatataaccatcatgattacatatttaatgtaactattgacattgtgcttaatatttaggataaataccattttggannnnnnnnnnnnnnaaagttaccaattggaccctgtgttttgtt

SEQ ID NO: 123354 - DNA, 2680 bp, Cannabis sativa
attggtcttcttcttcaaaagagattagacacacgtcccctacttagtaagtgtgcatattctttctatccgtacgagaaggctgttatgggtgtctcggggggagaccactggacctaggttggtttccaagatttttttcattgtcacaaagaaatccctggtttcttggtcgaggttgtctagcctcttcattcatgcgagatgattttggcatatcagttcgttcagtccattggtttgcaaatccatgggaagttcttggaacatcacgctgatgttgttggtcccttgtattatttgggttaggttgattatccattgggacatcccttatattccaaggttgttcttcttgagtattcagggggttcccttggttattttcttgtctcctgatcctggaaccctgagttttccctcgcggtctccttatagttggatcatattggttttgaggaattgtcccccatgcagccctgactgctacgactttttgctccaactcaatgtttcgtcagtttgatttagccaagtgttatggaagttgcatattctataattctactagtggtacatatctggtaggatcataggcgtcctcactccttctttttgggatttaatcaccaacaacattgaaattaccatcattccttcctgaacgtggtgttttagatgtgttggttctttgggaccccataggttttttactagtacgatgggttgtttcctctggacgattaccatagtgtgggttgttatcatccatttaatatgggtttgtatttgtgttcataaggatggatttttctgagtttttatgaccaagactctcaataaaaataccaaactgttaacacatatttttcgttaaccaaataaatagcctttttgcaataaatacactacagaatttaatagtaataatactaataataataataaacactagatattttatgtggtttagtagttaaaatctagatactccacgagtccatattattagagatcttttctagaatactgaatataaatcttaatatttgaaataatatgattttttctctatcttttgtcatcctctttcccatgaattctactcccatttataggtatataggttgccagttatttttttttgattgattcctttacaacttctaatgaaacgtggacattccacatatttcatttatttacacatgggataatatctaataactacccaactgctccttgtctttatcctttagatagttatgctgactaggaaggttgcatctcgtcaaacatgagttttccttcttatccatcttaataggaaaaaatgctaagtgtagaagtacttcatctcgttgtacccctttatttgtattgatgatgcgagatgactactacattgtgaataatgcgaggcggttgagtgttgttatttttaccctacttgtgtgggagagtcaacgattcacaagatctttggatatcttgtctcgtatatttttactactatgtttatcccgaggcagacatatgtcttgtcaatctagtttaatagttattattcttgtctcacataagactaagtagtcagcgagtttgaacatttctatcaaacttgtatttaattggaacgagttcattaaattgtatttaatgatacattgtcattattatatttcttgagttgattcatattccttctgtaagacacgtgtaagcttctggtacatatccaaatttttggtataacaattacgataattaaggatcatgtatatttaaaaggtttcaatagaagttatattgcttggtattggcatggtgaatatttagctgatgatctatatccattagggaagcggagggtagatgatattgagggtaatgatttcgatgatcattcaatggacttgcttgatgaagcacagaaggaatttcttaatgatcttgaaaaattcgataattttttaagtcatgcagataaactcttgttcgatggttgtaaaaaaactaagattaacaacaatggtaaaattttacaacattagtgtagaaaatgaagtgagcgataaatgttttactcaaattttagctgcttttaaagatatctttccatttgacaattgcttcctggaatctacatatgaagtacaaaaaaaaactttattccataggattgaagtacgaaaagatccatgcatgtctgaatgattgcattttgtaacgtaaagaatatgtagatatggaaaattacccaacttattgtttatcctgccatgaaatgaacaagagtaaggaaaataggaaacttatcccccaaaaagtaatgtggtacaagcctttgattccacaacttaaacgattatattgtagtgcaaaacattttgaagattgatttagcacgagaccaagagagtgaaaaatagaaaactcagacatcttgtagattcttaagcttagaaaaaagtaaattacataaatcttgaattctaatctaaccaagacatatttgtctcggtctatttgcgaattgagtaaattcatgtatatctcttaagtagtcgtcatttcatgggttctcttccttgttatgtacaatcttcctccatggttagtgatgaaaatgaaatttaatatgctttctttaatgatatcaggcccgcaacaacctgga

SEQ ID NO: 123355 - DNA, 1306 bp, Cannabis sativa
tcatttggctcaaacccttcttatcaagacatgactacttattatgaggtcgttgttttgatttgttaccaactctaatgtgtttccttttgaagtgaaaaaccatgcattgatactgctagaatagactgtcatgtataaaatagctctttacaaaaggcccaagcaagatagttaacatgacaattccagaaatgaagctattcatagcctactcactcgtctagctagaaagttgacaaaaagaaataataatatgttatgagtggttattaggcagtgcccctgtggaggctatagaaggaagtatatcgtgttatgaaaggattacatctgaaggaagatagacaataatagattttacaaataaataaattgctcacagtaacttcacacactaggttggtggggaaaaataacaaataaataaattttacatcattgtacatgcccattcaaagatgaaaaaaaaaatccaacacttcctctgtgtgttaaacacaatcaataaatcataccatttctcattcttttcaatagcctaaaggttgggcaggaagatcaatttccagtacaatactcacaaaaccgaaactcaacctcacacaaaccacaatcaaaccccatattttgaaaattggatgggcttggcaggtgtataatttatcgtatgacaaactttagaagctgctagcggatgaagtgttacctgtttgcgaagtacctgaggttgcaatacttgtcttgctaatgatccccttcccaaaatactcagcaatcactgaaaatccatttttagaactctttacttgttgaaagaataggtcttggtctttggagttctgctctaagtttctcttcatttctaggacagacctgtactcaggggcacattcaggacattctttttcattatctccaaggcaacgctgatggaacgagtgcatacacataaagtgtactgcagggaggtcaagagtgaaagtgcacgcagtgcacttactgagctgaaagattctggcatttgtcctaagatcctggatttctttcctcatggtcgttgtatcttcctgcacaatttaagaaatttgtttagacttccaccatttatcatttgaaaaatcttctaaaatacatctcgatgctatcctgagaatgattttattcctcaaaaattttattaacaaagaccaatcctcatccagacagttcgggtttgaaacatacaggcattaactttgcgcatttaaacaggcatgctctatcacgtttaacagcatacctaccaaatttgtgcctgaaggct

SEQ ID NO: 123356 - DNA, 701 bp, Cannabis sativa
  modified_base (547)..(554): a, c, t, g, unknown or other
  modified_base (664)..(672): a, c, t, g, unknown or other
atttatttaatctctttgttggtccttgtattgtattacaatagagttgtaatattttgattttcttccattgtaataatatctctaacaactcccactttattaaagacaagtcctcgtagagtctatccccataaaaaatgtgcattcctgatttgattctaaatattatagtaaaacttcttaataatttatcacaaatttttgtatttattataatattaaaaaagtacaataacattttttattctttttactatatatctatatatatgcatttatattttatgcacaccatcttatttatatatcttttcttaattttcttagttttttcttcccattttgttcggttgcctaatatagaagttagttgtacaaatatagtactttgaagagaaagaaatacttatatgtatatatcatttacagtaattaataatttaaaatttcaagcaaagaaaattaataatttaaagggcttttttttatttattttttttaatttttacacttcaaaacaattttttttgtatttttacggaannnnnnnnagaaacccctattgcaactagcattgtaacttaatttgcaacaaaaaaatcgtttaaaaacccctattgcaactagcgctgcaaccactatagaaacccaaaccgtaaannnnnnnnnaaaaaaaaaaagttaaaaaatttgtatat

SEQ ID NO: 123357 - DNA, 1766 bp, Cannabis sativa
  modified_base (26)..(29): a, c, t, g, unknown or other
  modified_base (210)..(219): a, c, t, g, unknown or other
cttgtcaggccccttgctggaatagnnnnacacatactgaggtgtgaaagccatcttttgagtaagctcaaactttgtaattaagaattatgaagaagatgcactaccatagaaaagggctatcttcaatacagtgtgatagcatccagttacgggatcaaattgaaaaaggcgaaaataaaaaatcttgccaaggacaatgatcctatnnnnnnnnnncacacttatgtctgacaagtgtgtacaagtgtgtaagtgtcctctactaaaataaaaaaaatcttggttcacatcatttgtaacatgcatatatttttcctcaacatctactaaaacaatgaagattcaagcaaactcgaggagaaaaccacaattctgaaaccttgtaaatagggcccagcgcgcaagttaacctagtgctgggcccaacacccaagttaatcatcaacctggtgctctagtttcgatcattcaaatgtcaaatttgatttgaccatcgaatctagaatgattaaaaatggggtaagagaccccattttcaagttcatgaaccttggaagtatcaaaacgacatccgagagctcagaaatgagtacccaacacccaagttgtcaaatggtctggtgtgttgggttctacttatctgattctgattccattttgaccgtctatctagtttttcacaataactatgatccatgaagccagcgaagtaaaattcttaacttttcatttttcatttccaacatggaaaacttgcttagaatgaagagttttgagtcactcatttctacagaacaacaactctggaaactagtgaccagcttcgtcagaacacataaccagaataagtgatgcaaaaatatcacttaggaatcataaagtatatctcctggatgttttttcacttgctcagcgtccaggttggcatcatatgtcaacctgggcactaaatgtgaacttgggtattgggtcatgagcaaccttcactaaaacgaccataactcactcaacattgatccgattgatgtgattcaacttgcgtttcaaagctatttcaatgctgtattaagtcatgttgcacacttcaattgtaattttaaagctactgccccacatttcactcaaagagagttacaaaattaaagaagctctagcttactcggagcgagtctcgccatcacgacccagatttcgaaaattgacgattaactctagaagttaaatttcattgtgagatgatcatctacggtctaaaacaacaaacttgtattttttttcctatttttgtaggcctccttcacctataaaaggagagctcccttagctcattttacacatttagaaaaattaccataagattagagcttctctcgatagtttctctctctaaaaattggagctttgacacttagccttttcctataatatcatctcgtgagaaataaaaatatgaagtagatgtagctccattactgtcgtgatacagggagtgatctactataaatttgatgtatctctcttataattacttaactattattttattctaactaatctagcaagcgggtgtggcttagaaatcttagtccatattttagagtcaagaatacatatatgaaatttataattatcaatatattatacaacatattattgttaggttttatgccctaaataaaactccattccaatataatctattttattcaacaataaagaaacaaaagtatttttcattcatatgtgtatgttttggttcactt

SEQ ID NO: 123358 - DNA, 2164 bp, Cannabis sativa
gagatattcataagagatttcagcaaggaatttgtgaagctcaagttgtggtaagaaccctagattcttttcccacaagttttgtagatttctctaagtttcaagtatgctaatgttgtaattcagctctgtccaaaccctagaagctaggggatgttttctattgttgattgaggttgtgttaggtttattctagttagaattaaggactggtttggtttttgagcaagtttgagttcttgaactcaaacttgcctcaacaatggtggtttttgcatttttgtgctatacctagttctattgtttggatttgctttatattgatgttcataggtgttctggagagttttggaagatttcgggttgttttggttcgaatcggggaacttttgtttttctgctgtgaaaaatggcaagccgtttttgcataaacgacttgccatttttactgtgcagacttagaaaaatgcctgccattttttggaaaacagcctactgtttttctggcaagtttcccattttgttgttttcttgtgtttctcgatacctagggcattcccttactttttatagatagagaaacttttggttttgagtttagaacacaaagaaggtgctagaaggttatttactcgaatttttgaatgtgacatagggcctccattcagtgcaggattttctattcaggttgaccagcacatttgaatttggaaatgaggtaagattagcatagaatatatatgtatatgtgtatgtatgttatgtgcacgatgttatatgattcatatgctaccaacactagtatgagatggtactgagtgcatgtggcacaacacttagcggtactcggggtacgattcagaccctaccaacactagtacagtagcgatatgtagtgcatgtggtacaaagctcgtacctttgttaagaacattcttaattaattgttaagccttatgattaggtgtatgggcgcctaaatacaattcagtattatattatatgctatgtgattttcttactgggtctatcaattcacagttattgctttcatgtttaggtaagggaatggctaaggcttagtaccaatgagtttgagcttgaagatgatcatacatatcaagacggtgtgacctagagagttcagtctcaaaacaacatagacttattttgtagtcgttgtgtgacatagttataaagtttattttgaatatgcaaacaagttcaaaaagcgggatccagacatatttctttggttataaagttatggttattaaagtttcttattatttgaaaagtttaaatttatcacgatttttgagaaaaccctttggttagcaaaggagtgcatagtaatcaaaagagcactgtagtgtgcataatcattagggcattacaatgttggtattagagctgccaggttgtctacctaagatcatcaagacatgtacaatcatcatcaaagataagctcgactcactgttcagtaagcttttaattggttagatagttatatgattagagaagcatattaggaagcacgatagacatatgttatttatttgaatacgttgccttaaaatccataaatgtagtatttatagcacacatggtcgttgtctgacctacctaaattctgggtttgcagctaagtcttataatatggatgcccagcgaaacacgagaagtcgaggtaacatggtcaagaccaggggcggtcaaggagttcaaaatcctttgaatccccatggatgcgatagaggccatggagggagcaaaggtttgctgaaatgcaaacccttatccatcaacaaaatgaagaaatttagattaagatagtagggccctcctgtagtgcttccaccgcaagtgcctgctgctttggttccaacagtgtcagtagagcaacctattgttggcaattgtatggaacctttgtatgagaggttttacaaagaggcatgcccagcttttttgggaggtccagacgtcatgaaggttgagtagtggctttcggtaattgagagtattttgaattttatggctgtcgttggaaatgatcgggtgacttgtgccatcttccagttctaggaagatgcacttgtgtggtggaaaatggtatccctcaccagcgacgtcaccacaatgacctgggaggagtttc

SEQ ID NO: 123359 - DNA, 1005 bp, Cannabis sativa
cacaattagcttccatggaagcatcaagtcttcaccgccatcaaagggatagccctcttcaacattttcttgatccgactcttactctgcctaaatttcttacactaaaggagaccaactttctaatcaaatgaattatgagtatgaaaaatggaatcaacaagatagtatccttatattttggatactttgttccatgtccgagaagatcctcactagaatggttggatatgatactattgctcagatttggattattcatcacgtgagtactatatatacatctctcaaccgacaatataacactcttctttgcagcactaggatgcaaggctcttaattaggtgactgtcttatcaaaatcaagaacatcatcgacaccttagcatctatattggtcatgtttccaacctccaagcacaatgaagcgatctttaatggcttgaccaatgactatatgacatttttatacctcagtcaacacaagagctaatgcttagttgccgagattgagaccttgctaatggctcaagaaggtcgccttgacaagactgttaaagaacttgttgtcaagaatgaggcgaatcttgctcatactaaacttgtagtttagaatcgtggctcgtcttccattattatggatcaactacgtccactattccttaccctattgtgttcggaccacctggttttgatcgttttccattgtacagtggtgcgcgtacgtgcagctcagataggtcgtggattccatcatcctcctcaagggtagtgtgtctaattcagtgcgtcactatcaaacaatatttccatcattttgacaagtctttctctaaccctgaaacaattcagaagtcaactggcactatcaatgttcttgagatgcaatatctttgtgccactcctgttggtgattcttgttggcatcttgactcgagtgctaccaaatatctaatctcaccccatggcccataaatttactcaaaatactaatactttggagac

SEQ ID NO: 123360 - DNA, 961 bp, Cannabis sativa
atctttattaataagtaaatccgattatattgaaatggattttatttaggcacaaaacccaacagatcagcggtgcatggccacttgtcaacatcaggttgtacgaacccgtacagacaaataaaaatcctccaatttgtgcctcacctacctgtcccaaagtcaatattatattgtattttaccccatcactgagcttatttcactacacaaatcctagtgggtccatgttcacctgggaacccaacttcagcctataaataaggctttatccctttattatgcaaagggttacaaattttggcaagaacactcttgagtaaaatactccacaaccaaagagctcaagaatattgactcgtggactaaggctcattgacaccccaaccaagtaaaaaattttgtcttcttttagtctaagttatttttctttaagctcaatctattttttaacaggtttccgaaattctcgataaatattttggtgctttcattgagatcttgaaggaagtctttaccattcttttcttatacgaccattgttgcaaccagaaatgggactagaaaatcatctgctcgcaatgacaatgaaaatggtgcagccgatgatttgaaccagccccttccgatgaacatccaggcgcacaccgtaggagatggcaaagcattgaaagtagctagtcgactacctcaaaaaggccaacactaagaaaaatgcattgatgagactcccattgacgaagatgaccaaaaagccaagacaaggacctaaaggatgactataacaaaaataatgacaaagaatataaggaggacccaaaggtggtaaggttgaggcaagtggtctttgaccaccaaagggaaatggcagagcaagaagaagttatgcgccagatacaagaaactctctgacagctacaagacatggtagccaaagggaacttttgttgggttttatgcc

SEQ ID NO: 123361 - DNA, 509 bp, Cannabis sativa
atagtattatttttgttatttaatacaatataattcttatatggcctactaaataattaaactcttaagctagctatattaactcttattagaatggggcctccattagaattgtgctttcaaactttttgattttataatatttttgaactatatgaaatataatataatttattatgtattaggttattcgtttacttctataatcgttaaattaatatagttagatcgatcaatacgagtttttctaatgtcaaaattatctaataatttttaaacttgtttgttgttcaatattagcaaatattgttgctatgcatgcttaataggattcaaaatttacagtgttgtttggtaatattcaacacgcatgtattgtaattgaataaagtaatataataaaaattaagatcctttattaagagttagttccacattactaatgtgtgaaaataaattgtgatatataagatgaatggactcctcctattgccaattagttttgagat

SEQ ID NO: 123362 - DNA, 1286 bp, Cannabis sativa
taaataaaataaaaaaaaatcgtaaaaatgtttaaaattccgtgaaaccgtatttgtgtaaaaaaaatttgttgtttttatgtttttgtgaaataatccctatttcataggtatattttttattacaaaaaatatatattatttcatttagaaaaaaaaaatattcaaataatgaaataatatgtatttattatttcaaataaatatatggataaaattatttcactaaccaaataaaattcaagctaggatgcacagattgcattttgacaaaaaaaaatgttaaaaattttgaatgcccaatcacctaataacagaaacaaaataatataacactgctttctacgaattaagtaaaatctaaggaataatgtgtcttatcatggttttaatgtgtacattcacatggttcttcacataactaataacaaaataaaacaaaatattgttgcttaatatatttattttatcttataattgcattctatatattttataatatatttccattaaatacttgtttttagggcataaatccccacaactgtttattataaagacctaatttttatcacaataataatctatagtagatcgatataaatcccaagtaattatgaactcatgttcatgttattcactctttaaagtttcccaaatcacgtgccgaaatatttttttctaatttttttcatagtagtatttgttataattatagtatcatccttgtaattttttgaaattttttgaataatttacaatgtcaaaaacaaagttcatgatattttagtttaccacgcgtattcaaaaaacttcaaatttattttcgacactataaactattcaaaacttttaaaaaatttacagaggatgttgtaagcataacgactacctccataaaaaaaaaataaaaaaaaataaaaaataaaaaaaaaccatattccaatatgtattttcaggcacaaaggttgactaaaagattataataaaaagttgactgtatttataagaaaataaataaataaatgatggagcagttttgattattgtggttttgaatgatgatattatgagttgtttaatttattaattaaattatatgtctattttttttatcagctaataattgagtatctgttaaacgaaaaaaattattaaaaagaaaacaaaaaactagcatatcatttaaatgttaatttaaaattttaatttaataataaaaataaccagtaattaattaacataatataattgttgttactataatggatgtaccattttttttt

SEQ ID NO: 123363 - DNA, 584 bp, Cannabis sativa
  modified_base (51)..(59): a, c, t, g, unknown or other
tactatgtattagtcacaagtaactttttgttgtaactaaaagtcacattnnnnnnnnnaaaatttatattgtaactaaaatattattactaaaagtaatagtagtgccactaactaatatattatttatatgtttgatgtaatatattgtacgttttttaacaatgcactcttgtttctttttaataggaataatgctcttgttgattttggtttataaaagggtgattttatttcaattgcaccccacaaatattataagaacaccccattcattaaaaatattttttttttgatgcattcattaacaatattaaactatttttttaaaaaaaattattcttaatctttgtctcaatttttttacattattaattcaattttttgtattaattttaagtattttaatttattttgcttttataattttttaaaaaataataaagctttttaattatttttttcttaacatgcacatttattttttggctaattactagtttttcctttcgaactttgacatgtactaaattatgcccctaaatttttttggctgttaaaaattccccatgaactattaagat

SEQ ID NO: 123364 - DNA, 1552 bp, Cannabis sativa
ttgtcatttaacaaaacacagggtccaatctgcaactttcgcaaaactcagggtccaaaatagtatttaccttaattattatagtataccgacccaataatcatgattatgcacctagaatatataattaataatatttagtaattattatataaattaaattaaattaattaataaggtttgtttcaatatcggtggccaattggaattttgtcatatacaatacatgaagaattgatataatgaatattaatgttatatagttttattttctcaccccgacaaagagtttaggctatcaaatttttcttgccatctagaattatgtagaaacttttccaatactaattaattataatagtcctcctcccatcatatattttttttccttggtcaattattatataaaagtacaacattttctttttattattttatataaatatttttgatgtgctacacattttttaaaagtggcatttgggtacaatattttctattttattttaacatttagatatttacaattacctataaattttttaagatttttgaaataaaatttaaatatttttattacggtttgattgatattgtaaattattaggttttttttttaaaaaaaaaaaaattacaaatagttataatatatctgatcatgattaaaaaaatgaattaaaaattttataagatgccaaactgataaatattatactgaaaaagaaatatttgcagcaaaaataatatatcttatatttttaattttatacacttatatatactatatattttttttcgacgaataaaataatttatgtatgttacatttttgttacaatttttaatcctaatttcatcaaatattagacctgactaaagtaacaggcgccaattgattaatggttcacttttaataaaaaattcatactgaaaaaataaataaataaaaacataatctttcaatttcattatttattttaaaattatttaataatttttcaaaaataaagtttaaattagactactaatataataacaagtgacattttatttaaccaaatcacaaaatttatagtaacgagtgcaacaaaaacataacatataatatttaatttatcgaaaatataacatataatataatatataagtgtaaaaaattaaaaaacataatataaatatttaattataatgcaaatattattattattttttttatttttttgaggtttttatatataccttatattaattttatttttgtgaataggaagggaatataggacaatcgaacgcgtttgaatataattaggtgttactactaatgtccccctatggctgtgacaaaaagtaaattgcttactcttttcacacttaatttgacaattaataatcatcaaatatcaatattttaaataattaaaacacaattagttggccccatttctttcttttaataactaattaagtaaaaccttttttttaattttttattatttttgttatgaaaatataaggctaattagtaatttttctccccaaactttgacatgta

SEQ ID NO: 123365 - DNA, 1199 bp, Cannabis sativa
ataatttagtacatgttaaagtgtaggggtgaaaaaatcctaattagcctaattataatggtaaaataataatttggaccaactctaattgtgaactaataattgaatgacgaactacttatattgattataacaatggactattaaataattatgtaaacataattctatattgtcaaatagtccaatttcatatttatagtagaataaaaatagaaataataagcctgattattttattaatgagttcaataataatcaagagtttattggagcttcaaaatataggtccatggtctcaaatcaacttagaaatgtttaatttgaggaataaattgagaaataaatatgagtggaataattaaaataaaattaactgtttaattttattcacttaaaaaaaatcggttaaatataatattattgctaaataatactataagagagtaatatattattttattagaaaataatatttaattaatctacaattaaataagagatttataaaaattaattaattattatttattgtaaaataaataataaatcttatatttaatataaaattgagaaattacttttgtgcattgaaatatgaccacacgacattgtctcacacgtgttggtgacatataattgtcatcatatttgttatgattattttataaaataagattaattaaaataaataaatttatcttttagttatttaatttaatatttttataggataagatatttaaaaattaaaaattaagtaaataaagatataactaattgtagttattcagctataaatattttataatttgaatttcaaataaagaatgatatatttttattttattggattaatttataaactttaaattattatatatgtgacatatacataatacgtatcataagattgggaatacaattgatcgatacaattatctctaaaccctaaaagtgtcacccacaattactctctagtctaacgtctttatctttatggattggtgtgtaatctctttatctcatatcacattcttttatgagttaagtatacatcgtgatagaaaattcatccatcgtattaaagttataagttcatgttagagatattattacaatagaagaaaaatcaagatacattacaactctattgtaaaataatacaaagattagaataagagattgattaaatatat

SEQ ID NO: 123366 - DNA, 742 bp, Cannabis sativa
gtacatgttaaagttcgggaaaaaaaaaatcctaattaacctttttaaaattatttgtaaatttttaaaaaatttcaaataatttttagtactaaaattataattaaaatattttgtagtatatataattttttatttttatacacgtggtaaataattatttaaagtttatttttaacattataaactattcagaaaaaatttaaaaacttataagtgatctaattaagtaactacaatgaactcgaacaaatagaaaatataccaaaataaccttttaggggcaaacctcaaatttttcctagatctttttgtaatttttttcttagatgtttctttcttttttttaaaaaaaatgtttcttattttcaccataaaaattaacaataaacttattctatttatttctaatttttactatttttcttaaaaaaaatacttttaaaacaagaactcttaataaaagttagaccaagaggttaattagagaagatagtatatatatatatatatatagagtcaatctcaattcagccctccacataattagatgccaattacattatggactaagaaattaattaaagtgatcataagaaatccaatcaaaattaaaactatcttggagtcactctccacaatgacataattgtgcataatatgcacaatatagcagtatgatgagctaaacaacattcgaccatcaaatcatttgtaatatccagattaaaatagtatttaa

SEQ ID NO: 123367 - DNA, 1327 bp, Cannabis sativa
  modified_base (557)..(564): a, c, t, g, unknown or other
ttttatttaaggcataaaatccaaacactaagtagcttagcctaatcccttattaggtgtcaagtagcccaaggtctttgtcttcaaccatgtttcaatttctatttacatgtagacttaaagtgggatttgtaatgaagccttgatggagcaatgaaggagtaaaccccatttcctactcgatacgctgagtaggaataggaggagaatcatacacgacatgccgagtagtagcggtgttcatcaaaccgctcaaactgtctgcatcgcaagaaaatgtttgaaattcttcgcggtgcggtcggagtttgaatttttcctaaactgcccagtgcggtgcagtttgcggttttgaattattaatatgcggttcaaattgcaccacaccgcacattatgaaaataccaatttttatatttatttaggttcaatatgtgaatgtctaacccaaagcccactaattattgtattattgaaacttaaagtttttttcaaatttattttaagccttatggtatttttgacaagtattgctcaaactttgttgtatttgtgannnnnnnnttattggtgatagtccaaaccgcagaaatcgcaaaaaccgcatcgcgtcgcaccatttttcgcggtgcggtttttgcagctttttagttttgcggtacgggtacggttttgaaaattggaaaaaccgcatgtgcgggttggtttgacaaaatggtcaaaaactgcaccacttgcaccgtaaacacccctaccaagtagcgcttttatcacaatttgctcccgtaaagtttatctaatgccttagtctcgtcttaaacattaattagctcatgtcatttttcatataaacaaaaaagttagctaatacagtaatattgcgaacagtttaaaggactaaaccattaaaaaagaaacaataaaaaaatagaatatataaaatatataattataaataatatacaaaataaacttattatgattaacaaaaatcaacaacacataattttatttttttaaaaaaatgatttatttttgaaaaaaggagaaaatatatttttttaccaaacaaaataaactattttgattattttttaatttcgtttattttataaatctgtttaatgtattacattaataatataaagtattatttgtttattctaattttttttatttaatgaatttgtttcttttatatatcatttgatgacatataaaaggaaaaaaattaattaaaatattttttcaaatgtataatatgattgtattgtatataaatattagagattgttaggatgtcttactgtttcattagtttgttatt

SEQ ID NO: 123368 - DNA, 2218 bp, Cannabis sativa
  modified_base (35)..(38): a, c, t, g, unknown or other
  modified_base (2086)..(2086): a, c, t, g, unknown or other
tatttgaaaattttcaaaaatttacaaggatgatnnnntaagcataacgaacacccccgtgaaaaaaaaattggaaaaaaatttgccgacatatgctttcgggcgtagaagttgactaagaggttgtaacaggaggttgacatcttggctatggttctgccgaaaccccacatccccgaaatctccgacaatatgcgaaatacataaatcccaaaataaaaataatccaacaatctctgaaattatccatccactacttccataaattggacaaacatctttggttccatgctctttataaaataagtagcaatcatgctctcacacatgaattgactcatagcccaaccctaatttttttagtcacttttttgtcctgtagtacgttgatggaattttatttcccttcgggaaagcaagattcaacaatttcaataattcatcaaatacgctgatagaaattttttcttgaattttcaaatgcagtaactttgctagaaaattaagtgaagaaattcaatggcatccaggatacaattcaacttcaatctcttcaaataactcgtcgtaatactaaaaagagtcagggttgttttgaacttctcgagttgttggtcgaatgaaatcttcaacaatgggaatcatctcgtcatcttcttcatctaaaattggctcaacaatttctgtttgtgcaacaactcctgtttccagcttcccgtggtaaatctacttttgataaccactatcaaaactccaattaaatatatgcgctttcacaatatgtaaaggctcaaatcgagtatttaagcatctaacacacagacacctactttttccgtcagaatctttataagctaaagccatcgtcaaaaaggcttgtagacactcccattattcattaccacgttttctccaagatatccaagacttatcaatcgtcatcttaaagtgttttaaaattttatgaattgtagcaacgtgaataaaataattaaaatcttatgctattttatgaaattgtatttataaattaaattactaatttattatttaatgatgaatttcttggtttatttgggtccactgctcaaggtaaatccatagctgcggtatattacaaataaagtgtagaccaaccttgttctaaattttatttggttctagactttatttgcaagtataccaaagttacagtatatttgatgccaaagctatggtatattatttttaactattttttattaattatatttgtaaaatattatgaatattttataaaatatgatcatattatttcatgttttatgtataccaataattgtaaagtttttttttttttgattactttggagtcaatagtacaaagtataaccatagctcttgtataatccaaataaagtgcagaacaactttgttttagactttatttgcaaatatacaaaaattatggtatatttgtaggtatactaaagctatagtattctttttaaccatttttttattaactctatatttataaaataatatgaataatttatgaaagatgatcatatttggtgatatttaatgttggtatttaaaaataacaataaaaatatttattataaattacctttaatttatttatatataatttaaaaaaaattatgttttattattattaagtaaataaaataaattttactaatctaactaatcttattattttaaataatttaaacataatgtaaacaaattattttttaaaactaaggtaaaaatttaattcatttaaataaaatattattaaattttaaaaaatagataaaattcctcttatttacttttttaattttaaatatgtaagatgtttatttttaatttatttaaaaataataaattactaacattattttttaaaataaaataaatataaattaaataatttttttttaaatattatcatttgttatattaaattatactttttttttggtatattttttcattcttctaaattttttaaattttattacaaaaattttattgttaataaattttaccaacagaatattacatctttaacatatcaaatatatatatatanatatatatatatatacttaaatcaaatacaattttcaaaactattaattaatacatctaaaataaaacaagaaatacacatattaataaaactgaaattccgtattttaatattcccagtttgattatttaa

SEQ ID NO: 123369 - DNA, 663 bp, Cannabis sativa
ggacatttcaggctacaggttgcagctggaggaagtggcctcgtaacctgtactattgtcgggtgtcaagtggtcatggggcatgaatagtggatgtagtgtacctcttgtcaggacatcagagcttgcaggtgagacgcatccactactcgttctctccccgcgctcaggtgttgcatgtggggtacttgtaccttgatatgtactcatttgcatacttgccttgtccttttgattcttcttcaaacaacttctcctccaacacttgtaaagattcaccatgtgttggttgcatggtgtttttgccgagtagcatgctcgaacatgcatgtcgagtggcctgatggtgtgcatgctgagtggcctaatggtgtgcatgtcgagtggctgttggagcatgcatgccgagtggtttgatggtgtgcatgtatagtggttgttgcagcatgcatgtcgaggggctgctggagcaagcatgtcgagtggcctgatggtgtgcatgccgagtggctgttagagcatgcatgtcgagtgtctgcgcatgcatgtcgaatgggtgcatgttgagtgcatgccgattggctgccttggcatgcatgtcgagtgggtcactcgtgactaccttcggaagctagtccccctaatcccttgaattcacgttcg

SEQ ID NO: 123370 - DNA, 749 bp, Cannabis sativa
  modified_base (694)..(715): a, c, t, g, unknown or other
tttgaacgtctatacggatggggaatttttagctcttgtcttgactataagagcctttactgagcaaccttgtctagccaagtattggacttttttgattacatgcttttaaacttttgatcttctctctcccatttatgccttttactttcctcatctcctcttcgccgacatttctctcttcctttgatctgtcattgatgagtttcaagattttagaaactttttgattatcacgttttaggatagtgttcatctattatatacttgatagcattaggatgcataatgtatgactttttgatgagcaagattgagtcttagacttgttccttgggtcttttagagtccctgccggctcttaaagcttatttttgaactatgtctaatacttagatcttgtaagggaactctgttcaggacttagatcctgcccaagaactttgtccaagacggagatcctgcccaggaactctatccaggacttagatcctacataggaaccctttctaggacttagatcttgcctaggaagtctatccaagacatagatcctacataggaattctatccaagacttatatcctatgtaggaactttgtcaaggacattgatcttgcctaggaaccctgtctaagacttagatcctacctaggaaccatgtccagcacttggtgttggaaatattttaccnnnnnnnnnnnnnnnnnnnnnntatgtttcattaacatcctaatacgaattctaaa

SEQ ID NO: 123371 - DNA, 924 bp, Cannabis sativa
ttagtgatcaaagctttgttgataggtggtcttggagtatggaaacttcaggtcttttctccgtgaaaagtgcgtataaacatttacaaactgctcatggaaactggtctgttatggatgatattgatgggtggaaaaggttatggaatttggagattcctcctaaagtgttgtattttttgtggcgtgccatttcgggatgtttgccaactaaagtacaattgcagactaaacatgttcatgtggatcttctatgtcctttctaccttaattcggttgagactatctctcatgtgcttatgggatgtcggtttgcacaatgttgttggaacttggcaagtccgactgtgatttatggggcttctaatgaatttggcaactggtttatgggagttcttgaaactcagtctattgaagttggtgttgacgctgctatggttagttggtctatatggaatgctcgtaatgatgtcctttggaagcaaaagaaatgcacagcagctggtgttttatactcggcccgaactatactgcaacagtggtgtgctgctcatgctcaaaagtcgggccctttgctggtttttggttcgtcttctggtgtggagcagtggcagaaaccggtatcacactacattaaagtaaatgtagacggtgctatctttgcggcgaagcataaatatggttttggttgtgtggctcgggacgcaaatgggaggttgattgaggggatttctggcagccgattgggaaatgtaggccctgaaattgctgagttgatcggagtgaaagaagcgttgagttggatcaagcgcaacgggtggactgaggtggagattgagtcggatgcgcttgtggtggtgcaggctgttcttggctcagtttcgatgccatctcaatttggttacttggttcaagattgtcgct

SEQ ID NO: 123372 - DNA, 2544 bp, Cannabis sativa
aacataaaacgttatttctgatctttattaactaataaatttgattatattgaaatgggttttatttgggacacaaaacccaacactcacagcgccccaaacactgtccgacatgctaactagcgcagacaatctctgtcaattctccaacaatgagaatggttgaggcaagcgtaacaacaatggctttgacaaacttaatggaaaaagagggaaatttaatgattttttacgccacgaagtctaagggataaggaggagaagtgcgcatgcttcactctcttaacaaaactcccaaagtaaagcatgcccagacagcccaggagggcaagtcagcaacaggtaatcacaaggctggcctccacctccaaaggctggcctcctcttgccaaagctggcaggcacatgacctgctagatcctgataggagcatgacctaccaaatcttggcaggagcctggcaagcctgaccttagcctgcaagcattgtatggccagccagccggcatcctgcagccccatgacttcccaagcgcagaggcaggtgtcagcaaaaaagatatgttatataattataactcattgtccatgttacaatatccataccctaatatacattgtttgtataaatatatattgtcaccttttattataaaataatataatacattggctaaaaatactaagaaaagttctataatgcacccccttaaaatggatgcaccgttacatctctatctattttagtatccgaaataatcttttagtcaaattttttctaatggtcatgtaaattatagttatttaagacatcctgtaaaattttatgaaattcaaaaaggtttaatacgtcaaaaactgcgttcaaacagtgtgttgcatgcgtgactattttattttatacgggtgtaaaatagactatttaaacattgttttttatattgtaaaatattttgaatttcttaaaattttgtaggatatcttaaatagctatgacgtacatgaatatgaaaaaaaataaactaaaaaattcttctggatgccggaacaagtagagggtgtatcagtacatcccttttaaggaggtgcattgtaaaatcacccaaatacttatacactatcctttttatataaatatactcgtacattttttatggttttctttatataaatatatgaataatacattgattattgaggaaattacattgtatatctgtagatactaaaatccacaatcaattgaagatgatcgtacacgggcacgaacaacctgtggaacaaaggagagagtaactaggaaaccttaagacacaaggatggtgtcgacgaagggactctgacggttaagtcagcaatattgttaacaatgtaataaaaaagatgagaataaatgatcgaactaagttgccacctatctttactacagaaataagtatgtagttttagagagaatgagagagtgaacgataagaagtattgagataactgacattgatcatcctctctttgtgacttagagtagctcttataggcatccatagaaagacgttactcatgactgctcgcctcccttgtgaagagctccactcccacttaattaggagatcgttatttttgtggttagtttgactgatcactttagaaattgttagatgagtgataagactcagtctcgtatacgggtcagatcattgtgagcacaatgttggctaatgggtaatgccttacttgcctgtattattttgggtctattgggcttggtattgtgattgtaccgtcataactagttaaatagtccaatccaatcttgtttgagcattctttgaaaacatcgcatatgacattgagcctgagcccaattttggcctctacagtttgtccctactctttaagttgagttttgctcgagttaaagagtataaattttttggtataatctttagaattttgatttgcaaaattccgaaattataaagtccattgtttaaatatattattcggctggttgtgttttatgttgaattgatcggagaacgtccagcgagcatatttgaatgcttttgacattctgaaatgtgaacattgcattatacggtgcttgtcccattttgcgggcatgttggcatgtgtgttaaagtatatatcaatgaattttttccattcaagctcgtatagactagtttcaactatgaccagtcaggatttatagagtagttgaaatgagtaacttgattcaagggaatggtgtcccctacttttatagtagcagtcacactgagaattcgagtcgtaataaaatctgactgtaagttccaagatttaagcattcaggtgctaaagagtgacactatctgtgtacacaacactcaatttgatatttaacagatggaattcgtcttgaaagctatagtaatggttgaaactcaatttataagaaaatatttgtaaagtccttttttggcaagttagatgccataatatttttaactttatggtaagatttatttgcattcataaccaattttcttaccttgtttattc

SEQ ID NO: 123373 - DNA, 526 bp, Cannabis sativa
  modified_base (465)..(468): a, c, t, g, unknown or other
aagtcattttaattacatgcaaatcaataaaacatataatattaaactttattgtattattaaaaaaatgtattagtttataaccaattagtggttaattggttattaggctgttttgaattgtttagtctattaccaattattggttgaattagtatattaatttttattacagagtataatctttctaataaataagctgaagcaatattagacataaacctaaaaagacttacacttcttaaggtatgaattagtagttacagagtagatttttctctgttacgattcttaaaagctttagtcattgtttgctagagctttaaactaataaaattaattcttcgtaggtaaaatagttcatcaatgaaagtgaataattaagggagtgaatttcaaaattagggaaacttttttcaagcaataagatgttatattatttataataatataatatatagattnnnnatgtgtaataaactaataatatgtaacatatgacaatgtatattagttgtcatctttt

SEQ ID NO: 123374 - DNA, 1425 bp, Cannabis sativa
cggattaaatctcaagaaaatctggtttggatcgtttgtgggtgcattggaggtgtgttttctccaaggtgtttcctttttgccgatctatttgaagggcttcctttctaagaggatgggtggaaagtcacgtgatttggggttgtcattatcggtagagtcatcacacaaccatggtttcattgggaaaaaatcctctgttgagggtcacaaatctacaatcatggggttttggggtatggttcaaagcaaaaaagttttttcagtttcgttgagtgtatgagaggtagtctggggttcatggctacaaatatgtgtggtgttatttaaagttttattattttcttaagttttattgtaatttttttaacctaataatggtggttattcaccacccattagattaataggtttagttattgtcctagagtgtgccttaaattttgccttctattagcttgtcggtaattcatcattggtttagagtagcttcgttgaggatgattttgtctctctctttagtcattagatctttgggattctaagatctttattgaccttatgttttgtgaacgaattctttgagattgagtttcataacatagttagttgcgttatttctcttatatatgatttaaataatagggttgttatgtcacaatatttattggatgaccatactctatttttatcaaatataataatggggttatacttttatagattagattagatttaagttattatgtggattagattggatccaaaaataaaatccgcaattcctgacaatcatcaaatagttattgcaccgaaggactaggagaaaatgatgtttacatgtccttatcatattttttcttttcgaagaatgtcatttgggttatgtaatgcactagcaacttttcaatggtgtatgatggctattttattaaatttggttaaaaaatgaattgcggtttttatggatgactttttcgttttctattatttgcttgaccattgcttgagtaattttggaatagttttgactagatgtgaggaatcaaatttggtgcttaattaggagaagtgtcatttcatggttaaatagaggattgtattaggccataaaatttccaagaagcgcattgaggtggacaaaatcaaggtgtcagccattgagaacctacccactcatgtgtcagttaaggggattcagagttttttgggttatgctggtttctattgaagtttcagtaaagacctctcaaagatttctaagcctttatagaattttgctaagggagtgtctttcgagtatggaaaagagtgtatggaagcctttaaattcttaaggagaagctgatttttgctcccatagtcattactgaattgggacttgtcgtttgagttaatgtgtgatgcaagtgactatgcagttgg

SEQ ID NO: 123375 - DNA, 1046 bp, Cannabis sativa
agtggaaattttcaatgagcagaaacaatcaaacaaatagaagaaaagaaagaaagaaatcaaacttcttgaaacttggtcacatttagtgggacctggttgttaaaaatagaccaatgatagaacatcctttttcattttggttatgaagcgtgtgctatacaataaggaacatacataatggcttaggaaggaacagagtacacatctgtgacatttcttctccaattatccgtacagattgaaccgtttggttaaaagctctaaaccaagtacatattcaaaatcacactttcgtaattaaaggaaaaaacttgatcattatatatcgccatgtaagaaaaagttggtagccatatattataggtagtgtagtgacaatattagttcaatgttattgaatattagctacgtgattattacatttgtcaagcaaaagaaagaaaaaaaaaaggcgtgattatacaatttaatatcaaattttgcacattatatttttaattttaaatgttcacatcaaagaatattgagcatttcattgccgttgtgaagcttcatgtgggttttttaggtgggggcatctttgcccaatttcagtgccattttcaattttttttttcattctttctaaatgttgattggttgaggggaattggcggggactactctctcctctccatcccccattcttgtaattttcattttccattgaggatggaaagttgaaacgaaaaaattctcttgaaatccatttgtatagaaataaaattaaggtgaatattatttgtactaaaattataattacatgttattttaataatttttattttatataaaatatatatttttaatttgtactaattttttaattttttttctccttgtcatattatattaaaaaaaatatatctataaaataaaagtaaagtatatgttaaatattaagaaaaataaataaacagaaaattatatgaaatttttattagaaaagaaattaaaaaaaaaaacataaatcatttaagaaaaaaatatgaacataaaataaa

SEQ ID NO: 123376 - DNA, 1829 bp, Cannabis sativa
tttttttagtcgatggaacaaccccaattcatataatataaaaataagatatttttttaattagatagaaaaactaagcataaaaactgaaatttttataatattacgcataaatgaataatactcattaaaagtacagccatatataaatatagcggttttgtaataatataaatagatttatttatttggcaggtctttaaattataagatttcgattaattggtctttaattattatatttttaataaattagttctcaaactatatacgtcttaacaagtttattttttaataaattcgtccctaaatttttactttatgagcaatattatgtccatactcttagacatagatacttttattattttttacttactttaatttaatgttttatattaaattcaaataattttattttttaaaattttaatacttttaaaaaataattataataatatatttatttattttttaaaatattcatataatgtttaatttttcaccaaaatattcaaattatgctttattcatatctaatatttaactcttacatcaatactgataatatttcatgagtttgttgctgagtataaattaaaaataaatcttataatataatttacttggtagtttataaaaaaaattatggatttgtgattttctcctagagtttacttgaatctttgttatttctgatgacggtaaaatggttggaacactttttgctgaactagattggaaacagcctaggttgacaaaatgtcagcctacgcgatgggcccagcctcaggcgtcaacctgggtgctgggtccaagttttgccccttcaaaaattatgtttggtccccaaaaatagttaaatcttaatattttctaaagacagagatgatgctcaaaagcattcataaaaaactccactttttgtggcccaggttggcgaattgtcaacttgggggcagggccagccccatgtgtcaacttgggcatttggccttgttatttgtgcccaggaattgttgtttttcaccgaaaggacctatttccccgttttaatgaaaattcatttaatgcaaaagtcagatctgattgacacttggaaggtgcccaaattgtcaaattgtcaacttggacgctgggtgcttgaggccctagggcctcgggtgctcaaaaaaattaacttgctctgattttgattatgatgccttacatatgtctatggtatgtctaattgatgtcccaatgtaagttttggccactttgcactaagacagtcccgaaaactgaaaccctagttgaggatgtcaacttgggcaccgggtgaaaccccatgtgcccaggttggcttccgggttgtaggttcgtgtaattttagctcccgggccttggattagattgctccatgtcttcgcggtacaaaatactgaaagataataagttggattcaagttattgaagtctaaacttttatcccagagttcccaaagtaaacctgggtgcaaggctagggacctctcccaagttgcactacaagaaaataggctttcagcgactagagtttttgtgactaaatcaatttagtcactaataattagcggcaaactccaaaagttttttgagatttatgatgctcatccccaaatttggcaccattcatcattctccgcctccgataactctggacagctccggtgagttctttcaagttttttgagaagaaaattacataaatgtattttttttatatataagagtagctccttcattctgtactgatgttttaaatcatgtatggagaagaatgtgtgtggtggtaaattattttatag

SEQ ID NO: 123377 - DNA, 1073 bp, Cannabis sativa
tgagaaatcagatgatgcttttctacacttattttttaaataccagagagaaaataaaatttgattttctctctcaaactgttcttgttcatgtgtcgagaatttcaacaagaacaatttatacactcctattctattgtaggcttttgctcactcctataatgttgtatttatgttactatttttgttgatgtagtattttgttgctagtgttgattcagtctagagctgagttcttgcatgtccttctattgtgtcgttttctcccatatttggtgtatttattttgtgttttgtctcccaaattggtattttttttcgctcttctttctttcaccctttcaagtggtggcaatattttaatatctttaatttcttgcagaatattttaattgcgctaattttctactgggtatacggttgcttcataggttttgagctagtcttttattgtgtagtattctaaatagtaattgtgtgggttgagatacatttcgttcatcacttctaaagcatgcacacatgatatttcatcgatttgaaacctattgcatgtgcatgttttttcttgtagattcataacccatgattcttttactttgtaaatttcgaatatgtgttcatttgaagctctaacctgagaacaaatatttatatatatattgtctttgtaatataaaaaaaacattaaaacacacaagatgtaattatgattcctaaaaatcatgtgcctttaatttcaaagtagctttgtagtttgccttcatcttcatctctgcagctgaagtcaattttgtgaatattcgttgtgccattttcctatttttgcatgtccactcttggagtaaagtcatcaaagcctccattagtgttgttattggtagttctttagttatcaggtttgccgcatttaacgattcaacaattcgatgtcatggtactgtatcttttatttttaaaataataccttgatcgttttttagtttatattcgtagagttatttctgttagtcagtttatttttagttttttttatagttttattatagtttatacttgtttatttgcaattt

SEQ ID NO: 123378 - DNA, 1244 bp, Cannabis sativa
ctggaaaaataatttccaatagaatcaccactatccctaccgtaagtaaaagtaggaagagtaggggttccaccagcacttggagtcactcgcaactcctgaagaaattatactggaccctcggctcgtagagctttatcaaccatctctgcatatgatgttgcttcattcgtagtaatcaccaagtcgtgtctaatttttgcatttagaccttgtagatatttctccttcttgttgaagttcataagcacaatacctaaagccaacttggccaaacgatcaaattttgttgtgtattcagttactaacataccctcactctgcacaagctcggtaaattctttccgcttagcattgcggactgccttgttgtaataattggcattgaataaatctcaaaactcttcccaagtcataatagtgacgtcttgggtgagggactttccaccacatgagtgtgtcttcctggaattgaaaggtagcacaagtcacccgatcatttccaacgacccccataaaattcaaaattctctcttatcactatgagccactacgtagccttcattacatctggacctcctagaaaaactggaggtgcctgcttgcaaaacttctcgtacagtggctccatacggttgccagcaataggttgttctactagcactgcgcgaactaacgcgacctgaacttgtggtggaggcacagtaggagagccatgttgcctcaaccacagaatttcttcgtcttgttggcgaatacgatctttcatttctgcaaatctctgctcccaatctagaggagcttgaggtgggttatcatgtctaccaccctgaaaccttccacgccctctgccgcgtccatgaggattttaaggaattagatttccctgaccgccttcggtcttgaccctattaccctgactccttgtattttgttgggcgtccatttaataggacttagcctgcgaacccataagtcaggcaggtcagacaacaatcacaaaacttaacaccgctctttatggattttgaggaaatgcattaaaataaacaattataaactacaatgcttcctaacatgctttacccattacatacaatactaaacaggtgaaggcttactaaactgcgagctgagcttttctctgatgatggttgtacatgttttggcgatcttcggtagacaaacttagcggctctgataccaaaattgtaacgccgtgatacttaggtgcactacagtga

SEQ ID NO: 123379 - DNA, 582 bp, Cannabis sativa
aattggtaacttttacaaaacaccgattcaaaatggtatttaccttaaattaaattaatgtaaaacacatatatagttaagtacaaagtataattataaatattgtatggtgagttttcaattaacttctagattcaacgttgtatttttatttttctatagatttttttaatatttttagatctatttttataattaaataatttaaatcattatgtataaaaatacgtaatcataacttattgcttgatttttattatgtatcgagtaaattttcgaggataataataatatcgactacaagtaagatacggtgatggtaataattaagaaaatatgtataactcgttactttttattatgtatcgagtaaattttttggagataacaatagtattgactacaagtagaatacgataatgacaatagttgagatacaacaacgaaaacaaaattaactgatcaagatataaaagtaatattgattacaggaaatagtaattacttacatcataataatactttaattttctctataccactctatttatttattttatattaataatttttataatataa

SEQ ID NO: 123380 - DNA, 2784 bp, Cannabis sativa
  modified_base (2716)..(2722): a, c, t, g, unknown or other
aaatacagggtccattttgtcatttaacaaaacacaaggtctaatctgtaacttttgcaaaacacagggtctaaaatagtatttacccaattacaaaatattagatatccacttacaatttaattgaattggatattaaaagttagattataattagattgaatcaattattaaatgctaaattcaatttttttttttttttttgcaaaatactagattttgagtaaaaatttacaattttactgccgcacaagcctttacaaaaatactatctttttataaaaaaaaatctaaaacaactgtaaaacaacaaaacagaacaatttaaaacaacaataaaacaactaaaaaataaccctaaaacaatagtgaaaactaaacacattatttttgaaaaaaattttgccccacagtaaaaaaagttagaaatttcaatatgtggtgtaaaattcaaaatccaattaaaaatcaatctagtctaatccaattacatttatatattaaaaaaatatttatatataacaaaaatatttattttaattataattttaatggtttttttgttgaatttgtaacacttgattattttgtgtatttattttcatgatattttgttctgttttactacttggcagtattgttattttagttattttaaaattttagttacattaaatttgtaaggataatatctttatggagtattaaacttaaataaaatgtgatatttaatttttatgtatttttctttctttttagttaatattatgaattaagtgtgtaatcagatatcaaattaaaaatcggccaatcaaagttagattaaattttgaggtctaattaaattggatcagatagtaatttttttttaattctaattactaattagattagatcaaattaaaaaaaaacttcgatcggatcagatgtctaaccctgatctcactcttctactgttttggtgtaatttttttactaatttagtggaatctattattttaataagaatttattactgtataataacttcaataatttataccaaacatagcataaaataaatatactttacttaaaaaatcttccaacttttatatatatatttaagaaaattatttatattaataactaatttataatataattatgttatatacaaaattatataaatatgacattaaatttaatgccactaaatatagcatttcttaactaaacaaactaaatatacgagtattgtttattttaacaatagtgacgtgacaaaaatgataacatgtggtaccagaatactaggattaaattgaaaaagaatgtgtaaagtcatgaccgttggaagaaaattctgatagtcattcttcccctagcttgagcaaggtgactacccccaggattgcagtggactatcaccctcataaacaggataaacgatcaccacacacctgcaggagttaaaccagtctaggggtatatactactatccctacctcaaatgtaatgatctacatgtaattagtctaggagtacaccccttaccccttacggggttagtgtgggggtacaccccttacaccctaaagggttagtctaggggtataccccctaccccctacactctcatggtccaagtcacgtattctacctacgtaacacatggttgatatagtacatcttcatgacgccaatgatacccacaacatcaaagatcaagtggaaggggtttcggggggaaccatcctgagatgacaattatcatccccttcactatgggcctcgaggatgtcacccaaagtaatggctaatactctagaggaagtcaaacgatcataccgtactctaagagggaccctcatctttagtaactaattcaaatattcaaatcctgcaagaagctcaacaacaattacaaatccacgaaaatagcaggatattatgaaaagaattagacttcaaccacctccgaaaaccaaagagacagttgagatatctccgcaatggtcgtgtctcatgaagcgagaagcatcgacccttcccctatataaggggttacccatgacctaggaaggggatccgaaaattttgagtacttagagaaaaagactatcattgttatcttttgcattcaagagcatgttcttgagtttgcaactttgattaataaaatacaatgggagtaggttattaccgatatctggaccgtacttctttaaattatggtgtcattatttacatttattgcttgttttttgatttaaatctcatttattataattccgcgtcgattggctaaaaatccaatcaatattttggtactttcattgagagcataaaccaaaaccttgaattttttcaccagaataaatggtgcttaccaaaagatctcaaaaatgatctgatgaggagatggataatgctcgacaagttccatcaacaagcaatctcactggaaaaaatggacaacaacccccacatcctggtaacggtggtgcagccacagctcaagccactacccagactactgtcgatcatgagacaatcgacaaaactatagctgctgggcagatgatggctaggcgtaccaccaacgccgtcgccactagaggcagtgctactgacgacaccaccgaaaggggcaataccagaaattttgtcccaaataatgaaggtacaagccaaacccaaatcactcgggatccttgttgggttttatgccctnnnnnnnactcatttcatataatcagatttatttataaagatcagaaataacattttatgttacatggt

SEQ ID NO: 123381 - DNA, 1359 bp, Cannabis sativa
gagagagagagagagagagagagagagaaattgatttttttaggttttgtaaaaaaaaaaaaaatagtaagggttttttgggtaaaattagaagttattagaatagtattgtataaaataattaatgggatattttagttggaattttgatgacttgtataatgatacattaggtttggtgtatattccaaaatggaaaaaaggactgcctttctctttactaagtgtttatccactttattgtagtagatgaatgtgcatgtgatctttaaaatggttgggtttattaagaggaactaatattttccatgaccgatacctatgtatttagtcaattatttgggcttgattttgagtatgtaagcgactatctccacttgactgttgaacaatccacatctagaacaaaaccgtttgtggcacaaataaagaaagtaggcccccaaaaagataaaataaagggaataacaagtggtatgcaagacttcattaataacaaaggttgtaactttttgtttgtttgcatatgctagttcatcacatttaccaaacaagcaccaaactttcgtgtgtcaaactttctcattagtcgcttttccaataagatatccactaataatgatgctcaaatgagcaccaaactttcgtgtgttaatttcttcacaacagagctcaatcaaccaagtagtccagccaaaaaagggtgccactttcacctctttcacttcaaaattggtgactgcatataacttgaaagtaatgtgaagttgtaattccaaaaagctttgaggaactactttatttatccctagtataaacaggaattgcccagaagcccagtagtcaaaacaagatagaagaaagaaagaaagtaaacaccttgatgaaaaaaaacaaaaaaaggagcaaagggaaaataatttaaggactcttcagggtgtgatgattctctttctctctccctctctaatgtatggtgcaaactattaacagcattgcctaacaaaagagtgctggtaaaatattatacatctttctacgacaaaacattcattgctttttaaattcccaaggaaaatgcttaatcaggaatttgatcatagtccccattttctggagattgatgtgctgcaagaccacctctgcctgcaaagtaaacaaataagtcatttcagattatctcttactggtcacgtgtgtaagtcaagtcacaaccaaaccaatgtttgttttaccaatcgaggtaagtgattttaacagagtgtctaacataccaaagtttgttctgtttttttttttttttttttttgaaaaacgaaaaatataataggtccgaaccctagataacatttagcatta

SEQ ID NO: 123382 - DNA, 782 bp, Cannabis sativa
tcagcgcgtgtcactaaatccttttacaatcactcattgtgcgtcactataagcatttagagtcaggttttgtcagggtgaaaaagtaaaagcaacctccaaaacgcgtcactgtaactttttttatatatatttttttattattttacagatacagtgacacacaaaaaatgtcactatatttagttttttttaaaaaaaaaaaatatattcaatttttttagttcagatattatagttttgtgatgaattactttccttttttaattcacattattgttcttatttaatttaacattagggtaaaaaaaagtgtagatcggctactatttctttttcaaaaaatgatactacgattttttaatttgtatgaataatgatatatgtataagtaacaaatttttatacacttacatctaacataaaatgctgaaaagattttataccaaaagaaaaaatatacttagaaaattacagtaaacaatcacatgaacaaacacaaatataaaacctaaaacaaattacattaaaatatttcaaaaagaatacataattgttttaaagaaaatacaagaacaatgtaaacccagaattatgggtatgagaatttgataaaaaaataaaaaataaataacttagttccattgatagtgttgatcttcgtccctatctagctgcaactctggaaccgaccattttttagcctgaatccatacaaatcctccatcgtctgagtagaaagaacggacatagcagattcaacaagagagagagagagagag

SEQ ID NO: 123383 - DNA, 3271 bp, Cannabis sativa
  modified_base (3239)..(3246): a, c, t, g, unknown or other
aatcaagtaattaaactcaaaataaaatatgagttttagggtacgttaggaaaatcaagagaaaattgaaattgataattgaaggtaattataaaattttgtgtatttgtctaagggtaataaagagttttccattacactatctaattctcatacccctatgaaaattgagtgtaattatacggtgtaatttctaaaacttttttattttaaatattaagtactaaaaattattattttttaaaagtaattactagttattttactaaaaaagacattataaatttataaataattattacctcatactagacacatcttgtaaattgtaatgtattttaggaacttaatttatgcttataattttttaaaaaaaaagtcatattaaattaagaatagtgtaatattttaatttcattaatattaattaaagaatttattaatataaataagtatagtaagtttatatacaattataatattattattttattataattgtagaaattttatttaatatatagtaaagtgttacatgatattatatataagaactctacaataaattttcaaaattgtgggggggccacagcccctattgggctgcatgtggctccgcccatgtacccaacatagaagtttatagtcatttaagcctcaaaagtctagctcatattcaaattaaaaactaaaatccaagctaaaagctatcttccatggctgctgcccggttttacagttcaacaaaatttttaataactacgtacaaataacaagaaaatagaaagagaaagagaaagaaaaatattaagagagggtaaaagaaaaaatcaaacactaaagcttggcccccctttctttctcctctgttgtactttccttctgtatttacttctccttccaaaaaaatgcaactgctcacgttagatttaagatggttgtgtacttagcttttctcttctttttgttgttgggttcttagggtacaaaattcacaccctaaaaatagaagcccaatccttttgcacattggcccactaggtttagccctcctcctacacatcattcagctggtctgattttaagtaacaaacatgctcctactgacgtggatagctaaatctcgtgttttcacgtcacggccagaatgctgaatttgtttcagcattgcttcagcaatttgccccaatttcagcttttgttcccacttcatccttgcttccttttctttttcctatcaatttaattcttcattttcaacaacaaacaaacacatttaattagaaaaagcacacctaacaatatcaatttttacaagacttaaaagttagatcactaaatagaaatgaaactaatactagctaaaattaagcaaacaaacacattttcactactcttctcacaataatttcagtttaacagcataaaaataactctataccatagagttatcagttatggttttagaccattttatccctaaacctaaagatgacctaagcttaaaagtaaaggaaaaaattgaaattttgcctaggaaattcacttttgtccttagtgattttagtggaattgtgtttaatattatctaaaccattttagaattaagggttattgatattaattaaacattaagatagaaaaaaaaaaacctagacttatctttctctctctctccaccataatcgaccctagaagaatcaagagaaccaagccactttgctcagctattttttgtagttttcagtagagaattaaggagaattagaagcttgaatcaaaagaaaagccttagaactttcttttcttaagctttaataatttttccttaattttgagcatgcaaagttgaagtataggttatgtctaaacctaggtttagttgggttgatttctgtagtttcttgaagttgtttaaagcttatttaaggttgttttgttggttattgtacagttgagtaagtttgagttgaagaaaacttgactcaataatggtggattgtggaattttgtgtttaatctagttttattgattgggatttgtttattggacctctaataggtattttagagagttttggaagatttggaatcattttgagttaattggaggctttattgtttttctgcattaaaaacaacaagtaaattctatggaaatggtttaccatttttactggcagagaacccaaaaaaaaaaaaacggcttgctaatttttaggcagttttcccatatagtcatttttcttgtgtttcctcaatattcagggcgttaccatgctatttatcgatagagaaacttctaattttgagtttaggtccccgaaaaggtcttagaaagttgtttacccgttttacgtaatgatatagggcctccattcaacacgtaattttctattcaggtcgactagcacgcttgaattcggaaacaaagtaagattatcatataatatatatgtatgtgtatatgtattatatacatgcagtttatgtgattcatatgctatcaacactagtacggtagtggtactgagtgcattggtacaacatatgatgtttaaaggtataatctggtgttaccaacactagtatggttaagtacgttgtgcatgtggtacaacacttagtagtcctcggggtacggttcagctataccaacactagtacagtagcggtacttagtgcatgtggtatagaggtcgtacttctgttaagaatgttcttaatcatatgttaaacctagtggataggtgtacgggtgcctaaacacatatcagcaatatattatgtgttgtatgcttttcttactgagtatgttgactcacagatattgtttacatgtgtaggtaaaggaaaggctagggctgaccaacagtgagtcctgagctcggggatgattgtgcatgtgaagatggtacgacttggaaagtttggtctcgggacgacttggactttatttcgtagttgttgtacgacatatttgtaaagtgtattttgtattcgaacaaatgttttgaaaataggatctcgactttgtgtataaatataagtatatagttataaaagtttaaagtttaaataaaagttgaaatttgacacattttttgagaaactctttaattagcaaaggtgagcacagtaattaagaaatcattatagcacgcctaaacagtaagttgttacaagttcaaattgcgcacaaagatagggattctccatctgttggaaattattttacnnnnnnnntagatttactcacaagtatgtttat

SEQ ID NO: 123384 - DNA, 2293 bp, Cannabis sativa
aagactaccttgacttaaggtaattaagaatatatataatacacttttcatcgacaattttatttttcatatatcaaatattcttttttttatacgtataattgcttcgctagctctttttcttcttttttattttattttattttgagcagttagaaattaaaggcacatcccaaaaaggtctgcagtacagtacactaagtccgtcagttgaaagtaatgaaatagaatagaaaaaaaataattttttttttgttattttctgtttaattatattttaaaatattagaatattattttaatagaatgttatttttaccattttagtaaaataactattctattttaaaatagaattaaaaattatttcaatgtaaatttaaaaaatatattttaaattttattttatttatatttttatttttatttctatattttcatttttaattgtcgagttacttgtaaaattatatatgccatagtacaattcttcttcaatgaaatttgaggtgtcgaaattttaaaaagttggaacataaatacaaagagtcataccgatcttttgttctaacttctaattaatgatatgtgcgatttgattgttaatatacggtgatcaggtacattccaccttacacttcctttctacctttaaatggtggtgaagaagataacgaagaatattgcttaaatagtggagttgaactgaggaaaagcaaaggaagaagaagtaataaagctatagagaattacattttgtcacagctctcatatctactcatctccatcattcttgtgtgcatagccgagaggagaaacatcaaagaagatccactaaatttcagtgttttaaatattgcatttgagattatcaggtatgtgattaattaattaataataaaaaactttccatatatatatatgcataaatatataaccatatttaattgtaattgattgttgcagtgcatatgggaacgttgggtttacgacaggttacagttgtaaacgacagatagaagcatctaggaatagtagttgtgaagacaagtggtttggttttgcaggaagatggagggatcaaagcaaaataatcttaatagttgtaatgctttttggaagactaaagaagtacaatttgaacggagggaaagcatggaagcttttgtaaaatctataaatgtagcttaatttagggtcctatttgtaaaattttaaaaaatacaggtctattttgtcatttaataaaacgagtgtctaattagtgacttttgtaaaatacagtgtctaaatgatatttatccatatatatatatatatatattaacaaaaaaaaattgaagatttcctaccacaataatttataaactttaaattattatagtataagaattgtttcatactaataatgaaaaaatattgaagaaatttaaattattgtttccaaaaaaaaaataaattattaaattaatttaaaaacttaaattaaaaataataaaaagcatgtctttacaaatgattgaacttatgatattatagttgatgtaagaaaattttaccacttattgattattttaagattaaataacttacatattttgtactcttttagctataattattattgagtagaaaataaaattaatatataaattcaaaattaaaaaatagtttattaaaattataaaaagttataaggtaaataactaaaaaaaattataggtttggagtaaattttggagtattgttagttggatctaattattaatatttaaaattaattataaataaaaaaaaatattaattatgatgtagtttccaagagttagtttaagccttttgattaaatccatagttataaatcattatacctattaataggtaaaatgtacaatacatattgtattaacttctatatatatatatatatatatggaacactttttaattggtattatccataaatggttactaaacaaatttaactataaatgatgacatattctctaaaatcatttcaaagtcttctttctcttttctgaatttttttattttttaatttttattcaatttataattattatttaattaattaataaataaaaatagttatatgcaattcaaaatatatagcaataaatcacataatacatatctaattactctaaagtttaaccaacatgtatcatgatttaaaaaaatggtcaatatgcaaaatgactctaaatctaacaattaagttaataaatgtcctttttaataaaaaattaacaaaatgttcattcagttaaaa

SEQ ID NO: 123385 - DNA, 1735 bp, Cannabis sativa
caatgaacctatttgaagtggctcatttcgtcccagagaagcctatgtatgaacaaggcttaattttacttccccgcctagctactctaggttgggggtagggccaactcgagtgtcaaaacttaaatttagtattaaatcaataccaaaagagtactgttttagcactaattttttttccaattctgccaaccaaaacactaaaaatttgtattcttattataatgttattttattaatataataaaattatttacttaataaatgaattattttattattaaaaagtaaaaaaacaatgaatgtcctggtctacagtgcccactattattagtgggacactgtagactcccatcaacgtaagataggttttaggactcgattggagcattttgtggggaaaattacactatatataggtttctagtgtgccattggagatgacctaaaagcattttcggtggaccatttcactaaattggtgtgaaattttcacaccatttcactttaatgacacaccaaattatagactaaattggtgtgcatcaaattctatacaactaatattgttaaattttgaatctacaccaatttagtataaaacttttttttttgcattctagcctttatttgttttttttttaaaaaaatatatttgtacaatttagtcatcaaataaaaatttatcttgatttaaaacactaaaaaattaaaaaacacaaaataacaattcaaaatacaaatattaaataaaataaaaacaacataatttagaaaactaaaaagaacaacataaataaaaataaatattaagtaaaataataatttaataaacattaagtgtgattttattttattctcttttaaaaaaaatgtaatgtgtaatgtttaattgattaaataaatattttatttatcttacaaaaaaatattttattttattaaattattttaagatcttaaattcttactagtagccatcatgatataattataacataaattagttattttgagttatttatatataaataatataaaatagacattgcaaaaaaatataaaaaatatttatttagtgtgaatcattgaagttgttgcactaaaataaaaaaaaaaaattcaccaaatttgtgtaatcatcggagatggtctacgagtatctcgggtgcactattttactaaattggtgtaaaatcttcacactatttcattcaaaaatacgccaatttatacactaaattagtgtgtatagtgttagattacacactattaatgtatagttagattttaaattacattaaattagagcatatcttttttatttcagtttaactcttcttttaagtttttttttttttaaatatgatcataaactaggttgataatatgtataattatatcataatataattatttttggataataaagcaaataatataattatgcacaattattttattttcatcccctttttcaagtaagttatttttaatataaaatgtaaggttatttaagcaaaatatttttatttggtttcatattgtgtgtgatattgtttagtgttgaattattggagttgttatacaaaaaattataaattatgtattttattgatgaaaaatgtacactaaaagtacaattgtggtagatggtctaatcaaggttaatacaatgcatgcaatgttttttttttttttgttattttagattattttaaaatataattttttg

SEQ ID NO: 123386 - DNA, 980 bp, Cannabis sativa
  modified_base (59)..(59): a, c, t, g, unknown or other
aaaaatacagtttcacgaaattttaaatattttaacaatttttttgattttatttacanaaaatacgatttttttatgttatactcttgttaatttgttagtgatttttgttatctgtattattttttattgttgttttgatgttatttttcacgtagttgttttgttgttttcgtgttatatttatgaaaaaccgtaaaaatgtaaaaaaatctttaatataaaaatgtaatttttttactaatagtaccttatgtaattatccctgtaaaaaaatgggtatttttcaacttcttcttccttatagttttgaagagaacttttaaagggcctaaggcccaaaaaattaaatagttgaactcgtcttagcaaagaccaatgagaaagagtttggtccattttattttaatttttggagaaaggcgttggtccgttaaaacacacacacaaacaacttttttttttcttaaaaaaaaacaaaacaaaaacaaaaacaaaacaaaaaaaaaaagataacattttgctcttgcactctttaaataccacaatattattgatcaacaaaattatattgtatatccacaatactttaattattttaatttttacctttatttttatattttttacaatatatgatgttcttattatagcctttaagttgatgtaaattatatgctaaacttaagtagagagtaaaaatatattagaaaattcactcacaaaagttggtactttttaataaaatataatataaagatatttctgattaatgaaaacaagaaaaaagtatttctaacttgccactttgcagtaataccgcacccatgaaaataaagcttaagctgcatgtttgaaatactaagggcccaaaaggctcattagggtctgtattaattgggccatcgaataaataatgagaaatttacatggtgtactaacttttgctatttttttacaaaaatactgccagacggtat

SEQ ID NO: 123387 - DNA, 906 bp, Cannabis sativa
  modified_base (850)..(856): a, c, t, g, unknown or other
aataaacaagccaagatagaaaattgttgttgtctacaagtgaaccaaagacctctatttataatgtttgaggatacatttgaaaatcaaattcttttggtcaaatggctgttaccaacactttaattggtgtttaatgggataaacacgttggacaagagagctagaaacatgctcaattaatttatgtacatttatgaacatttttaaaaacttggtttcaagtattcggaaaacagccataaaacaacataataacaacaattaaacaaccgtttctaaaaaactcaaaatatagtttttgtaactcgtttcagagttaaatcttttcccaatgtcccaatactcatttaaatgatgtaattcagtattgtaacaatttctaacagctagaaacttatcccattaaatccataacttccatatgtaataactcacttaattacatatttatcagttgtgattcttaggttacaatctattttcagatttctaactcctcatatgttacaacttttatgtgtattattacactatatatgatataatacaatttccaacacataatatatatattaatctcatattaatttataatatactatattttaatctttattaaatatttgttaaataacaaatatataatagatgtttagtggccatgtaagcttttggcttcttgatgccactttgagaccttgtcttcatagaggtgttagttggtataggtagaggtattgttggtaagttttgtgttgttaattctgttgggacagaggagctaggtggtgcctcatgtaggactgagttgagagtgtgtgtttattgttggatatttattttaccnnnnnnntagatctactcacaagtatattgttcaaacaccttaaatatgaactttct

SEQ ID NO: 123388 - DNA, 1110 bp, Cannabis sativa
tttgaatatatttaacatggagggtttaagcattatgaaataccaatattattcttttgctttgttgttgttgttattggcgacatgcaaagcacaactctcttcaactttttacgacaatacttgcccgaacgcactttctactatccaaacttcaatcaacgccgccatctcacaagaaactcgtatggccgcttctctcattcgtcttcactttcacgattgctttgttcaggtaataaatatatatattacgtaccctactagctagaaatataagcacactacataaaatatcttacttttagtcacagtcaaatttatctataagtaaaaaaatttgtgattaattaattataaattattattatgttgtaattaaatatatttttagtcacaataattgttatggcgaaagctaaattagttacattaagtcgcaagtaattttttgttaagacaaatcacaaaaaaaattaagttgtgactaaaaaattatcactaaaagtattttttttttaattgaaaataatttattattattattgttgtagggatgtgatgcatcaattttacttgagagtacagatacaatcacaagtgaaaagtcagctccacaaaatagtaactcaataagaggtgaaaatgttattgaagatgcaaaaacacaagtggagagcatatgtcctggagttgtatcttgtgctgatattcttgctgttgcagctagagatgcatctgttgctgtaagtactcaccatatatatatatacatatttatatattattataaattgaatttattaattaattattattatttcaggtgggtggtccatcttggacagtgatgttagggagaagagattctactacggcaaacttggccgcagccaatagtgatcttccacgttttacagatacccttcgagaattgattggaaatttttcaaacaaaaatctcaatgctagagacatggttgctctttcaggtattactataatttcatctttttataatatttattaaaataaaatattaaattacacaaataataatattataatttctataataattatttggactacttatttaaatgcactata

SEQ ID NO: 123389 - DNA, 695 bp, Cannabis sativa
  modified_base (639)..(655): a, c, t, g, unknown or other
tattttttttttataataattattcaatttttcgataattttgtttatttttaacaagtttataatacataaataacaataacattataaagtttatattaatattttatttaatattgttctcaaatattaacatttcgtacaaaaataaatatatataaaatatttatacgaatttatttggtttaaactgctatctagatttcgctcagaagttgaataaaaatgaaagagaaaaggaagatattatgttgaagaatcttgtgctcagagtaagtaatggaaaaggtagattaactggtatactagttctttcatggtgttctgtgctatactagttcttctatggtgttctgtttatattaaaaacttgttattaaacaagattttttatataattaaaactaaaggcaaatggctttatatatagcctaagaattgccaactttttacttcaaaaacgatgtggattaaaacccattaaatttttcattcacaaaaaataattgacaaagtcaacttttccaacaatttcccaaaatgatttgagaataaccaacaaatagttagaccttgtaatagagtttaacgtttgaatcctacataggataggtaggttttaccctttgaaccttcccnnnnnnnnnnnnnnnnnctttactagctgctcagtagacgcgatgtctttgaactgt

SEQ ID NO: 123390 - DNA, 1190 bp, Cannabis sativa
aacatgagtgggagtaagttatcatatgtgaggacaatataagataagataatgtgtgatatatgtgtgtgagtacagcatgcattaagtttatattgtgatatgatgatatatcatatgtaggaataatgtatgatacgacacttggtatacgtatatgtgtgtgagtatagtatatattgatttgattaagatattgttatatgatatttcattgatgattatgttatctatggaaaagttatgtaatacatagctcttcttattgggcattagctcacaggtgctttgtgtacaggtaaaaataaaaaccaaacagtgaagatgcgagctcgaggcgtggaatgtgttagggttgctaatctaattattaagccttaggtattacaattatggaatgtgttagatctaccaactactttatatgtatgaatggcagggtgcaagggtcccttgaagttaagaaaggcttgaggcaaggtgacccactatcacctctcctctttgtcttagtaatgaaatacctcacgagaagactccaaatggctgccttggttacaaactataaatacattatctatgcaaacgtttgtgtcttcttaacctttacttttacagatgatataatcttgtttagcaaaggaataaggagcttaatgcttgttcttaaagacatataggatgagtttggcaatacctcgaggttgcatatcagcaaagggaaatcccaaattttttttgggggagtccaagattttgaaaaagcaaccgtccttggagatttgaagttaatggagggatcatatctgcttcgttacttaggagtttcgcttagaccaactaagtggaaagttgaagattgtggcatcattattaaaaaaaaatccagcagcatctccatttatagtcaagaaagcatttgtcttatgtggggaggattcagttgattcactctgtattatttgggctgcgcaactattggatgagtatcttcgtccttcctcatagtgccacgaaggaggttaaaagattgtgcagagatttcttatgggaaaccaatggggttagaagtaaattacatgttgcttcttaagaaaatatctacttaccaaacgcatatggtggaatcagtttcaaggagggtgtcaaatggaatcaagcaattctagcaaaatttatttgagccatca

SEQ ID NO: 123391 - DNA, 974 bp, Cannabis sativa
atttcaaattctcaatcctctaaaattttttgaattcctttcaactgagaacgatttcgaaggtttcaccacttataaaatcatccaggaagaaccgcatttcaaggttagtgatttaccttctctgtaactgttttctttttcttgagaatccgtatgcgttctgtgtttttagctctgtaactgttttccttttcttgagactctgtatgcgttttgtgtttttaggggtagaaaatgcatgaaacaataggatttattatttgcttttcgtagtttaggcaaaatactgtatttttttgtaaaatacaagcctgaagcttgaatactcgcgagtttcaagaagaacattttaaatatttgtgagtttttagaagaacgtcttgaatactcgctagtccatcgaatattcgtatgctcaaaataactttatctaaccaatagctaaactttttgaacccgtttttttagagtttttaactattaggcctttttttagcttgtaggttatatgtatttttattgtgaaaactatctgggatctcaaaatggtgggagtgtcacattaacttaatgttcatgcaattgtcgcatgccccttgggatactgtgatacgcctaaccatttcttgagacatacggttagttttcatttttctcgcatttcattcattgttggaactgattagattctcaaaatggtgggtgtttctcagtgacttaatgttcatgttagcgacatgacccttatgacactaagatacccccagccatttttagagatgtatggccaattctgcaaacttttctgcttaaatttttataatgcgggtgaaagcacttaactcgttaaaattacactcgcaccacactgactcgggagagggggccttcgctattgaatcagaaaggaacaacaacttcatcccaacctcgatgtccgaggatgaagctgttggaaattattttactag

SEQ ID NO: 123392 - DNA, 673 bp, Cannabis sativa
  modified_base (620)..(647): a, c, t, g, unknown or other
ataccccatcaactttgtttcaagaagaaaaaatgaaaaataaaaaataaaaaaaacttttgtggtacacatttatacatatccttattttatttttcattaatttgcggtacaattattaaaattttgttataaatgaaaaaattggggcaaaatctcaaaatttttatcttattagcaattaacttctaaaatttattttttagtggcaaaatccccaaaatttatgttttgttagcacttgacaatttttatttaggtgttaagtatcatattagacttacacaatgcaatgttcacatgaacacaatgtacacatggcacaaattaattggtctacctaatttaattatttaaaattatacaaattatttaaaagaatattttaaattttaaaaataatgtttaataaattaattaaaataaaagaataaaaattaaatttagtaaataaataaaagaattaaaataaaatactaaaaaaaaactaaattccttaaacattgttaacgcagattttcgttaactaaatttgagcatcacaatagtaatttcacacagaaataataaaaactataaagataaaaaaatatgaacatagggttttttacgtggttttnnnnnnnnnnnnnnnnnnnnnnnnnnnntcaatcttattcagatttctgattat

SEQ ID NO: 123393 - DNA, 654 bp, Cannabis sativa
ttcaatacgcattgataattttattattgtttaggaaatgagaattaatactttagatctaaagtttttatctttaatctcatgtgtgcaggtgcataataagaataaaatcaaataatatattttttaaataaatatattaaatatataaaattataaatatatttcaaaagtatataaatataaattgatgaccattggatggtaattagatcggttcattcggttatctattggatcagatgtcttatccaacaaccaattcgatcctgttggatttttaaaatttacatctgatccaatccaatcataaatggatatctgattctattaggtcgattgggattgaatctattggttataattagattggatgactttatacacactcctaactaaaactctattttgagtagtgtatgtcgattacgaaaaatatgatgtggttttttaaatttgcaaaaatatgttacacaatgaactaaagaattttaaataatcaactaaactgaaatataatgcagtaattatataattttataagtacatttatttatactagcaaaaagctacgtgcgaggcacatagtcgtatactaaattttatgctaggtattttctactttatttaaaagtgataccattaaaaattaaa

SEQ ID NO: 123394 - DNA, 948 bp, Cannabis sativa
ttggatattctgactctaactttgcgagataccaagatagtaggagatcccctttaggctacatatatctattaggtggtagagctatatcatggaggagtgcataacaaacactcaaagcttcatccaccatcgcagtagagtttgttgcatatgttatgagtcattcaaccatagtatatagctaagaaacttcgtcatcgggctgcatattgttgatagaattgaaaggctatttaagttgtattatgacaataaatcagctgtattgtattccaacaacaacaagagcttgacgaagttaaaatatattgatatcaagtttcttgttgtaaaagaaagagtatagagtggacatatctatatagaacacttaggtacaaatactacgattgcagacccccttactaagggtttgccacctaaggtctttcatgagtacattgctcgtataggtcttttagattatgaagatatctagattcagtgggagtttatttttattatcctttgtgttttttatttgtttcatgaaacatgtgtatttggatatttttctaattagaaattatattattcagtttatatcactttgtacatttaagctaaagttttgatctctataaagtaaggtaggaccaattaaaaattgatatgaatagatcaccatacacgtaattttcataccacattatcatgattgatctatgacatttgcctatgtcgatatatgtgactattgatgggtttagttgtgatttatataacaaaaactgctttgatcctatgttgatttagttaaaggatgagattgtacatgcctacagctgtgatgacaaagttatgagctccataagattaacatatttatatggatatatatttgggccagtgggagattgttaaaaatttatttatttacaattgtatatataaaatgtgttgggt

SEQ ID NO: 123395 - DNA, 813 bp, Cannabis sativa
  modified_base (767)..(770): a, c, t, g, unknown or other
ggggggggggggggaggattgatgaataaaggattttttgaagaagagaaaaatctagaaaaagggataaaataaattaggaaagaaggagatttagaattttaatggacacactattaaaagcgacaataggggcaaaaaagttgcccctaatgccttgactgtgtcaggtggtagggcattaggggactacaagtcgcccgtaatagtatgagtgggaaaattcccgcctatttgcaacggtgggttttcaacttattaggggcaacttttttcgcccctaatattattttgtcgcttttaatagttttatatgcaacatgtgtcgcccctaatgttggatagattaaaaaaatcaagtttcttgaggggcgatatttatttgttgcccctaatacccttactattagaggcgactttgtgtcaccttaaaattggccgcccctaaaagttatatttgttgtagtgccattggagcgtatccaaaaatatcagtagaaaattacccaacagccaaaaaattaagaatgcagtttttatgtattgaaatacatcagtgacatcgtcgcacatgtaaatcctagtagatacttaattgatgtaaaatcttctgtaagtttttgttattataattatcttatttattatattaacaaacaatctaatatataataataaaaatatttacttctttttacaattaggggaaaagaagacatacgatgtaaatatttggcccaatatacgtggaccaaccagacaaggannnntggatcaagcaacttatgattcaaaatatttgctaagtcttta

SEQ ID NO: 123396 - DNA, 1917 bp, Cannabis sativa
  modified_base (1559)..(1560): a, c, t, g, unknown or other
  modified_base (1862)..(1867): a, c, t, g, unknown or other
aacatggtcgaaatcgtggactagagcttctttgggggttaagtgggtggactgggaagtaggtaagtttgccatgggtaagtacaggagcgagaaagataagtgagcaaaagtggaaaaaagtacatgtgaaggatgatcagaaaacaaaatgctgggctttaaatagaaaaataaaagaaagatatacctgaagtaagtataacctggaagatgaggagatacgtgcgccatttgagctgctggaggtctagatcctcgtctgcccagccatagggcaatgattcgcctccatctgaagaacaagatagatattgaatgcatgaaaggataggggaaagaaggagagccaaaggttgtctgagcaaacattaatggtagtctcggtagagggaaaacgggggctgcattaaagaataagcaatgatgatatgcagggtataatgaaaatgcattaattagggaaagaaaagaagggaaaacgacggttgggatgtagaagtgaactagaagagaactgggagaaaactggaagaataccagaaaagaccctagaacattccagagcagggacttgattacaattattgaagctttagttattttgcgctctctttcttctttaatttttttattttttttaaattagtgttttatatattacgaaaatttaattttatagtcattacataaattatttttttggaattgccgatacctcgatcaaaccagataggttgttagtatacacccaattagtcacgttatgggcaataaaattaaaacaccaaaaatcttaacaaaatcacaacccaccaatagttaaaaaaaaaaaaaaagaaatgcacctactaacatagctatcaatctcccatcttagtgaacttcctctaagagcgttgatattggtaatttccgaatcactctcaataaataaaaaattgtagcccaaagctactgaagcctctagagcaactaagcaagcaacaacttcaccaatgagggtatctaaaaaaagaatattgttgacagctatccacacaaatgagcccacatggtcacgagccacatttgtcatacacatggtctccctcctatttctcccgtcacaattgatcttaataaaatcattcggaaggaggtaccatcgagtctcagtgacccgaatccttttactttgtcattctctttggggttttacactagaaattacagtaaatgaccccaaatcataggactatgttagtaaatgtcttcatttcaaaacttgtaaaaaaatagtcgttttagactatttattatttatattgtcttttgctacataaaaacaaattaataatttttttagaattagaagcaaattacttaaagatcatggtatatctatattaattttgctcaattttttttttatttaaaagttctatcaatttttttcaatttcttattagttgttgtggttgttggtatattggtacctctaggtaaatcataatgtataaggctaattattagcaaagtaccatcttaagtacatttacttagacaaatagtgagtnntaagttgtgcacttgactataatgaactcattaccaagtctaatacagagttcccaagggaaaccatgcctacaattgtatatgcctccaaaggtcgtcacaaggccgtagctaaggtcaatagaggacaaagaacgagctccccgttttgaaccttggccttggccagctaggattccccagccttagagggccggccaggtcccatgacctagcctagggctagccatgaactttgattccaagcataggccggcgagcccatagggtaccacccttgtgttgggttttataccctaaannnnnntccatttcaatgtaatcctttttattcaacatcaataaagaaacaaaagt

SEQ ID NO: 123397 - DNA, 3612 bp, Cannabis sativa
  modified_base (81)..(98): a, c, t, g, unknown or other
ttttttatcaatttttttttatacattttaaattttattccattccattcatattcctattcccattcccattcctattcnnnnnnnnnnnnnnnnnncaaccaaacgcctccttaattctcatagaagtcatgagaattagagagaatacttggaatcacttaattacacagtgtaattaaactcaattctcatagaagtcatagaattagagagaataattggaatctctcaattacttacaattacacaattataatataattacatatttagacaaatatattaaattgtgtaattactaccaattacacacaaattcaattacattgtggctttcgaaacccaccctaaaataaattatttttgtaagtttaatttatataaatttttctatgaacaaaatataatttgcggagtgttaccatcaacctcctattacaacttctctttctttgttgatcttattccaaggactcctaaactccaataaaccctcgaaataattttccaaacctcttaaaaatccaaaacacctcttgtgctttgaaaaattcttccaagttacttaggctttttccaaccaagtttgactttccttgaattgtaagcaacttgaattattgaacttgagatggctagggtaaagagaagcagaaggttacctgatgaatatgatccccatgtttctcattttattagagctaagccgacagtgcataagtctaagaacttggacaaggcgcgtggtggaaaagtgatggcaactaagcttctcaaacctatttttgagagtgatgatttgagagattgagcctttaagcttaggcctcttgtgtctagtacccttaccaagcttcaagctcaaaccatacagatgactactatagcccagaaaatgtcagtcggaagcctcgacatggtggtcccaaaggttcccagagtacttgctgtagtgcttggtcgagaatccatatgaatgcaagtgcttacttgcccttgcatccatggtttatatccattgctgacttattcagtgtttgtccttactagataaatcctaatggctataggattctagccaccttttttatattttaccgccttaggaactggcctatcccaactcctcacgagataaattttctatgggacttgaaaaggagtccaacttgtagaaatcaagacttctaccattttcaccaatttggcccgttcatagaacacataaccaaaagtaattgtggcttttatttactaccaggagtttttctatactcttgttctttcgtcaagacacattactttccaaaaaactggccctttcgaaagacatgcttctcttattaacatgaagaggagagttaataccatgttgcttaaaattgatgcatgtgagagagatgatcgaaccctctttaatactaaaaatcttcggaaggttgggttgattatgtcatgccagagagtgtatgttgatgtagccttctctgacaaatcttggaccatgcaacttagggatgttaacggggtgaggcgggtgcggggattgctcccccacccccatacccgcttcttaaattcacctccatacccgccccaatacctgtttaaattaaagtgggggcggggcggggattacccgacgagggaaggattcccatcgagtacccattacatatatatttttgaaaaaaaaaatgatgtctcaaagagaattaaaaaaaaataatcataaaaacctagtaaaacaataaacttaagtggaatagtatgtatagtaaaaaaaaagtataatcaataaaaagcctaaaacatgaagttattttaattgtggtaattatgattttaaaacttaaatatatacacatatcatatcggggcgacttcggggcaggtatccattcacctgtccccacaccgtttccgactcgggtatgaatctttaaacccatacccgcccctgcccccgaaagtcaacccccgtaccgccccattagggacgggtacccgaactcgccggtataattgccatccctaatgccactcgaacaaagtgaggaagatgctcagagtgctactgttattctgtctcaaattgtgacagaaaaagtaacttctattcaaaatgacacagaatattcaaggagaatatctatgttcttagaccaggatggtggagaagttacctccgctaggactgttctaaggaaggatgaggaatcaataggttgctgacactccatgttgtgttcttaacttgttgacttatttctttttgttgtagtaacctctggtcttcacttttaacagaaaatatgatcttcttggctgccatggcatcttgttcaaacaagaagaggaagattttaacgctgaaggaagctgagcccccagcaagggaagtggttcaacacatccatgctgccttgctgcttcgaagaaaaaggtcaagaagaggagtataattgttgatgttgctcttcctgctcatgactttggtagggagaagtcaaacattgttggtgcggatgagagactctaatttgacctctctctagatgcttttgaacatgttgctccgaactcgagtttggacttgatggagcaattgcgtgagtaaggttcctggtttcttactaatagtgaggccccaattggtgctaaggctgagaacattctgttgcagtggttggttagcaccaagcctctacatatcattgctcaaagatgcttcaccaacatctttggagtaagtgctttatcttgtctccttctggcttaactttcttttgttgtattatcacctgacattgtttcttttgtttttaggcttgtgttggttatacttacaccatggataacgatcacaagaagggggtggagctagctgagaagcttggagttgctaaagactaggttgttgctgctgaaggccaggtaacttccttgaaggaacaagttgcttctcttgagagtgaggtgaccaaacttgaagaagcggctagaggttctaggtctcaggaaaatactttgaagaagaacttggtggctactcgaaagaaagcttctgatcttgaagagtcttctcgtgatactttgaagaagcatgatgttgtggctaatgactaaagggaccaggtcaaggtcttggagaagaaagttactactcttgaagatcaggttctccttgatgtcacctactacaatggcttatgttttaatgccatttatacaacctgggtcgctaatggtaggtcccagtcattcaactagcgtgatttccctagccatgatgtgctagacttcatcgagcagtgtcaaaagtgttttgatgtagaatctttcaaagaaactgacttcactgtaaatggtgttgaaccggttgccgaagaaacttcagaagttgaaggctacaaccctaagcgtcgtgacttccctccttttgttggtgaggcgcctcccgtggagagtgaaggaagggaagagactcttattgatgtaacaggcctccaagaccttttttgagtccattcttcttttttgtttttagtatttagctttagtgtgttagttgttaggttatttttagtattaattttagattaagtt

SEQ ID NO: 123398 - DNA, 710 bp, Cannabis sativa
aaaattgttatttttcaaccaaacaaaataatcaggcccattagtattccattccattcctttctggcccattaccatcaaccaaacgggccctaaatgcggaatgtatggaaaaacatctcgtaataaactgtcagttaaagtgactttttctaataattaattatagttattatttaaagttccatatttttacaacaattagataaccaacagttttaaaaactaataggaaataatataaaagacaatcataaatgtatgtgaaaaatttaattttgtagtagtgctcagttataaacctatgagctatctagagatatgagcaataaaagaatcccactccgaacgacaatcacctccttcagcgacagaccgtttcactgcaacacccatttccacagctctcttcctaatctcatctccttcttctgaatctgaacccattattctcctcacacttctgctgatcatcgatgaagtaaccaactcatctctttcctcccattccattacagccacccccactttcagaacccttgtaatcaacaaaccattgaaaggttggtctgattgcattggccaggccacaatgggcactcccatactcaagctctccacacacgagttccaaccacagtgactcataaacccacctgtagatgagtgccccaaaatcttcacttggggcacccattccctcaccacca

SEQ ID NO: 123399 - DNA, 2682 bp, Cannabis sativa
tgtccagtcaagtatccgtattcaagatccagttcaaagagatcctaatgtgacacaggccggtcaacaagtcgaacaagttcatccatatatgcaagcacaattggatcaacttaaaaacatggtacaaggactaacaaccccaaaacacactgatctcaaacttgaccgagcacgtggatctctcttctccccagagattgaagtccttgagcttcccccgaaattgaaaatgccaaattggaaaatgtatacagggaaagaggatctcttataacatctgaagtattttgagatgcaaatggatttgcacggggtaaaaggtgatgtccgatgtagaaaatttcctaccacactagaagaggtcgcccagtagtggtacttcaagctgcctccaaggaggtttaactcatggaatgccttcttcttggaattccacgcacaattttcttcctcccatcaacttccatcgcatcaagaagacctgttcaaagtaaagtagattctaggagaaccctttagagcctacataagtagatttatgactaaggacaccaaagttaaggggttgaccgaagaaggaaggttggttgatatattggggggcattgagccacttggagaactgtggaaggatatcaagaggctgactgtggagtcaagggctgaatttttggatcaagcatatggattcattaagctcgaagaagttgttcggcccgtggatgctgtctgacaaaagataagccaacaagaagccacatcagtaggagcatccttttagaatccataataccctagcaactcgaactcaaatgggaagacgtataacaacggaaataggcagggtaatgggaagaagggcgaattcactagatatgccaaactgcaacctagcgaaaatgcctcaaaatttattaccttgtcagtcctaacagatgacctagagtgaatctacatgacaacatactatatggtcccatacaagaaaccttctcccatgaagaaggatgtaagtaaaagatatacatccaagttttgtcgttttcgtgcagactacggccacggcatgaatgaatgtaataatttgaagtgggaaattgattttttgatcagaaggaataacccacacttacagaaatatgtcaaggcgaacctgaattagacggccaccaaagcagactataatcagaaccagttgatgcctccaccaatggacacgcatttacaggtcattattgggggtccacatcttgccggagactcgggcaaagcttgagaatagtatgatcgagccttacaatatgaacaaaatgaaacaatgttggccgtagaggaaagaaaaccaaaaataccatgcgtaggggaaccaacagtaaccttcactgaagcagatgccagccacgtccatttcccgcacaaagatcccctaattgtagaggtacaaattgcaaataagacagtggcacaaactatgatagacaatggagcttcctcgaacatcctatttaaaacaacttacgagtagatgggactccaacttaatgatttgatcccctgtacccaactcgtatatggtttctcctgccagagcgttgtacctctgggataaacccatctacccctcactgatgggcatgctctgaggagcataactatgattgcacaattattgacaattgatgtttcatcaacttttaatatcatgttaggccgacttaccctatgtgacttgaaagttgttgcatcagtgttccccctatgcgtcaagttcccaacaaagaatggggtgaggtgcctcagaggaaactaaagaattacacgggaattctataacctccccctaactaaggtgaaaaaggaaagtacctccaactagggtttgggcaagggcaaaagtattgcccaatatgaagttgcccaaggggggacgaggacatggatccctgactttaggagtcaaatacaaatgtagggctggtaaaagaactagaagaagtgaaaatcgacccgattatctcgaccaagaaactcaaaatttttaagggtttgttgctcgaaataaaattactttaataaaaattttgatagcaaatctagacaatttttcatggtcacatgaggatatggtcggtattgatcccactataatgtctcgtgccctaaacatttgtcccatccagcaaaagagaagactactggacaaagaacgggcgcaagcacttaaagaagaggtagaacgactgtgtgaaaatgggttcatcattgaagctttctacataacttgggtagctaaccccgtactagtacccaagcctagcaaaaaatggctagtatgaattgattttaccaacctcaacaaggcatgccccaagtactagtttccacttcaaataatcgatcagcttctggatgcgatagccgggcatgaaatcctaagcttcatggatgcctctttggggtataatgaaatcaaaatgcatccaccacaccaagaacgtacaagtttctgaacagatatgggtatgtattgttataaggttatgtcgttcggtttgaagaatgctagagctacttaccaaagactggtaagtaaactgtttaaaaatcaaatcagacgaaatatggaagtatatgtggatgatatgcttgtcaaatccaagaaggctgggggcacataga

SEQ ID NO: 123400 - DNA, 1472 bp, Cannabis sativa
gaataacagagagagagaggggggaagttagacagagagagtgggagaagagagcttttaaattgtaagggtaattttaggattttaaggtgtttgaagaatatttagagtatttatttaaaggtagtatattaaaataatagtctaaatttttaagtatattttaacaaatttcccttttttataaggggtcccaattttttttttttaattattattattattattattttgacataaagagattctaatttttatttttgcattaggctcaaaataacataaaccatgaaagtaaaaaaattaaaatatatatatatatatttatatatatgtcatattaacatcaattcaacaaagttggtttctttgcttcaatgtagggctatttttgcaagctaagcaactaaatttgtataggggtgtttattggaccacatccaatatttttaagtctatccaaatctgatcatccaattatatattggatgttagattttatcatctgatccgatccaattaatttcagtcatccaatcgatccaacatacacattggatgatggatttgatcagttctatccatgagatgtatttcatatatatttattggtttaatttaggtttatctaatattttagacctagtattttttgaatcggatcgtatccatctaatattttaagtccagtatgtactggattagactggatccatcctatccaagaaaaaagagtaaaattttaatgttaatttttatatatacatagatattttacgtataacaatataaatttttattactcatccaaactaaatgaaaatactaattaatttgattggatgttggatgtattgaatttttggacacctcatccaccatccgatatgatccaattggatatttaaaaataacatccaattcgatcggatcacaattggatatccaatatttagcggtcggttataattggatcgatcagttctcattagattggatcgatttatgcacacccctaaatttgtatacctttggacaaaacaatatttgctcttttttgttttgttttttgtcatttttataaatgagaacttaaattagtgcatcatgctcttgtctatctccattactcatttgtcactcttattaataatcctggaccatgggattttattgatattgttacatttattaaaattaataatagaagtaaatttatatcaaaccaaaaatatatatataattaaaagaaaataataataataaatgtgcttgaatacagttatggtagttttctaaaaataattttttatatattacttagttattaattaattaattaaaatgttttaggcattatgtcaaatcacaattgtgtcattagtagaaatatattttgagtatctctatattctacactttttaaaagttgtttcgttagattttttatttgtttcggtatttagaaaaaa

SEQ ID NO: 123401 - DNA, 1460 bp, Cannabis sativa
ttctattgttttagaaattcatatttaagatgttaaacaacatacattgtagtaaatttagatcttggtaaaataatccccaacagaaaccacatcaagctgagaattatggttggtgggcataagtgtcgtgttgttagactcaaaatacgaagaaatgcgggatctcttggggtaaggaaaagagaaaaggttcatccatttgaagtactcaagttaaacatacatttttagcatccttgctttatgtgcatgtcagtgatttcgaatgtcttgcaggccattatttcagtaggaaggatatactaagaatggagaaagtcattttgcagacgttagattggatcttaactattccaacactttatgttttcctcgtttgtttcatcaaattttgttgctcataatgtggttaagtgggcgtttttccaccaaatattcgattgtattccaatttcctctatccctgaactcattttttgtaacgacaatgaggtctaactgattttatctattgaaataacgcttttcttcaaaaaaaaaaaaaaagaggcctaatctctattttgttaaatgataaatatgatcatatattttctaataatggtataaaatagtactcttaattgattttttgatcaaaataaaagtagtaacaacctgttttagagttgtaatgataaaactaagtatattttctgcatctgttcattctataaattatctttaaatttgttatattaaaaaaaatatcaaaaattaagctcatgatactattttatatcattttgaaaaatacaagatctaatttgtcatttttttttacaataaatgatccaattagtaacttttacaaaacacagaatctaaaacggcatcaatccctataatttattctgttttatgtgtaattaattaatgaacaatctaactttcatcacccattgatccaagtaaaaatggtgttgttcaaggggttcggggttatgtgttttgtttatatctttttttttttttttgttaacaatagtgtaaaaatggtgttagttttaactaatgcgttcaataattacgacaatcgatttaacattagtgtttagaaaggtgttcatttttactttttagtcattctccatatctgaaatcatgttggaatatttttttttcatagtgatattcattatagttacaatatcattcatgtaaatttttgaaaaattctgaatagttcatagtatcgaaaacaaagttcctaatattctagtttaacatgcgttcaaaaaacttcaaacatattttcggcactgaaatttttttacagaagtaatattgtaaatataacaaataccgccatgaaaaaaaatttaaaacaaatattccgacatgtgttttcgtacacagaggttgattttttttttttttttttgaaagagaaaaaaaaatcaacctctgtattcgaa

SEQ ID NO: 123402 - DNA, 536 bp, Cannabis sativa
aatctaggattctaaagacaccctatatgtattgtgatttactaagacactcttatttcaggcttatttattatttggagatgaagagtatttgttcatatttcaagaagcttatgcagcggctatgcactacctttacaatgatccttggtaactgcttgcagcctttgatttgttagtggtgaaaattgtatttactttcccttggtcatttggattcaataaggcattgaatttggttttatttgtaggtatgtagaggtaaacatggattctgctgctcttgtctggccattgtttaacagtttgcaggctttctggcctggccttcaggttttttctatattacactagaatgagtgtttgaaactggatagctcattgtcaactactttcataaatcataattgattttgtactcttttaacaggttttagccggggatattggccctgccattcgaacccataatgccttctttagtgtctgggaaagatatggtttcaccccagagggtttcaatcttgctacactca

SEQ ID NO: 123403 - DNA, 655 bp, Cannabis sativa
cttctgttgatttcatatatttttttaatatttcaggaaacggaaacgtggtagaaaatctcacaattataactttttattagttctaaccatcttctttcgtctcatgctcaactcttttttggtgaagaacactttcatctattgtattttatttcattattattttttttcttttatctttttattttaaagaattgtatcttatatcttaaagctaaagaatgtgaaaattacctaaaatatacatagtaaaatgaaaggttgtagatatagtcagaaataagaagaaacggaataaagatttttgaaaaccaataaaatataataaagcttaaagaaaaggattatagacaaagaataaaattagagtttttatgtggttgggatattaaaaaaacttagtctacgagatattattattatgtttagtctggaaaagttttaggatttacataagtatttgaaccctacatttttccggaccacttaagaaatgagattccaaccctttgcatgaataagtttttttatatttatagtgctaaggttctttcccactgatggggtaaatacaaataatataatgacatttgatccactacaaaaaataactatttttagtgacaactttttagtcaaaacataaattttt

SEQ ID NO: 123404 - DNA, 936 bp, Cannabis sativa
tttctccgttatcgccattgtgtaggcaaattctacatgtcacaacaaaaagaattatccttggagataaaaattagaaaagaaattacaaaaataaaatatgattttggatggatattacgactctagttggctgagctgttataagttgcttttggatccaaaaatcacttctgttactagttgagtaactagtgaattttaatttttatatgaaaaattcttttgactgaagtcaattttagtagttttttcaaaaaaaaatttcctgaaaagctaaaagtagaaaaacagaagcttaaccaaacataattacaatttttatcttgtagattttttatgtcttctatttattttttttttattttctatattgtataaatttttaaaagagcatttctccagtggtgctcaacacttttttataggtggcgctccatgatttgttaacgatattttataaatgctatttatttaacaattctctttttaaaataaccaattatatattagtgttagataggtttattctttttaattaaaaaaattcaatttggtgataacgggtttcattcatactactaataaagttaaattgatgataactaattattcattcatcaatttttaaaaggcaaataaaaaaaataccataattttataatatggtattgagaaaaaaaattgaagaaaatgatgatactatttttaattccacacattttataatatttaaatttaaattctcttaatttttttttttccgaaggcatctggggccttgcgggtaattaagagtaaacaatattaagataattacataaggtatcattttttattagaaaataccatttttatgtttaaagatttttcttttatatatttttacggttttttataaaaacaatacgaaaataacaaaaaacctacataaaa

SEQ ID NO: 123405 - DNA, 856 bp, Cannabis sativa
ttgcaaaatttaatagtaaatatagggccaaatattcaaatatatatatacatataaaattagaaaaatgaaaacaacattttgtatggtgtgtgacatttgcaagaaaatattaaatgttatgcatgtgatgtagcggtataacttttttgcaaccacaaaaagtttagatggaaaaataaagagtcgaagatgctaattttttttcaaaacttagaaatatgaacacaaagaatggacaatatttgagaagattgttagaaataatcctctctacatgtaagattaacttttataaagttatttctgactttacaatttgattggaaaatgtggaccaactggatgtgacaataaataagcacacgggacccaacccaattacataagtcttttcatgaccagattaagggataagatcagctagctctaatgagcaagttctgcttttgtctttatcattatatttattattattattattttcttaatatatttattatcattattatttttttgtgtagaaattataattattatgatttcaaccaaagattaattatacaagaatgaaagtggagtacttacgtgaatgaatgagtctctactctctagtccaatgagaaaggcccctaaaaggctaaattagggtgggattgagaagcatgtacacagctgttgttgctaggaactacttgggtaaggtaattcgtatctacacgactcaattggactttttggatgctttgtgcggagaaacagcggcctgttgttcagccatttctctggcaattgacttagggttaaagtttattattattgagagtgatttgagactagctatcaatgttctcaa

SEQ ID NO: 123406 - DNA, 1520 bp, Cannabis sativa
ggtgaatcaaaccttaagaggaagagtagcacgagaagaggtgagaaatatcgcgaggcgtacaatatgtcataatcgatcaatgcgaggaggagaggacactcttcgtagaaatgttcaaaaaggcataatgcaatgtatgggtagagcaagatccaacagttgtcacgactcgtgggacctacaagaacacttaaacttgaataaacctgatctttgtcaacgacttggtccaaagcaaagagatttacttcagtttccaatagaggagttggagaataagttcaaaagacatcaagtcagggaacccagaaggcaatcagggtatgattttgttgaagaatttgagtcggaagctttaggatcaaagaggaaagacgattccaaaaggttgtccaaggataagaaatagaagaaacacaacaaacatatacccctttatgctgaatataccgagatgaatgaaactcggaaaaatatttacctcgcacatgtacaggaagtcgtttttagcgagccaaaacctatgagacacgcgagacgtaaaagggacccaacaaaatggtgtgaataccatgaagatattggacatgccaaggaagagtgttgtcagttgaaggatgagatagaaggtcttatagcgcaaggacactttcaacaatacgtaaagggacaggacaatgctcatgatcaccccggtctgcccactaactcaagcgaccagggaccataacctgcctttgtaggaggaatggataccttggttatctcaagagggaattctttgcaagaagacaaggggcagttaatttggtaaagcaattacataaaattattgcgaagtaaataccgactcgctatggttgtcgtatcaagctaccatagggatatggcagttaaagttggtcgtcaacctgaagcagttaaaggcaaacaattaaaaccctggatatggaccctggatattgaaacaattgtggaaatgtgtaagggattgacctggaacatcaaaacccgttctatcaaaatgagatgcttttggaagattgataaaataaacaattgaactggggaaatccttatgagattagtgattgtaaatcgcatcgctgatgtaatattttgaacttcagatgtgaataaaataatcatttctttgaaaaagtaatcgtaaagcttaactcttttaaattacttgaggggcatatatgtatgatcaaccagaatttatctggaaatacataatacaatgccaaccaatcacttcaaaaaattaaaatttttgaaaactttttaaaaggtcctcgaccaaaccttttcgacgaaaaaggggtcgaactgttataactccctgaccaaacctttttgacgaggaggggtcgaatctttataactccttgttcaaacctttctgatgagaaagggatcaaacaactataatttttgatttaaaacctgtttgacgagaaaggaaaatcaaaagttataaatgagacataactcataactcgcgtgtgaag

SEQ ID NO: 123407 - DNA, 713 bp, Cannabis sativa
acaagtaacatagctcaatctgttaatgcagcaatcaaagaaatcagggaattcccagttgaaaaattattagaatgcctccactgtctggtacaaaaattgtattggaacaacaagaatagagcattgggaacattcacaattttggcaaaaaatccttgaagaaatactattgcagcaaagaaaagtgagcctcaagtataaggtatggtggcttgtataataaatttacatccataatctataaattaagaacacatactaactttttttcaagaaatgcatttgattgttgtaagggtgatgtgttttattcaatttagttttgagttgtcaatttagattgtaaagttaatttgctttgttgatttagtttatattgacaattttctttgtccttttttactttttcttgttcaaaggttactcatgtataataaatttatatgcattttcaattaattaagacatactaacttttttgaacaatgcatgttgaaatattaaatctaaagatatacctagtccatgacgtgaacaaattttatatagtagacatggagaaaaaaaccatcacaagtcaacgcttccaatttgatgaaatgtcttgtgcacatgcaatggttctaataacaaagaggcatggttcttgctatgactgttgctcctactactacacaaaataatcctttctgacaacatatgaagaaaca

SEQ ID NO: 123408 - DNA, 1342 bp, Cannabis sativa
taagcctctcgagatgggaaggtcaaattttttgtttatattttaagagaacaagagatctagttattgggagagattcaaacctctcaaaatgtttgtgtcaaaggtaaaggtttagagctgattaggagtggttgttagaagttagaggttaatttgttagttttgttttcagatctctattgttatataattttttgtaatctctaactttgcaatgaatgaaacaaatcactctttcccttttaaagattactctcacatgatgtcagagctctgatcaatctttaatggagattctgatgacagcaaccggtggagcatcaagattgaacaatgctcggccacacaacaatcaacaagttcccctacaaaaatcgtacaccatttttctttcaatcattctttgttgattaagctagatgaacataattttcttccttggaacatcaggtactcgcctcgatcaaagcaatcgacttcaaaagtatcttgatcctactcaagttcttggaaaattattaatagttgcagatgagcatccatcaatgtcaatcctaaatttaaggattaagaacaataagacaatcttcttgtttcctagctcctctcattcatgttttaaaaagactatcaatagaatgattgtctatgacaccaccgctcaaatttagctaaatctcaatgtgcactatgcaatttgaatgcaacaaacatgagtctctacaaaattctactttgaaacactaagatgacaaggtcttttaatgattgtcttctcaagattaaagatctcagtgatcttcttgctactataggtcaccctcaaatgtctcaagattagatagaattcatattcaattgatttccatttgaatatgatgtgtttgatacatcaatcaccaccataaaagatgcctacatagctgctaaaattgaagctatgttcatggctcaatctgttcgaataaagaagaatgccaagaatcttcatatctccaaggctgtagtaaacctctcacaaacaagacctccttgttccaatttatatggtcgattatcttatttggcaccatctgtacctcttggtttcaatcctagctcacgtcgtggtccatcttcaaacaacaatggggtttttactacaatcctatggcgtgtggtggaccctcctatggtcatggttgccctagtagcacagcatctcgaggtggtccccatgattttggaggtggtcgggacaattcctagggacaaaagccataatgctaattatgtcacaagatgggtcatattgtaaagtgataactctatgaaaatagagttatttggctctttttgt

SEQ ID NO: 123409 - DNA, 1072 bp, Cannabis sativa
taatttgttttattttattgctagttatgtgaaaaaaaaaattatttttatcataaatattaaataatttaatattgaaaaataacaaatctaaaataactgatttaatttgtaattttatggattggattggattgaatttgagttattgtgtggattgattggatgaaaaatatgaaatctgtaattagtgcagattggattggatgaacacccctacctattactgggtgacatgtcttctaaagttcataatgagggaatttgacattatgcaatgtatctcgagggttcattggttttgctccaagggacattgcctggagccttttctaaataaaaattttctgtagcgttaataattcattgaggacgtttccaacatcacaaactaacgttctacttccttttatggcccaaactaagaagtaatagtcattaggaattcaaatgtgactcctaatactataaataggtgctttggttcatcttttagacacactacttttttatcttcacacactaagctagaaagacttttgatgtttgtttattcctagaaataactccaaaaatccctaactgtttggtagtagggggaaataagtgttaagatttataaaacacttaagaaatacatacaatcccagatctaatcgtatttctaaaagttgtttaatatagaaaatcctaaattatatttctatagatcttttactaaataaaataagaatatatgaataagagatgagtggaagtactaatctcaagcaatcgatggatatatcatagaaggttatgatcttccaagaatacgctatttctttaaagtatttcctttgatagtgaatgagaaaatacaagaagcctagtgtttcttggggaccactaactatttatagacttgttatagaatcaattttgggtatttatagtttgaccgctcaacaaattgtagattaatttatctatctacaaattattttcatgacaatttgatatcgatttgataaccataacgtaattggtcacttaattttgtatcacactttataatagcatatacattata

SEQ ID NO: 123410 - DNA, 836 bp, Cannabis sativa
acacaagtgattctgcacattttttggacatatattcgccatcgttgggtgttaaatatgatcaaaatctctgctaaaggaataatagaatatacacttttagagcccaaggacaaatctatcacaacatcacagatttgcttccttcttatggtcatccttttaatctccaattacatttctatgacacaaaaaatgagttagagaatcgactatttgattcacaatacagaatgctcccaacaatcacaagtcaactcatcaatattctttgcatcaatccgtactctattttctttcgctcacttggtaatatgccagatttggaaagacaaataatacatgttaggaacgacgctgacctagatcaacgtgtattcaatgccctgcctcacaagtagcggcaatatgggttgaaaatgaagacgaaaatcaaaatagaagacgtgatatctttgtatacaaccattccggtagacaatttaaagttcaatattactatggctgttaagactcactgcaatatccattgttatttccgtacggtgataatggttggcataaagggattgaaaggattagagaaaaccaatcaagatccgtcaaacaaactcaaacaacaaactctcaacattcattaactggagaagaattactagcagcaaaagaagaaggtaatcaatccttgaatatgtataaaaatatatataaaaatataggtataaatcactctttgttcacatctaacaatattatactttcttccattcaaactgatgcagtatcaatccaagaaacaaaagtttcgtgctgtgaatattattgcttcaagttcc

SEQ ID NO: 123411 - DNA, 1191 bp, Cannabis sativa
aataaaaccaacattgtaagtaaaaaagttgatataggcgtgtaggagtattttggtaataaattgtgcaaaagtgatttttcatgtaaaaatttcttataaataagacttgtagggtacaatttttggtacttttgaactacgcaattaaaagagaaactcagagagagatggagattgcaacatcgattgttctacattatagttcattttcttctccttaaactcttactatttattataattgaaattttaatatttagttctgattagcttcttataagttaagggttaattcaaaacccgagacatgaatttttaattttattgataaatgataatttctagtttccaatatatcaaattgtatctattcttctatatttaatgccatgattgatgtcttaatcttgtttagatgaccactaaattagattttactttaatctattgtcatcttaagattactattcacctaatagtctaggattctaagtgtttgtgataaattacaatttctaatttttttaaagataattttaactgtgataaaaaatagaacctaggttaaatgaataatatacttcattaatttatttcctaaattaatcaagctccattgaacttaaacatatatctaagttaaataaattacatccttcgtggatatactgcttaggtaaaagagttaattattgagcgctttgcattgaataaatgcaatatggagattgagataattgacaacttcagcgttatctgcaggattaacagtttgattggaattctaaaataacattcattattaggagttaaagatgattgtcgagggtggaaaataacctctaactatttcttgaatatcgtagtatctcattctatttgtttttttttatatatatatttcatttaatcttcataattaaaacctccctttttaattcttgttactgattcttgaataataaattgataatagtcctcgtgggatcgacctatatttaccgttatactgaagttattggtaatataaaaataaaaattagtaatttgttgtagcttccaacatgtatcaagagacgtaaaatacgttatgcacaactgacaaggatggaggcaaagctagacgataggctaccaatttgactttctcaagaatcttaaaaggtcctgtaaatctagggcataact

SEQ ID NO: 123412 - DNA, 712 bp, Cannabis sativa
  modified_base (584)..(605): a, c, t, g, unknown or other
  modified_base (650)..(654): a, c, t, g, unknown or other
tgctgccacatcatggtgctaaaatgggataacatttgcccccaagtctgctcgggactttcgaagtcgcgcgtagacttcacttagtataaatttgtgtcagaacgggtggcacgtgttcaatgttcctattggtgatccaatgtgattctgaccaaaggtctcttcaatatttgactcataaatgctgattaattcgtacctcgaaataccccaatgatcgcatgcttagacagttggtcttctttagatacttgattaattgatttctcaacgtttacttttggggggaaattgaagcatttaaatttcaaaataatgataacccttcactaacttgcttataaatagggcaaaaagtcctaataaaccatttttaacattttcttatttagtgatttcagagaaaaaacacattttcctctcaaatccttcggagaatttccaaaaagtgtcgatcaacgtcatccgaacaaccttaaagattcgaacagtgactaagtgcttcatcttttctctctttaatatttgaatctctaattatttgggtttccattgtagaaaaatctgttggaaattatttnnnnnnnnnnnnnnnnnnnnnnacaagtatgttgtttaacaccctatatgaactttctaaaacgatnnnnnaaacacatataaagttgagaaaaccttacattgattcagcggaattaatgtctccttc

SEQ ID NO: 123413 - DNA, 1007 bp, Cannabis sativa
  modified_base (37)..(40): a, c, t, g, unknown or other
cgctcttccgatctacatacttgttagtaaatctagnnnntggtaaaataatttccaataataaattggtttctgttgaagctaatgacccgattagaattatgaagaaggctgattctaaggaagagataatttgtgcagattctagaattactactccagatcgagaatgtattgaagggtggaagaccccaaaaaagtaagcaattcaaaggtgaaaagatctcttggagtgattgagcatgcttcggttcaaaacactttcaagattttgcaggaacaaggaaaggatgttgaaaagtgtaacttatctttcgagggtggagatgaattgcaccaacatacttagttggaatgttcagggtattaataaaagggataaacaaggtgatatcattagtcttatgtagcttaataaagtagggctaggtgctcttgttgagaataaattgaagaacaataaagtggataagatgatggtaaagatgcttcatgggtgggattatcatcggggtgatcaatgtgaaagaagaattttagttgtttggctcaagtcgtttgttcaggtaaaagtgatgaaggatcataagtaactagttcactgtctagttgttggttctcaacttgaaatgtttattacttttgtgtatggtctcaacaccatagatgagagagtagatttgtggaaggagctctctacaattaactgtcaggggattccttggctgataattagagatttcaatgtagttttttgttatgatgatcgactggctgtagagtagttactcctagtgagttagtggatgctacggcttggattgctcagtcaaaattagaagctcttaaaatctctggttcgaagttcacttgctcaaataagcaagatgggaagtaggggtgtgcagaaagtcatccaatccaattccaaccgaccgatccaatctcaaccgatccaatagaatcggatatccaatcataattggatcggatcggatgcaaatttt

SEQ ID NO: 123414 - DNA, 979 bp, Cannabis sativa
  modified_base (34)..(35): a, c, t, g, unknown or other
  modified_base (668)..(683): a, c, t, g, unknown or other
  modified_base (935)..(945): a, c, t, g, unknown or other
ataattaatcataaacaactgctaatttccaaannaactaagcgggctttacataggaggtattatccaaacagagtctgtaggcgactgttcgagtaggttcccaccatccaatgaagccaaatcctccaaacaggataacacggtttgaaaaaatcttcaaagatatttttcgtaaatatattcgtatttacggctcaattagatccctatttttatgggattgacacacgttaatagaaagattataggaaactaggttagtttccatttttattcataattaatctgagaaatttaattcatgttttttccctataaatagtgtaatcatttcattattttggcatctaaaaatcatatgctcttgaaagttattatgctataaacataattgtaaacttttcttaaggattattgagaaactcacttggtcgacttcttgtgatcttgataattttttgaagtaatacaaataaaagggtagtaggctattaccataatctcataaggtcgaaactctataaattttatgtttttatcacttaatttcatttaataattattcataatctcatcgctttaaagacttagcatcattggcgaaaagcaaggtcagtaatttggaaaaagaaagataggaaagaatctatatatatatatatatnnnnnnnnnnnnnnnntgaggcggtgacgtggcggtctaaatctcttcaaagctatttttttctccttaattctctcattttttttaatattttattaaagcataactgtataaattaatattttactattataattaaatttctgctctatatattttcttaatttttaattattctaattaaaaaaaatatcgtatagactcaattttttttttttaaaatgtcgcatacactcaatttaaacatatatatatatatgggtgcacnnnnnnnnnnnattacccatgaatgggtaaaattagaaaattttg

SEQ ID NO: 123415 - DNA, 4788 bp, Cannabis sativa
actccattctcgctagcatttggctcggaggcaatgttacctgtagaagtaaatatctcgactcatagacgagagttttataatcaagtagataaccaagaactcttaaaattgtccttggatttacttgatgaaaaacgtactgagtcgttgattactaatgcagcgtaccaacatcgagtaacaagatacttcaacaaaagggtcaaaaagaggctattcaatgttggagacttggtactaaggtgagtattcgcaaatatgagagacgcatttgtaggagtattcaacccaaactgggagggtccttatgtgattgaagtaatagtaggaaccggggtttacaaattagctcgactgaatggctcgctaataaagaactactcgaacgtaggacatttgcgaccctactaccagaaaactgatgttgtaactcacatttctgatgtattattttgtacttcagttatgaataaagttaatcattgtttccaagtaatgacaaagtattactctttaaaattacttgaggggtatatgtgtatgattaaccagtatttatctggatatacatgatatagtgcaaacccaccactttaaaattttttaaagttcttgttgatcaaacctttttgacgagaaaggaagatcaaactattatgaataaattttgattaaaatgtctgaagagaaaggaaaatcaaaagttaccaatgagatataaatcataactcacatgtgaagctgaatactaatgactcgcattgtataggaaagtataaaatgaaacatcaaggtgccttgaaaaaagtacttaaacctagtgtatgaatagattatcaaactattcatataagcaatcaaaaatatacaaagtgataaatcattaacattatattcaagtttgcttaaaacagattataactatttgtgcgaatcaggatcaatatctgctcgcaaaccaaaatcatggcagataataaactggtcgcacacatagtagattactaactacttaaatattatcaaaggaaaatatgagcagtggaaagacctaaagtattttacatttgatcaaaatatgattgtttaaattgtgaatgaaaacgcaagcaaacatacatatattaagttcaaatataaaagtacgaagcattcaataaagataaaaaaaaaaagaaagcaaagttggccgtccaaccttgcaaatatgtctttacaaaaaatgccacaaggggcaaatcactgtctcggccttatgcccatcaaccttgataaaataaaaataaaaaccaagcctacatggtaggagacttggccaattcttcttctgctgccttcttagcttcttcctcctctttcttggtcttcttgtagtaagcaagaatttcctcttcagactcttccaagaaacatgtatccatattcagattttccatccaagcttgataaatggtacggaggccaacgacgttacatcgctcttgtgtttcaacctctttcccttcaagtgtcaccttggcagcttcaagttcctcttttagtttctcccattcatcggttttgtcctttgtctccttcccggtagcttcaagattcttcttcatcttcttggcttctttggtaagacgagtaatctccaattgggaatcattccatttcttggccacaacctcgcgttggcctattaagttctggacctcgctctccaagtattttacattttccaagcctcaccgttgggcggcaaaagagaagaaagaagccttgaaacccacaaataaagatgtatgagtaaaaagaaaaagaaggagaagaggaataaaagaagtgaacaaataaggataaagaaacttaccaagaggctgtgagacaaactccttgtaagcactccctccaaatccccatggttgattaaatcccaatcatggggaaggagagccttgaactgacgccaacacgcagctccaaactctgtggtaaactctgagccagtttccagccttgacaggcagtgttttaatggcctggcttgaggaggcagaggcttgagtcgctttagggagaggctcgtcagtacttgcggagaccggaggaggaatttgatcctgggttttagccttaggaacctcgagattagcgatctacgaggcttatttcttgttagttgtggtcttcttctgccttttgaggggctccagcttgacctcagaaggagcctctgaggaggtcactctcttcttccctttcctgtggacgagaccctcgaaatgcatttatgcgagacaagataaagtattagcattaattgaagacaagtaaaaggagagattggggcatgattttttgcctaaagaacttatcataatcactagaagacgaggtatcactagaagatggggtagaaggaccataatatccactaacatccctacaaactgtgatcctgaatatatcacaaggattaattggttctaaattccagctcgcgtctaaatgacttgccctatccatcatagtcctgtactactcggctactccgtagtacgactcagtatagctaatttggacatagaatttgcgatacaactatcaaacctatgtgtaatacggtctacgaggaggggatgccaaatataaaaattaaagcggctatctccaaaggtaactagggtgttaagctcaaccctaagcagtgtgggtgaccaaccacattgattacctcgggatgctccttcttcggcttccctaggagcagtattctggagatattgtgcccgagccacacaatcataagccttctcctcatctgggatgggaaccttctgccaagaagaatacttgggatattgataatcacaagcaaactccttgttagttaggagatccacaaaccttagggtgacctcgctcagaagtaagtcgcatgacctaaggccatacgggagattcagcaagagcctgcttcgctcggccatctcaggagaaggaacaggtctttttgaaacagctgtcaaaaagaaaacaaaattaaattcagaaaaactagaataaaaggcatggattaatttgaccaagtctaatgcaaataattacttacaaattatacggaaggtggttgtgccaatgggagaaaggccggtcgtccagaagaattcgtccttgaaataagttttgttggaaaatccacgatgatcatgcaatcacctgtgtgagtcccaagatggtagaatccccctgtcgcattcttcctcgctggaacagccttaacagagtagagatactctatttccaggggatggggcactcctaattcaggattttgtacagaaccctcaaacttgcaaggattctgtaggagatgggatttagttgaaacggggcaagcccgaggtggtttatgaagtccttaaagtagtctcgtagggggattatagctccagccctaatgtgctcaaggctccaagcccctataccagtcgagccacttgtactgatcttgctactggttcccttagaggtttcatgagtaagtcgcactagtgggtaacaactgaactcgccagctcgcacaaacctaacccgacagtcttgcttgtattcaataccacaagtccgcaatgagtcacctacataacctctgatggcttgcacctttgactctattaactctgactcaaaagtgacgttggggtcctgatgaatctttgatttacgtggtttaggagacattatttcaaaatccaagtcacctagttcaaaagcaattgtgaccttgggtaaaaatagaggctcaactaaaggaatagaagacacactgggaggttcgagccaagcagcttctcgcaagaaatggcatttgcctttaataatctcttgcaagaagcgtctgtggcaactagcaatatcttcttggtgaattttcactaggtgatctctaattctggcatcatttacctctaatttggtttggggttttgaaatcttgggtttgtaggggatggcaaattcagtgggatgctcaatttctaaatttcctggatgataaacttctgaactagattgagacattggttcaaggagaaagcaatcccaattactggaagaaatttatcaaaccaaaagttggtaaattggagaatttagaaaacctacgtactgtctaaaccctaacatttacccaaatacagttcagccctaaaaatttctaaaaccaaatgagacaacaatgatgctaaccaagaagatggtaaataaacccagaaatacaacgtaacaaacatgtaagaaaataatgagaaaagtcacttactgtttgaaggggttttgggacgatgaacgactctgcaatctgcgaatcaacgaacggcgtgaagattcttctgaatgcttgaagtcaaatattaaatcaaatgaaactcgtagaaaaaatgttaaagacagagatgacatgcaaatttttgagcaaatctggtaatggtttttcgacgaaaaagcttagaaaattctcacggtttctaaaatggccaaggtaatacaaagatggttcttttttccattttatactcttcggttaatcaccgttagatcagggagataattgatcctacgggtaggatttgaaaaagaagtgaaaaagatggttattaaatgttgatgtacctcaaaaactgccaaattagaggtcatgcgttttttcaaaagggattatgacaaatataccctctgtaatcatttaaaaagcactttttattaaaaagaactggggcaatttttatacccaaaatt

SEQ ID NO: 123416 - DNA, 1127 bp, Cannabis sativa
cgcgctattttaaataagggtccaaacaaatttttttcttaaaatcccactaaaattcagagtgggctctatcattagtctatactcttatgaagtactcaaacctcagaggaggaggaggacaataatgagttgcaaaaacttaccacccaatcagtgagagcttttcggtcaattcgaccattctctgtcccaatcagaggaagaacaagattcacttcttccctaatcatgaatctcatgagatcatcctcatcaatgtacctatatgccattttcaaaaaccaagttaaacacaaaacacaaagcaaataggttaatagtaaaagactagattattatgtcctcctcacatggagccaggtttagcaacatttctgaaaatgtgataagcagcagcagtagcctccatctcacttgtaatctcaaaattgtgttgttctgcacccatattttccatctcatcaaacggattagagatcatcaaaatccccaaactcgaaacagcatcaatcaaaaccttcatagtccaagctgaaaccttctcttgtttcatcctatgaagcttagctatatcaataacttgagtcttctctttcttctttccctttttagtacttgtaaaactcaattgccccatgcttggaggccctaaaagggtttgtaacacataatgatgaaaaattgattcttgaatcctatcaaagaatgtgttgacatgaaaacttgaagaagagatttttaaaaataaagtctttaacaaccataaaaatgccccaatgactaaagttgcaagagtcaaagttatgtactctagaattttggtaactgttttagaccttggaacaccatggttaaagacaagtacccaagttagaagaataaaatccaaccaaattaagacttgaacactcttctttaactcatcaacaaagaaaagaactttctttcttcttgaaaagattctctctatgatgaaaactattggatgcataaaccaattagtgattgaaaaaccacaaaagatcaccataattagaacaaaccatctccataactccaaaccccaaatgattgttttctctaatttcttgacaatcaagctacaaaccaaacaactaactaag

SEQ ID NO: 123417 - DNA, 2123 bp, Cannabis sativa
attttttgtcatccaagtttgaggcccaatcagcatttggatatgcttctaaattgagcaatgtagaaggcctaaaatgtaatcaagatgaggtgtgtggctttgacgtatctgagaattccttaacaagcattctagtgattaattattggtgcctttaaaaactgacttagcttgttgacacaataagcaaggtctggtttggttaatgtgaggtatgggagggctccaatggtgcttctatacagagcaggtttgtcaaaagagctgttgtcattaagagacagtttgttggccaggatcattgagtagagcatgtgctttggcatcttcaaattgatttttatcaagtagatcaactacatacaattgaccaagtgagacacaaccctgatgaatttctatatacttcaaagccaagaaaatagtttacaaaaccaaaagatttgactgcaaactgggtgtggagatctgaaataagcttggaaacaatagtagaatccccttcagttattaaaacattatccacatatactaagactagatgaagaataccttttatgttcatatagaacaaaaaagtgtctgatacagattctgtaaatccctaatgaacaaatgctgtgttgagcttgtcaaaactaggctcttggaccttgtcttaaaacatagagagacttttgaagtaaacaaacatgatctgactttgttggatcttcaaaacctgttggttgcttcatataaacttttccttgaagatctccatttaagaaggtgttattaacatcaatatgctaagtgacaacaagatagaaaacaattcttattatagatacttttataactggactgaaagtgtctttataaatctagttcagaagtttattaaaaagcccttgcaactaacttggccttgaatttatctaggcttccatttttgtgatacttagttctgaaaatccatttattggttaagaaattcatgtcagaggaataaggtgccaatatccatgtctttttcttttttaaagtcgtgttctcatgatccataacatttctccattgaggcaaactcagtgcctgtttaacagctctaggagtctcataaatctattattgagaggttgttaccacataaactttgggtatggatactagattagatctggtttgcatatgacatctttgaggtaactggggtggagagggaggaatgttgatagcaggtatagaggtgtcatcagagatctcattagaattagaattaacaggttgaatgttatttgagggagcagaattatcatgattaggaaatggtggagtaggactgtgagaagtatgttgctaaaattctatttcatctaattgagtaggtagataaccaaactgaataggtggatttggttgagagtcactaggaagaattggtataacaaatgttggggctagaacatttttatgaatataaacttaagagtcttgtggtttggtagaaaacatggaggaatatggaaattcaaactcattgaagttgacacttcttgtaataaagattcaaccagttgagtgtacacatctataacccttatgaaaaggactatatccaagaaaaacacacttggaagttttgaacccaaatttttgtgttatagggtctaagaaaaggaaaacatgcacatccaaaagctttaagaaattgataatctgggatatatttgtatagactttcatatggtgatttgtattgattgattatttttcaatttgcctttgaccatcaaatgaaatgtgaataatccatcctactctctttaaaataaggggtgcttctggttgggtcagttagtgcttgaaaaaattttgtcttccctatattactatatctctagagtcaataatattatatgaggaattactgaacttaatcacttgctaccattactattcaattttctattgatgtctatcttgtagaggtactcaaattgggtcggtgatcaatttctaaattttttcgtaaacctaattggttacttctaattatgcaaattaatagttcaaaccacactcaaaggtagggtattttccatttttataggaacttcttgttgggttttatgccc

SEQ ID NO: 123418 - DNA, 1553 bp, Cannabis sativa
  modified_base (1080)..(1088): a, c, t, g, unknown or other
ataataataataataaatatctttaagcaaaataatatcccaaacaatatctatggtaatttttaaataaagattcgataatctaactaaagtattaaagaaaaaaaaaacaacttgccttttatatatcaacttgcattagatttaattatcaaaaaaaaacttgcattagattttttgtaaaagaaaaacaaatgacactagtacaaacaaacccaacagatcattacaaccgttcgatcaaattcattgcattaaatatattataatctataagtaataatatttgcactaaaattaagtcttgatataatatagtttatttcgactaatcatatttattttttagttgataccatattatattatttgttttataaaagttaacgagtataaatcatatattttgttaaatgataaatttaacctctatattttgaaatagtactagatattattttgattttttgttaaaataaaatttaataatgatctgattatttttttttggttattttttattgttttatagttgttgtgaggttgatttctcattattttttagttatttatttgttgttttatagtttatttatagttgttgtgaggttgatttattattattttcagttattttttttacttttgttgagaaaagtatatttttataattttacaattttataagtgtgattttgcaattaaaaattttaagttgtataattataaataaaatataaaagaaatccactttggaaaattctcctttatgagcgagtgaaataaattgtttgaaaccttatttttgacatgttaaattttttcaagtttctcaaaattttacaagatatattaaacaactacaacatagatgatatgaaaaaataactaaaaaattctcctaaatatcaaaataagaaatgtagaattttctaatgttattttattttctttgaatataataaaggaaaattctacaatggaaatgcactgatgcactcttatgtgttttggtatccaaaatagttttttagtcaattttttttttctaatggacatgtacgttatagttatttaagnnnnnnnnnaaaattttaagaaattcagaaaattttaatacgctgaaaacaacgttcaaacagtgtgttgtacgattgatttatttattttatacacgtgtgaaatatattgtttgaacattgatttttatattataaattattctgaatttttaaaattttttagaaaatatcttaaataactataagctacatgaatataaaaaaaaaataaactacatgttttttctaaaagatatatgagtgcatcttttttgagtgagtttttataagtcattattagtgtctaatagtctactcggtatcatacactatcagtgtaattaagtatcaaatctctaactaattgtaaaactccaccaccacctataattaggggtgttcacaaagtatccgatcaaatccaatccgcacgatctaatccaatcaaatccgcaaaatgcgaatatccgcaattgtgcggattggattgga

SEQ ID NO: 123419 - DNA, 1027 bp, Cannabis sativa
ggatgagcaattctacttttacaaccctcctaaacactcacaagattgatacagaaaattagagagaaagagagagaattctaggtgagaggctcggattgaactgactgttaactgcagccttggtgcctttctttttataggcattggtcttgaattaattacttaggtattcttaggtgtcaagtttatataactaacttaactaaccaatgtcaaagataaaataatatggtgatgtggcaatagcttagttgagacaaatcatacaacatcattcttgtgaaacatattcgaatttgaggagattttaacaagtactgtaccaccaaaaattggttgaaaattacatatatgattatagaaaataaaaaagagtagtagtgtaacaacacacaatctttattcattattatatcatgttatgatttcataattaaaaagcacacacataaacgcaaaagaagaaaaagtaaaaactattacagtaagataaaattatattattagaagaaacgatctcccaaagtcttgttcatccatttagaagttgcccttaagcgtcttaatgttgtggatgacttatgagacaagattgacgggagttcttctctcatcttctcacattttttcaattcggcaatctttgcatctaacttttcaatgacttctttttcccatctaatgactttgtaacccaaatgggcgtccaagaactcgtcatacaaaacttcttggattggatatagattgaggcctgagatattttcaatgccatctagatagaaatgccattgtttaagatgatccattgtgatgtcttcaagcttagttctacacattttgtcaatgacagtacatagtaaggttgagatgacactcctcattccaattgtcaaacgagattgtctatcaagatctccgtacttgtggatgaatgttgtgagaataggggccaatgtgttggggaccatgtatttaccctccactacttccacaacctcttgccttaaatacttctcatctt

SEQ ID NO: 123420 - DNA, 1591 bp, Cannabis sativa
  modified_base (314)..(316): a, c, t, g, unknown or other
tttaaaatgatctcgtgaagtccaagcacgaagacaattcctacaatcatgggattgagtcagaggaatatggcaacctgttccaatttcttattttgtgtattagaattatgtaattagtattctttcctattttatacattgtaagcaaaagggaaatattccctcatgcattaaggccctacaaaaagtgacttagcctcactgtaaaagggatcgaaattgaattgcttcaaagaaagatctaagagaattacttagagatttcactgtaagagctttgagagagaaaaacactttgttctttgtctcannntaatacaatctaaggggagtaggccattaccacacttatgcagccgaacctcttcaaaatctggtgttctttattacttattcgtttttgctctattttaattatattcttaatcgcttaataattgactcactgtcgttgcactaaaagcgaggtcaacaattatatttaaaaaaaaaaagaattaattgtggtaaaaatacaaaatatgaaaagaatataacaattaaatacccaatttttaaactgtgccttatagtatatgtgacgtttttaaactgtgccctatattgcacactacacgccatggtcgaataggcgacggttataaaaactgacagaaatactttatccgactatttaaaagtatcgagaaaacctagtattttagttgtgacatcatttgggaatatgtggcaagaggagacgtgctggtggggaagattgacattgaagacaaacccgctaatcaattcaccaagatgttgacagagactgcattcgagaagcacatcataaatttaggataagtttaaatgtattgatagttttacattagtacaagtgggagtttgttgggattttatgccctaaacaaaatccaaatattaatgaaatcttaattttatcatcaataaaagaacaaaagttatttcattacttattttgtatatttcttggttatgtcatgatcatatgtttaatatataaattttttaaatgtttattatattgttgttcataactatattattgtctacatagtgaaaagtaattatgactatatgatataaactattttagtcccgtaatttattagtgcattagattttacactaacgtgataattagttatgtggttacttacacatgtataagtagaatatcttttttagggcattagtaaagtaatcttgtatcgactgtatttgttatacatcagactgtaccgatattaatagtggaaacgatatcataatcttaccgtaatatatattttttaagtcaatgtcacttagttgatcttagatcaatgatctcaatcttgagatggttaggttctagcctaattgtactattcagcttctttgacttgtttgttatccgcttacccataggaataccccatacttatatcttgggaatacaatagtacaattgagtagggacactaatcatagatatggaatctatagcttctataaaatcttaaaagtgaaacaaggatttcctcagagcttggctaaacgagtttaaatggtggagtactcattt

SEQ ID NO: 123421 - DNA, 2118 bp, Cannabis sativa
  modified_base (58)..(58): a, c, t, g, unknown or other
acccctaaaataaacttttcactcactctctctgactttccctctctctctctctctntctctctctctctctctctgtctccctctctctcgtctctctttgcatctctctccctctcgttgcatctctctcttggttcacaggtggttcgaccgtaggtgattcgagggtgggtgggtcgcagtggaggcttttcaggggcgatttttttggtggttggtgattacatttggacgttcgggctctctctctctctctctctttggttttttttgcaggcgatggtggtggttcgatgggatggtgatgttttttattattattgttgttattgttgttgggatgtagtgtgatggtggcagtagtggtgcgatattagtttagatttttctttaatattttttacaattcttttgcttcggttcataactgaagtaaaaaaccaattagtgttgatgcgctactatttgcttcatttcataatcgaagcaaaaaatattttgcgtcgattctaaatgaataaaaaaaatatgactatttgcgtctacgattattgcgtcagttactccaaccgacaaaaattgtttatgtgtcactttaaaattgaagcaaaaacttactttcgtagtagtgatatattaattaaggtgtactgtagtaaactgcatcgttttgtaccgcacgtaggtgcggtgtaagttgcagttaatgtaaaaaaaaattaaccatgttgttaagattttcacttgaccacatttcgtgagttggttaaattttatatatattctccgcccacctgcaccacgctcacttgtaaattggatgcaatgacaaagtaatattaaaaatatttagctagcaatcatattgaagtgtgtttggtagtttttttttattattttatttttattataggattaagatcaataagttgttataaattaaatctaaaatatatatagatcttaaactcatgccagattattaagattactctatgaattaataagatggaagacatacctgattccatgatattggatacgagatgagattgtgggtatatggtcttctacagactaatcttctctcaatgggttcacactcaattaatgggaaatggaggagaagagtggttgagattagccttggggaccaaacccttatgttctttatatagcaaattaagtggagccctataaaccctaattaggtttattactattgggtattacacattacaaagcctttaccaaataagatgtttattgggctcatttaattagactacttatttagcccagtttagaatattagctcaaataaattgtcttaatttataagcctaaattattggattattaaaaatagggataattacataagacaccatttttattaaaaaaaattacattttattaaaaaaaattacatttttacgtttaaagatttttttttacatttttatggttttctatagaaataacacgaaaacaacaagaaaaatatatgtaaaaaaatcattccgtctcccttttctcattatcaaatggagctatatatacaatatacaagagtaattgtatgctataaattagctaactaattgctaaaaatatgtaacaaatattgaccaaatcaattaaagatatatacagcaataatagaatatatacgaaatatattctaacacaccccctcagtcgaagcgggaggttctcgtatgcttagacagtccctgaaatcattaaatagaacgcgcagaagaccttttgtaaaaatatcagcaatttggtaacgggacgacacatgaagcacatggacttcgccacgagccactttctcacgaaggaagtgaatatctatctcaatgtgtttagtgtgttgatgttgaacaagattgccacatatgtacattgcacttacattgtcacagtaaacgagggtagccttttcaattggacaatacaactcgagaagtaggtttctgatccagcaggaatcagaaacaacattagccacaactgtgtattccgccttggatcattggatttgtcaacaagttaaccatgactatttgcaatcaagcaataataggttttaaaaaacttacaaac

SEQ ID NO: 123422 - DNA, 974 bp, Cannabis sativa
acttaatatttattaagatatatatatataccttaataccagatgaggtggttaatagaaattgtggtatagttcttccatatgtaaggttttcaaaagttgttcttgttatggaaagtcatctggaagggcattcgtgaaagtctaacttgtccatttataataagtgatctcttggaatgatagatatcgttcggaagggagtttccgaaagtttattttgtccacaccggaaggagtcttcaggaaagctagtcttccttcggaaaggagttccaaatggttagctgttctctcttggaagagagtcacgaatagtcgactccagctgtcactattcctatacgggaagtcccttcaatgttcactttggttcatagtcctggaagcgtatcttttatctggaagtacttttgcttgtgccaacgtgaagatctttacgaagagtttgttaagtcgtaactaacttaacaacttagcatttgcagacaccgattttgaaatccatatctcttatctataaatactaccaacacttctttaaaaaaaaattatatgtaacatatgtgtaaaacttatatgatattttgtattttgctgcacattaccaattttccattaaaaaaaaattaggaggatgtttggtaacaattttgttttttaattttaaaaacagaaaacaaaagtaaaatttgtgtttttaaaaaataaaaatgtgttctataaccacttttgtttttcaattttaaaaacagaaaataaaagtgtgctctataactttcaatttcatttttattttttaattttatttaagtcaggtcaaggtgtgagtctggggccggggccgtggtccgagttcgtgactggggccgaggccagagtccaggtctcaaggtccaagttaaggtcgaaatcttaaatattgattaagaaaaaaactgcttaaaaaaattttgaaagtgattttttttgtt

SEQ ID NO: 123423 - DNA, 737 bp, Cannabis sativa
aaacttaaaataatttatgacttaattaaattttgacttccaacttttatggtcaataaaaaataatatttaaagcgcaatgaaatataaaattaaagaacaaaataatatgatagattctttcgaacaaaaaggatttatagaaatttataaactacaagttgaatcaaagtcgtgttctttgtaagtaaaatgtagttataacttacaatatacacggttaccagtatatagaaaagacaaaccaatgggtcgcaggattctactcggtttgaccacaatgaagtccaatggcattttcgtaatttcaccacttaacaatgcctattttattaaatgccgcgttcgctaagtgaggttgttatttgttgaagcatacatcacattcatcgaagctgcttaatatcgtctttttttttttatttaaaaaaaagttcttacaaacgtttttatatttttgtttttcttaattaaaaaacgatatgatgacgtggcatatggcgtagccaacaatacttgaaggaataaggatcttctggtacaccgaccaccgaaaattaacgtgaagcgtcaatcatagcatctcgaaatctcgttaacgtttaagatagaattagaataaaatcataaataggaactttcgtacataagagcatctccaaagagacaccaaatttggtgttacactatcaccaaatttggtgtcaaaaattatttctactccaaccacaacacca

SEQ ID NO: 123424 - DNA, 897 bp, Cannabis sativa
  modified_base (841)..(842): a, c, t, g, unknown or other
gaaaagagcaactaaaaatcgaaaacacaaggtaagaaatcgggtatgtatgcaaaacaatcttaccataaatgaaaaaatattttgtcaactaacttgaccaaaaaaatactttacaggaaccacaaaaattctctaatgttttaggaaagatgtgcttttcattattttgagatcaatgataagaggaccatgatggaatttgttaaagagtttaattccatcgattaagtttggaacttcttgacttcattgtgttatcttttcatgaacttttgatacattgcgtagcgtggatctactgggaaagttgggaaatttaaggactcggctagtcttattcttttttatgtgcttgcaagtctctctggtcattaggtagccatgaaaagataacaagtttggctcaaacttaaggacatgtaaggcattgttttatattaggtaaagtgagaattattaagagaaaaattcttcagaaaatatttaaattaatgaaaaaagcttttgttgttcttagaattttctatttttgattagagaatgaggataagaaaatcatttccaaacaaacggtcttctttatatagatacaatataggagtacaacacatttagcacaattgaaactttcaggaccatgctattgcctatgctgagttaaaggttgcctatattgttgcccacaaaagaagcacaagacaataaatgcaaattttttcaaaatatgattaaatgtgtaattaatacattggaaaatttatcacatatattagatccatggatattaagggaattttacaaaaatactgcttttggaccaaaactttacaattatacnnggacacggcaaaaacaacatttttactgccccagcccaatttcattacttttgta

SEQ ID NO: 123425 - DNA, 2033 bp, Cannabis sativa
  modified_base (41)..(53): a, c, t, g, unknown or other
  modified_base (246)..(255): a, c, t, g, unknown or other
  modified_base (741)..(741): a, c, t, g, unknown or other
cgatactagcatactttgtcaataccctggaaaggacatannnnnnnnnnnnngtgtaagtaaactttatcattaattatcatgtcagtgtaaatcagtgtactgacaaattatgaaacttaaactttaaaacatataatcatgattatattctactgtgtagacaacactataatcatgaataacttttttttgttttggatttaatagaatttatacattaaacatataatcataaaataaatnnnnnnnnnnatgcaacataaaataatttctaatattttattaattaataaatcttattatattaaaatagattattttaaggcataaaatcctaacattatagtgtaagggtgctctcatgtaccaataccacaattagtagctattaaccatctaattatgattattgacattattgggcactcttagattaatgattgtgattatggtattatacttatgattatattagttcatataatatttgaagagtgttatcgtcaacctcctgttacaacctcttagtcaatctccatgcccgaaaacacatgtcgggatattttttttcaaattttttacgggggtgttcgttatgcttataacatcatccctgtaaatttttgaaaaatttcaaatagtttacagtgccaaaaaatacgtttcaagttttttgaacgcgcgtgctaaactagaatatcagctctgttttcggtactgtaaactattcgaaatttntcaaaaatttacagggatgatactgtaactataacgaataccgctatgaaaaataatatttcggcatgtgatttcggatgtggaggttgactaagaggttgtaataggaggttgtaattaacatttctcataatatttttacattctcccacttgaacaatataatttgccaccataataatttccaaccaataaagtaatcaactaaatcatacacaatatttttaattgtataattataatcttctttttatatttttaataaacaacatcattttttattaaaaaaatatttaaattaaatgatatttatatacataaaatataataatataatagtatctaaaatttgttgttaattataattttattttatccgtaatatttttaattttataatacatttcttttcgtttttttgttttttgaaattatcatacactttttctattttatattgtttaaaaaccataatagaatgatatatatttttttgtaaatgcaaaaagtaacgacattataagaataataaatattttttctattttagtgtttaaaaaataataattaatagaaagatatttttaagatatgtagattaggtaaaaaaaaaattaaatagaaagttatttttcagatatgtgcaataagtttaaatttgaaatgcaatgttaaaaaaaatattttatgttatataacatttaatataagataaaagataagagagatatgtgtagtgagtttaattaatttaggaggcatttaataatacttttattttttattttttatttttttaatcataaaaataaaagtaaaattaaataaaattttgtttttaaaaagaaaaaatgtgttctataacaaattttattttttaattttaaaacagaaattaaaattgtgttcataactttcatttttattttattttttgattttaagttaggtttaggttcgagtctgggaccggagtcccagttcgtgtccaagactagggttgagggcggaggctgggtcttaagatttaacttggggttagaatccaaaatatttattaaaaaaaaaattgtttataaaaattgaaaataataattttttttttatttttaaaattttggttctcaatcaaaaaattaaaaattaaaaacaattttatataatatatatatttatatatatatatatatatttatagataataagagtttccttaagaaaaaagagaaggagaagaagaagactgaacttataaatgcatatctgttataaatattaataattatgtggat

SEQ ID NO: 123426 - DNA, 981 bp, Cannabis sativa
gttcgacctcacttgcgtgagctactacttgactgcgtatacttgcgtagtgatcataattttcataacacacttttcgctcactgaatcacaagcggctcttttttgctattctttttggatgagcggtacttttggatcacaatagtccttttttggttcactgtttcctcgaatcacaatcaactcttttgaactgttttatgaaattagatcggatactctaaagtctaacgagtattatttggctctgatattagaatttaagatgagattctatctcaaaattaattaataataaaaggagtagcaccttatatgtggtattatatttctacaaattaacaatataaaactctctaactaccctaagccattaaagctccgtataaaatagttctttagggatttggaatattaatgtactgaaaccttgttaaacgaaaatacattctccttcttctccattgttaatatgttatatttctcatcatcttccttggtttcttccaagctcttaaaatttcatcttctacattgcttttccattctaatttggttgaataatttctaaagataactcttagtgaattagctaaattacatattttttttaacataatgctgcaataactttcccacttacatatattattaatcatcctccaaatatttttttagtaattatttatcacttatatttttttttcatctcatatatacatataaaatagactaagtagtattgaaaaagctaatgcggattaacaaaatataattattaagtaatttgcggtataaatacttaagtttaactctcggttgtatataaatacctaagtttaatttttggcggtaataatacctacctaagttatatttttgaattgtaagtacctaaccgttaaatgttaaaccattatatccacgtgtcattttcttattggtatatttgaactaaatttttttaaataataaaaa

SEQ ID NO: 123427 - DNA, 577 bp, Cannabis sativa
gttcagggagaatttttaacggcccaaaaagtttagggggcatgatttagtacatgtcaaagttcggggagaaaaattgctaattagccattcatttaatttaatttaacaaatattattgagaatcgataattaattataacatgtcgtatcataaagatagatagcttgtatcacataataatgctcaatgatatgcgttgcttgtttggtttggatcaaattgcgtttgagatggaatataaaagtattgttcttaaactgaataacaaattcattctggatactagggcttgttttaaataatatttttgttgattattcttagttttagaatatttttataatttattattctcgttctgttaatttggtaatccacatgatatttctagcgtaggtagcatattttggtggtcaaattatcattcttgtattcaaaactctattttggccgatgccaacaatcaatgaattgatgcactcggcctacagaattttttttacctaagtggttggtattcttattaagagttagtcacacattgctaatatgtggaaataaattgtgatatat

SEQ ID NO: 123428 - DNA, 1747 bp, Cannabis sativa
  modified_base (280)..(290): a, c, t, g, unknown or other
  modified_base (402)..(411): a, c, t, g, unknown or other
  modified_base (1036)..(1036): a, c, t, g, unknown or other
gaatggtaaatttgttcttactcgatataaatcatctatagatgatcttttattatttggattgaaataatggataattaatactgtatctatattaggagcatagagagcgttctatataatcaggagtgtaatttcgaatatatagtggagttaggaggaattaataagttagaaaatttacttggtaaacttcggatctacttattgggagcttgattatataagcccatggtccccgcaatagttgagataatattggcttgtagactcagttaannnnnnnnnnntaatcaattagaattctaaattagaccatgtcttatttataaattttcactaagtaaggacttaattgagaagaaagagaggatttagggtttatttgataattaagagacnnnnnnnnnnctaattaataaataagttaattgagaattttatttgataattatttataattattaaatagatagatttgacatttataagattagaattaaaagatgacatttgtggaaaaaaaaaagataagttgttaaataaaatgataaaatttaaacttgtagggcccactaataggttcggccatatggttcaatttaagccattattttatcttattttaattccatataatttaatcctaaccctagatgaaatcttataaatagaataagatgctactattttcataatgcttattagactactttgccagacatctgaaaaagagtaaagagccaatctagaatttgaaatcctctccctttcttcttcaaattttcgaaaccctatagtgagtgagtgtttgtccacatatttcaagtcaatactcaaatatagtgtggaagattgtgaagaattacatcatctaaggagatccaggttcagatcttagtaatactctacaatagaagagaacaagggttagagatctgaacgaaatgagccattatattctgctaccactaatgtaaggttttctacaactttatatgtgtttatttcattattttaggaaatttatatttangatgttagattatagattataatcaacatacatgttagtaaatctagatcctgataaagtaagtttcaacaaatactactcggatcacaagtgttgtgagtctggagtggctctctatgcttacaatagtgggaatgtgagccaattctcaagtagatgagttgagggagacttagtctctgctacactactaatggtgtgtagaagagagggtgagttagggttttgagtgcttgaactcaagagcttaggaatgagaattcaacagcttttaggtttagcctagtgctctttatataggagagagcgtacataagatagtaggttgatatcccttaaaataaggggatatcacctatttgtaacatattaaataaataagaaaataacttattaatcaatcctaaagaataggtaaataactgacgttaatctcctatttttgtgggttatttgaggccaattcatagctgaaaatgttattcaggttgaaagctacaaaggcaccaaaagtgcctgccagaagagaagctggtcagcctaccctttcctggaggctcaccggcctatgttggcactagggccggccaggggtggtccgactagacccccttgctagccagtttgttgtctctttatcctgcttaagtatttagactctttgctaactggtacgttgtgcatggtgacttgtgttggaaattattttac

SEQ ID NO: 123429 - DNA, 1255 bp, Cannabis sativa
taagttatttttgtaattattttgtatttaacgtatattttttaaaaaatcccaaattattttttgtttatagatttttaaagggcatgcttgtcttttttatttttaattaataaaattaaaatataaataaattaagttaggaaagagaaaggtattgggagaatctttccttttgttttctccctaatttgtgtggatctcactactttctctcttttcaaaacttaataaataattgtatggaaattaataccatatcatttattcttatcctctttaagtaaacatgtcattaaaggggaggagagatgaactttgacagtgaggccttccaccacattgtcaacaatattcctcacaatcacatccccaaaggaaaaatctctcctaactgcatggacagttctcccattctccacccttctaaataatcaaaatattgactaaaggcatcaaaattatttctgagcatttgtggtaccaatattctaatttagaaaatcaatgtgattaactttgagctaagatacactgcaattaagtgttagcaaaaaagagtgaattacagtgtcatttattgtgattcatttcaacaacaaaaaaaaagtgtcatctattgtgttatttaacacatacatatatatttatagttaaattgtttagtaaccaactaaccaaataatagtccacaaaaaacaagctaaccaatcggccgtaagattcgtggatcggttgacaaaagaaattaaaataacatcatataaaaaagattatagcatcataattaactttaagaacatttatatttaatttcttcaactactctaaaaatacaatagtaaaaactgttgtagccggttcttatttttctttacttgagcactcaactattgtgcaaggtacataactgcaccactaacaactctttcagtcacagaaaatttgtcattctaaactacaaacagtgactttatggcaagacatcaaagaacaaaaaagactaactaacaatgacacaaaacaaaataaaaaacacaaaactatatcacagagacatgactaatgataagtttttatagaaaagcaaaatgttgagctggagtcagacagcttagtttctatccaagctatccggagtcgctcacctcttttttctgtgtttgggaatttggttcaagattgtatttcacttatgctttctttgccttttgttaaaatccgttttgttaaacgatcaacaaaccgtctagca

SEQ ID NO: 123430 - DNA, 1999 bp, Cannabis sativa
tcctctttttcttttggctcggtgggaaaaaaactcagttcgtcgtcagatttctttgctcaggtctttgtcaccgccgccgtcaagtgtcatagctcactattcaggtctaaatctcaacatctcagtttgttttcttgtataatctgatttggtctttgtgttgtttatttgtgataaaaaaaatatttactaaaagaaaactattgtgagctcattaatttgtggtgttgttaattgttacttaatcctaatgcttatgattaaaaagaagtgaatctgttaaattttttttttatatgaataataataataataattttatttgctactgcatgtgatcaatcataatctgatctggtctttgtaatgtttgtttgtgttaaaaaaatactaatttttattatggtctatatattttgtttggtgtatataaacatgggatatgtttgtatgttatattgtttattttttttttttcagattggactcaaagaatgaaagttggaactaccaagtaccaatgaaggaagaaaagctctatagttatttttatttgatttagcaattttgtttattctttgatttgattaacatattatttgtattttttgtgtgtgattagttctgactttgtttattaattttttggtctctaattatatttaagttattttgttgtttttttttttttcttttattagttatagacttatagatgatatatagtagttttatatagattgtccataaatttgaataattttctgttttgaattgtaggtaatgaacttgaggacaaggaattaccaaaagagaagacttgaaattcttgattgatgacaatagaaatactagatgttattttactcatctttgtagtcattatgacactatctagttgatctagtaggtaatttattaaggaaaattttttatagttttaagacatgattttggatgactgtaataagttttgaatgactttaccttatgtttgaactttctatgaacttgtgttcatatgcagatttaaattttgtaattttttataattgtgaaaattagtaagggttgtaacccaacccatgatgacttgggttgggttgggttatacataaaacttaaaatgaatgggttagaatatcataggccgatcttattgggttggcccacaaaaatagcctcaacccggccaacacaacccatgcacagccctactgaggaagatggggctcgaaaaagctaaattgaggccttgtatggtaaatctttgcagcttcactagagatagtattgtcagtcttggcataatcgagctcgcactaaccttgggcgaggaacccctatctgccactgttatgcaagacttcttagttgtcgacctgccatcggcttacaacatattgttgggtcgtccaacactgatcggactaggggcaattagttcgatcaagcacctatccttgaagttctaaacaccagaaggtgtaggagtggtgcgaggcaaccagatgctggctcgcaattgctatcgcatagagttacagcataggaaagtcggtcattaattgatggcgatcttggcagaagacagtgaaaagaaggatgaagatcttgacccccgagttcaagatgaaagaaacttattgaaaccaattgaagaattggaagaggttattctcgacctaagaaatcccacaaagtgtatatacattgggaagaacctggacgagcaactcaaatagcagctaataagtttcctaagggcgaaccagtatcaattcgcctggagccatggagatatgatagggatcaaccctaacattatatgccatcatttaaatataaatccaaactacccagcgaagcgacataaatggagaccattggattccgagaggcaaggggcactaaaataggaagtggacaagttgttagtcaatgactttatacgcgaggtgttttatcccttgtggataaccaatcctgttctcgt

SEQ ID NO: 123431 - DNA, 1354 bp, Cannabis sativa
aaaaaaaattggccaaacgacccctattagttcttaaaagttattttctgtttttaaaaattgaaaacagtttttaagttatgaagccaaacaacctcataatgtgtggtactttatatttagatagcaaaattaagcacaaaaactcaatttttcttaataatactcattaagagtacatatatatatataaagtagtgcggagaaagtactaaataaaataatatttatatcattgaatatagaaatataagaacaaataataagataaaaaacctgatgaaaagtcgagatacgtgaaacacgattttcttgtgagcaaccactttcaatgatacaacggttattgaataggcgaaaacaccacatttttaacttcgacaaattcagtcaagaccttcactccaaaaagactacaagaaatacaaagaagaagagaaaagagcttttgagtgtgtgatactcttttattagtgtgtctagaacgaaaagagatacatccttttaaagggggtgtaaacaagtgaattaatgccgaaaatctcataaaatttgtgaacttaatttttgaaaatcaatcataatattcaccattaattttttaaaattagtgaaaatattcatcattattttgataattatagcttttatttaattagcagttattaattgaccaaattataggcatgaatttatcattcattccttagcctctatttattatgtttttaaatgtgatttttcaacaattgttaaagttttttcttaatattttagagcactcctgacaacttctttattctatttttagtgcactcgtaatagtttctctaaaatagagaaactttaaaaaaatttaaaaattgtactaaaaacacttacaatagatactttaaattcattcttcattttaaagtttttttaaaatactctatttatgctctacatttatagaatactatttattgctctaaacatgttttattaattattttagattttaataattatttttgtatagggatatgtgtaaatattaatattttataattaaaatgaataaaaatataacaatttttttttttttaaaagtaaagttttagtgatatattttaaaactgatatatagtgcaatgtaaaagtgtgctgtaaataaattttggtaaatgatgcaatttctaaaaaggtaaattgcggcataaatacataatgtttcagattttttacactaccacttccgttaattcataaatgtagacacatggagagttcagatacattacatttattttttattttattttaaaacttaatatttttaatatcagaatgttctcataacaattttcacatg

SEQ ID NO: 123432 - DNA, 3152 bp, Cannabis sativa
taaatttaacgatttcaatagttcagggagaatttttaacggctaaaaaagttcaggggacatgatttggtacatgtcaaagtttgggggaaaaattagtaattagcctttattaaataacaagttccaaaagttattcataaaatattttattattttagatttaaaagttacaatgtaatatttgaataaatttattttatataataacttaaataaattactaaaatataatttatatttataatttattattcaacttgcactgttccagttgagttgttgcctagtttggtaacggagatattcgtttaataaaatgatgatttttattttcaaaaaaaaattactaaaatataatttataaagaacttgctacatagtttattagcaaactttataaatatattaatttaacaattaattgcttataatatcgataatatactaatgagttactttttataaaaaaagattttttttttactattctgcctagaaaggtaactttttagttatttatgagattagtaagacaccaataagttacattttcataaaaagattcaatttaaaataaaatgatttcatatacattttaattatctttattgtttagttacttttaaacttatatgtttatttttttagattatattatattattttgttatctaaaaaattttaacttacctttttaaatttagtaacatttgttatcttcaaacttttttttttgaaacaaagtgttcttttattaagaagagctatcgcccaaaaggatagataacaactccgaaggaacactgttaatagggaacatacgttcagctaaggacaaagagtgtcggtcaataaaatgcgcggcacgattcgcagaacgtttgacaaaatataaagtaacatttgacaaattttgaaaaataaacttgcactcttccacaatgaatccgaacccagaatggagcctctctttgcttcgaatagcatccacacagaccaggctatcggtctcgacagcagcatgagagtaagagcgatttttcaaccaacttaaggcttctcttatgcccataatttcagcaatttctggagccactttgccttgtttaacaccagaaaaaacagcaaccaattctccttctgtatttctaatgacacacccgaagccatgcttgaaatcatggtcaaaaatcgctgcatcaacattcaatttgatgccttcagtcggcttagtccaaaccactgaaccatcactaggtttgagaggggacatagcaggtaagttatttttgccttgggcttgcagaaactgaacaaggctagattgagcgaaatcgaccacatctttgacacttcgaacccgacccttccaaagcatatcattcctggccgaccatattgcccaacacaacacagcaactcgaccaagcttctcattatccagacgagtagcattaaaattaagccatgacagcagcgagttggagtttctatctgctgcagaaaaaccagagtactcccagcaggcccaagcgaattgacaagaaactagcagatgcatttcagattcggcaaaaacacaacacataggacagttattatcagtcaacaccttattaatgcagagatttaccttggttgctaagcagttcgaagccgctctccacaccaaatctttagtcttaggaggcaccttaagtgaccacaactttttccaaaacagatggccttctgaagaaactggagtaatcttttggtcttgtattagttgataggcactacgaacagaatatagaccatttttctccgcaaaccagtaccagtaatcccccacaaccaactgttttatttgaattccaaggatagttgcagcatcagcaggagtaaaaagatcgttaactacttcagcatcctaggagcggctatgaacttgaaacaaactgctgaccataaaattctcaagtcccggaacagtgggcacaggagaagctctgtctaataaaggcagccaaggatctgttgttattttcacagtcaaaccagaccctatgcctttcctcagaccaagtttaattgtgtccttagcagcaaaaatactactccaaatgaagctgggattagaccccaactcagcagacaaatagtcaccttgagggtagtatcgagccttgaagactttgcttacaagagaatcatgtctgaacaaaagtctccaaccttgctttccaagcattgcgagattaaaatctctcaaactcctaaagcccatcccgccattagctttagaccttgtcattctgtcccaactcatccaaacaatgccactcccattattttgagctctcttggatttccactagaaacttgacatcattctctcaagttcattacatgtaccaatggggaaaaggaagacattcatggcgtacgaaggaagagattggaccactgattttataaggacctccttgccagcacgagataaaaatttgccctcccatctgcttattcacttcttcattttctcttttaagaaacccaacacagcatttttattacgcccaatcgtacttgggaggcctaagtacatactatctaccccagcttcttgcacttgcatcaggccgcagattctgcttcgaatatctgcccttgtgttggagctgaagaatacagacgacttattgagattaaccttttgtcccgaagctctttcaaagatatggaggagtgtaagaatacgattagcttcctcctctgatgcttgacaatacacataactatcatccgcaaagagtaaatgggagataaggggtgcacttctagcaaccttacagcccgtaattagtttttgagcttcaaagtgtttgatcaaggaaaagagaccctcggcgcacacaatgaacaaatacggagacaaagggcaaccttggcagatacctctggtaggagttattggacccatcttctaaccactattgataacatgatagcgaaccgaattaacacaaccaagaatgagactaatccaacgttcactaaagcccatcactcgaagaatggctgctaagaaaccccactcaacacgatcgtaggctttactcatatccaacttaagagccatgtatcctgtaaagcccgcttagtta

SEQ ID NO: 123433 - DNA, 879 bp, Cannabis sativa
agtaaaccaattacaattgatgggagcccttagacccctttgatgcaaagattttactcaatacattgcatattgcataccctctcactttctatatgcaagcacaccatcctaatcatagggcctaacaaaaactttcattagagagagtaaagattgttctgttttttttcactttcagctattagaatactctcatctatctttgtcattatgttgttataactaagcttaaatattgtgtatgtgaacactttgattcttttcaaaactcatttgtttctgaagaaattgtatatgaaggtggtcaaattcgatgccatcatcactaagaagatcctttgttactatcttcttgtatatatagggaaaagtgtttatatggtgattacttgtgcagattgttaatggttaagagtgtcatttaatcaggttgaatcggaactctctcttgctttgaacttggtctatgctacaatcatatcggcttttgcttgttttgttgttagcaaattcatagcttccaagtttcctcgatcggcccatgtgctcgaaagaatcggtgcgttttttgttctaactggtttcttcatggccattacaattccctttcatttttctctcaaactcttttcttggatgctctatgtcatttgcttacttgtcatagtacgtttcacttgatatatatacgagtaatttgcggtataaatatttaactttaattttcaataatacttattttggcgttggcggtaataatacttaaattataattttggaacttcggtaggtatcttaatgttaattgttaagtaaattgctatgtgacaatttctgattggttcaggtaactaatttttttatttttttaaaaaa

SEQ ID NO: 123434 - DNA, 867 bp, Cannabis sativa
tgttaagaaagttgaagaaaagttggagaaagagttgggccaccagctcactatatatgacagggcagacttgtggattagaatacacaagagcaaaaaaggcgagctcgatggccttgctcaagaggtctttaaccggattgtaagtttcatttatcatatatgttcttgtatcaaatctttaaacacttttatgttgttcaaattcttattaattctactttattaaatgtaggctgagatacaaaagcaggttgaggaggggacaatattagtagaaggctcaaaagacatactcactctagccttgggaacaaaagagcacgtaggacgtgttaaaggaatggggcgtggcgtcacacagacacaaattttcaaaatctcacgtcctaaaagaaagagagtcaatgacaatgattgtatgagtgaggtagagaagcgacttcaagagtcagaggaacggggtcgtaagcaagacgaattattaaagaaattcctccaaatagtcaaaagccaaagtggtgttgctggcacctcacatgcatctaattcaagtgttgggggagcatccaacgaaccaacttttgctgttgttacctcaattgtaggagaaacacctgctgcatgggcctctattccaccagctgccagggcctctactccactagctcccaaagcctttgctccactagttgttccaacaccaccacttgttgctctaccagccacagccaatgcagctgctccactagcaccatcttcggttacttctaataatgtattatttacttgctttttaaaatgattttcattatgcatgcttaattttcatatgataattatttaatttctttttaaaataaattt

SEQ ID NO: 123435 - DNA, 897 bp, Cannabis sativa
  modified_base (849)..(861): a, c, t, g, unknown or other
tagtcatatcatacagaatattactattaaaacattgttaatttaataattattgaatattaacaaaataaggaatttaaaacaaaagtcaatcaaatttaatgataattaatatatatataaagcgtaacaaaaataattaaccaaaattagctcaaaattaaatatattaaaacctatttagaatagcataaaagtataacttatttaagacaaaataaaaggtcacaaaactgccataaaaatataattaaacctgatttaattaattaattagtagaaaaataaatcattttattattaattatcattaaatgaaaaattaaaattaattactgaaatgttgcctaacaacaatcccgcgcgtgaaactcgactccgtcaacccgcaatgatccatctttcctcgtcaaattcctctgccggcgttactcaggcggataccacccatacagccgagaacgaaaacagaataaacaaatatacgaataatcatatgaagtcctagagattctaaattatcaaaaataaaataaaataatcaacaaaagagcaaacatattctagaagaacaagaatatatggattgataactatctattaactcaagtgtcacatgatgatttaataatctaaaggaaactacaaaatcaaggaaaaacgagaattgaaaccatcaaatccaaaaaatgctcaaatcaaagaaaacatacagaagaaaagagacgataatggctgtaaataatataatttaatctactactcacatctatttttctcgagttgatatagcaataaacttctgatagagagattgctcactgtataatatatattatatatatatannnnnnnnnnnnntaaaagtgtctatctaacggcatttcttggtttaac

SEQ ID NO: 123436 - DNA, 1417 bp, Cannabis sativa
aagttcagggggaatgatttggtacatgtcaaagttcagggggtaaaaatcctaattagcctaaaaaaaataaaaccagtttctagactcttaaataataaatattgaacaaaaaataaaactagcttcatcaacaacataatgaaaaaaaaaaacacaatgcgagaaattataatctaaaaacaataccaactttataaaacagattcatcaacattaaaagaaactaaatattttattataagaggtaaaaaaaacagttgcatcaataacataatgaaacaaatcagagcttgagaaagaaataaaattgaaaaaaatagataaatgatttttacgtggttcgggcgttaataattcctagtccacgggtcagttgtattggcccgttcggcaagtattcagataatgcaagtgtttacagtataaaccctagctctagactccttttatttcttttgatgaagaagaaagcttgtaggaatttttgcagaagtttggatagtataaaattgtttaccctttgtacataaaaaaatgaggatatttataggtttacatgtgggtaaggccattccctttacccacctagggttttgtactcagcatgcagcaagggcagacactacaacatgacgatctaaccattggttggtaggaaactttcccatcgtgtggtgtacgggtgcagtgaaggattccatgcggacaagaacatgtgtcactcaaaggtttcaccttgaaaagttattgcctagacaagttgttggacaaaaagggaacttcagaggcacgtacacgcactactatgtcttaaggttaatgcagattagtccgtaacctcaaaaattggcggtgagaatacctaaggtcgacaaagttgtgagtttgttcatacccaatccgttaggataagtaacgggacacgtgtacgcccctaatttaatcccgacctttttaatttctattttctcttgttgtccataatctcgaatgcctgatacgtgtcaatcacggaagagtgccactttggaccgtctgtgatcagtatatactttctacttaataacactaaggagtataatattttagaagccaatcaaaggttcccaatgttagtgagtaaggatagggctctagaactcttgctatccatccacaattagggaggattagggttacccagagattcaagtattctaaaaaggtagtggatcagtatgacctgggaaggctttggttcattgatctcggcactcattcgagagtatcctatccagaatccaaagcgacggttatccatcctctaacaccgaatcagatcttgtcccctatgttgaagactaatctgcatcaaccttaagtttttggggacttttattgcaattatccctaattattacgaccaaaattttta

SEQ ID NO: 123437 - DNA, 1047 bp, Cannabis sativa
ctatcttatcattccaactattgacaagaatatcaagggcttgtgctcaccatccacggaccactttcccacttttgtgtggcgatttttgctctatgatcatttccattagttcaagaaggaatttcaacaaattgtttacaacaaagacaagcagtgcaacatggccagtttcaaaggcagtttctgtcccagcttgctacactcagttcttccattcaagatgcacttgatgttcaggaggagtcttccgcatctgatgaaacctctactgtagagccctctaatgatggtgttgcataattattaccaatgagggggagctctactgaagctgcgtgtctattttttttgttttttgcattgatcatagcttgacaaaggggaagactgtaaatgttgtttttgtcaaatcagatcagttagatcacactgtatctaattaatcttgtctatacttatttcggttatgttaaccggtcttttaatttttgttatattcacgtgagttatacgtgtttagtttgttagttttttgatctggagaatgttagtcaatttagattttttttttgtccctttcagtctttctagttacgttcttgtttttcttggagaggaagtacagaaaatttgtacagagtaaaagcttgagaaacacgtcaatggagattgttccttgaggagttgaatcaacaagcggacttgttgtgagttcatctggagggattcaagatttgtctttggatggagttcaaagaaactaaagagcacgattgctctgttcgtattatcctaaaactattttttttttttcaatttgactgaataattagatgaacgacacttcttgaataccatatagctagtttcatttgatttttctcaacacaaataaaatcaatctttagacttaatatttgactaaggaaactactgttatacgttattttataatataataagtatagattaaaatgtaataaatatattattatctaaataatatatattaagtgtatggtaaataaatgtgtaacttatgat

SEQ ID NO: 123438 - DNA, 2100 bp, Cannabis sativa
  modified_base (2012)..(2014): a, c, t, g, unknown or other
ccagccacctcaaggggctggctcgccctatggccggcgagtctgcatcctgcaagtgcatggctggccagaattggacctggtaggactttggtgcataacattacacgtggacagcgagctagacttcgaactggaccttagcagcccacgaaagtagatggaaaatgtctatttcttaaggggtattttagtctttgtattttactaatttaatatgcaaatatctgtttattttatctataaaaagggtttaagctctcctatataaagaaccttaactcaaccctaaaaccctaagtcataactaagtggaaaacgttaagcctaaagctgtaagtctgacatctcatttctctctctcacacacgcctattgcttctctctacacttgaaatttgccatctttgattcctactttgtaaccttaagagagctatatcaaatcccatctatagtgatttgaataggataatctctcggtatcaatacaactataagggaagtaggtcattacccactaactaagagggtcgaacctctataaaaatccttgtgttcttttactttctacttctaattgtgtaacatgtggcaagcatcagtgttaatacgactccgctgtcagttggccaaatctaaggttaataggtttttactttatatatcatataaatctaaaactatatacgtataagttttaaggaaatctaaaaagggctaatcagattaaacctttttccatcaccatcactcatagagttcatgctcatatattgagaaaaaaaaataaaaactcaatatacagtttatcctattagcccacactaatacttgtgtgtggtggaagattcaaaagatcacaatctgtgttcttcatcaccatcccgaggatacaacttacaagaaaaaaaacaaagataccttgattttcttcgagagctaaattattattttcgtctatttatttaatatttaatatatatacatgtggtgatcctaaggatgtggtaggatgataataaaaaaattattttccactgcgtacctgatttagtaccacaaaaccaatacttaactatgcagggatttccaaaaccctgacaattccaagagagaaatctcacgataattaaggaactagggttaagcccttcctgtccaaaccacagagaaattttcataattattgtttttagtgaactgaataggcacatcctcacaatgaaggaagctcaaaaagacaaagcaaatcacaagagccatcagtagcggatgaaaggcacaaccaacatgttctatcttgcacaacttcactaatggaagaagggaataaagccctaagacacatgaatgagtctaaaactagcagagaaaggtctaaaatttgggaagaacaacaaaggcacacccatcttgaatctctgaaagaaaccaacccacgaactagacaccaaccctggctagtgcccgctgccacactagacccaccaaccccattggaaaagcctaccccatctcaggtgattttgaaatcacacttgtacgtagagatgagatttagcttatgccaagacggaattgggccaccaggaggactgaagaagaccgttggaggagagcctagccagagacgaacgaaaaatcggctcagagtcctccataggaggctcaggggttgcacgatatgaaatcgcctcacttgtacggagagaccctgaccccatacaattaatagtcacgacttttttgttttgtgaaatgataattaacacctcatatttttaaaataaaacaaaacgatagcatgagcctgatattcgtcgaactcttttaatgttaagattatattagaaatcaaaccaaaatcactagagttaggtaacagaacattttaggattaggattaaagacattgatctaaaattagattaagggtaccttaagttccatcacaaaacatatagtttaaaatattaattggaggagggatattgtaacaccctaactannntaggcgtattacgtgattttgaaacatactgtgcagctcgttgctaatcaacgaggttaatagaaatcgtgattaattaaaatttt

SEQ ID NO: 123439 - DNA, 1527 bp, Cannabis sativa
cgggactactgactgtcacacatggcatattttaattagctcatatcatatatatatatatatatatatattattttaatactataaattaattcaaaaataaaatagtgttaaaaaataataaaaaaaatcttttttatttttcctttttctttttattttcctgatgctcttatcaccctacaacaactacaccgtcacaccacccctttataaccaaccacaattatcaccaaccaccattatcaccaaatattatgagatcccaagtgttaacaatattagtataaataaaatatattaagagatcctataaaatgcacacttgtgcctttaacatttattttaattgcaaaagaaaaaaaaaagctcaaaatgtcttaaaataaactaagaatatgggggtgttgttgtatcatctttgtgcttaatcaccagaatccactagaatgggagtatcagctgccagccatggggcaagtctcacgcagagtgtatgtgctatacaaaatcagggatgggtagaaataggaaagttttgttagcctagaaagtactaactcaatattccaaagagaacaaaaaagataatgagattgagaacagaacggtaaacaacaaatctgagggcagtatagtcgagacaaagtactcaaataaatgcctagattctgcgaaatttcaaccaagcgttgtcgacatacatagaacacaaattttgtttaaattatgacgagatccacaccattcatctacagagaacaaaataatgtccaaatcactacgaggtaccaaacgacatttatttgcagagaaaagagcaggagagagggagagaaacatagaatacgagggagaataatcgaatctgagtgttagggatcttagatctaagagttttgagggttggaaatctcaaatttaggatcatttgagaatgagagaaggcccgagggagagagcgcacttgttgtctagggtcaggactcaaggttctcacacaggcacttggctggacgactaagagggaaagaggatctggagattctggacaatgggcattgttctctacactttttgacgatggacgatgtttctgtgcaagtggtcggtggatggttgagtgggaaataggataaggcattgagaagaagggagaaggaagaaggaagaagaaaaaataaaataaaataaaaaagatttgtgttaattttttttttacatttttttattgtttaattaatttataactttaattaatatatatgatatggacttattaaaatttattatttgtacactttagttggacaaatttgtacttaatacactaagagatagtgatagaaaattagaagtgtagtttggaggattttatcaaaaaaatagtttgtgtgggttttctttttataaaagaaaattactttatgaagttaagtgttacaaaatctataatattgtcccttaaaaaatgtataccgttactatccataaattttaggggtttttttagttttaaccaaaaaa

SEQ ID NO: 123440 - DNA, 1744 bp, Cannabis sativa
  modified_base (1708)..(1714): a, c, t, g, unknown or other
ctggtagacctagagtcttcagataggtttttacacttctaccccattgacctcagagttggcccattactgagacaataaaagccattgtcgtggccaacatgttttatatcataaaagtaactaaaatcctcgactgtgggtttctcttgtatgtattccatgtacatcgcgtagaatccaaggattatgcgataactattggctgtgatttggaagggggagacgttataatgtgtcagcatagcctttacgaaagggtgaaaaggaagcatcactccacaacgcataataggaattgaagccattacatgttgagtcaggataatcgcaggattagtgaacgggagatggggttgttacattaacatgggttttgaagtgaaagtatggtaaaattcagcctttcaaatattgttagatcaaactttttaacccacaatactaggtcctcgcagaaaaaaggttcgtctaacagggcattatccactgaatctgtttcactcccttcatcgctcacatcatctgtgaccccgcgatcgcgtagttcaaagtacttgcccatctcttcaacttccacgtttggggaaatttacagataagcgaaactaccttgagcagacaccgtggattcatttcctcgcaccgctaaggtgactaatactgctaattcctttaccatgcgatctattttttcggtagatagcaagccctcttgagctcctcccacaagattctcaccatccagcagtgacatggggataaaactatcacttgtttgggattcatcagcgaagatcctctctccaaagtcgtaccttcggttgtttgataggtcactcatttaaaagatagaagatcttttcagcgtggtgcaagtgcgatttcaacaaaaattgttctcactcgaataataaaatttcaaatcgaagtgtaacaaaactaaccaaccgcttgtctcaagaagtggctgggagtttcttagtatcctaagggtcatgcagctacattaacattaagttaaagggagacacccaccactttgagaactcagttagtttttatcccaaataaaatgaatatgaagtacagccccaaaattaagcaaaatggttgtgtgtgtgtctcaatgacttaaggtttatcaagagaaagtaaagcattaaatctctgagatacggccaaccactgtcgattttcaacttggggtcagatggattcaaatatgtgagtatgcaaaagggaattattataatgatgcgagttttcaaaagttcattatgaaaactcgagagtatttaagttttagacaattattttccagagaaaatacagtattttgcctaaagttttttattctctcaataaaccctatttgtttcataaaacttctatccctaaaacccacaatgcatacgagtatttgaataaaataataattacagaaaaggaagacactaaccttcaatgtaattagttcagggattgctcttgaagatattcaaagcctttgaagtcgtcttcaattagcaagaatttgaaacattagagaagtcctttaaagtttaaatttctgggtagaggagtggaagtgggaaaaagaataaggatctatttatatttgtaggggttacatactaatactcctcattcattgggatgcagatgttgggttttatgccgtaaataaaactcattacaatctgannnnnnntcaatttagaagtgaagtatgtttacatgt

SEQ ID NO: 123441 - DNA, 1291 bp, Cannabis sativa
aggctaatgacaatacaacttacttgggttttccgaatatcattgggcgtaagaaaacggctattcttgggtacttgaaagagcgagttcagaaacgggtgcaaagctgggaaggaaaactattatccaaagctggtaaagaggtgatattgaagacggttgcacaagctctaccgaactatgcaatgagtgtttttttgttaccagccgagacaagcaaggaaatggagcgtaccatgtgcaagttctggtggcagtctaatactaagaaagataagagtatacattggatgagttgggagaggatgtgtaagccaaaatctcatggaggtcttggttttagaagcctttatgattttaatgtgctcttttgggaaaacaagcttggcagctattatcgtaccctaactctcttgtgggtcaaatatacaagggtaggtactttcctaactgctctttcttggctgctgagataggagggaacccaagttttatttggcgaagtattacggaagccctccctttgattagaaagggtgttgctctaggggtggggtctggtgctactattgatattttgaaggacccttgactgcctaatgtagaagacccgtttgtgcacactgtgagtgaatcgttggaggggaaatcggtttcccaactgatgcaggtgggtcaaaggcagtgggatttggaaattttgcatgacattttcattgatagggatattaatttaattgttagtattcccctacataatgaagatgatgatgcttggtactggaggaacgaaaagcttggctattactcggtcaagagtgcgtacaaagtgttgcaggaacttcaaggtcacacgggtacaattgcaaactctggtttttggagaaagctgtggaatttgaaagtctctccgaaagtgaaaaacttcttatggcaagcctctacagattgcttacccactaaaacccagctgagaattaaacatgtacccatagacgataaatgccctttttgtcttgctgatcgtgaaaccataaaccatgttttggtgttaatccattttcaaaatcttgctgggctcgtttatatgtgggggatccggggtctatgaaaggctcttttgtcgattggcttcagctaatgtttgatagatggagtggccatgagaggtacttgattagtatgctatgttggtcactttggaaaagtcggaatagcttgatttggaaccaaaaaagtgtagaagttgcagatgtttttgtaacgccctaatgctaaggcacgctacagt

SEQ ID NO: 123442 - DNA, 1121 bp, Cannabis sativa
atatatggccaaagcaacacagcaccacatataataaaatgtataattagagaaagatacacattaattgatcaatatataaggtaattatagctttaatttcttccaaaaattaagagcaagtttataatatatatatatatatgtcgcgtgagagcataacttattgcttcttgtaattaggtatggataatttatattattcttaattagttaagttcttaatattattatatatagatgatatagtcatgaagtgcgcaaagtttttgaaacgggcctactagtagtattatactaatttactatttcatacacaattcaaactatttttttttgtgatgtataaattgttatagatgccacaaaacaaacaaggacgtgagggcaagtgctgtaattaattaacatcattaattttaagatattgcttaaccctacaattagaccagggattattatatattatttcctaattattattatatctgtatgaaatattcaccaaattgaaatgattaacagagacagctaactttttgttgtctttacgaggctgacaatatgaaatgcatgatttaaacacaatttgtgctgcactacaaagaataagttgcatggtttcccaattttgtcggttccaacgtaagaaattatttgttagattgatgagatatataatatttgttattaatgaaattatttcttttttttttttttttttatcatatacatacgacgtaaattttataatattaatttcttctttccctctataatttaacaattatactgtcgtattaatattataatcattttaagaatcttatacgtactgatttgtatctaaaaaatgagctaactatttctaagcgaggaaacatttataaacataaaatattttttttttgatttatatatgatgatgacattaaatatatacatattgcccttagcatttgcttaaagtaatattttcacaacagtaaaaccaaatagaatacttgatgtcacaaatagaattataagtgtataactatagatctaaagaatacctttgttgattcaaagagaagaattcaaatggcggaagcgtaccttaattcatagatagtgatgat

SEQ ID NO: 123443 - DNA, 1133 bp, Cannabis sativa
ttatataagttcagtcatgcttttcttatataagttgggtatatttattatattttatgtcatttgctgcattttaccaataatagtattttgtcgatttatgataaattgtcaagttagaaatgatattcagtttatgcaagattaattaattgtgtttttaacatatatatcttgtagttgtaataaaatggtgtagaattacaaatgtgttctgaattagtatcgttattaaaataagatttacataactatatttccaacttaccaagctctttatctgataatttttctcatttttattatttttagttcattttaatttctactattttttattttttatactaatctttagttgtaatttgtctccctgtggatacaacataactcgtttactataacaagatcacagtggaacaaattgggcgataccacaacacaatcagcgtcaactacatccaaataggctatcttgcattggaatggtctttctttttatttcaaaatagaatagtcattctaccaaaataataaaaaaaaataacattttaatactttaaaatgcaactaaatagaagaattgaatattttttttttcattctattttattacctttaattaaatgcaacctaaattagatattgttttctggcgacttctcgacaatggtgccatttgaacactaagtactactacaaaattttatttcttaaccacttttagtcttgtcatattgacatggtccgatgatgtttgcctttgtctgagccgttattcgtgattggggagtcgttttttttcgttgttttcttctcgtttgttttgcaaatattcggattgactatccatacatatggaggaattggatgcacagaatgattttatggatgagggggttgaacggttggtcctggatgatgatgacggtgatttggaggagatcgatctccgatggtgtttagtagggcgttttctcactagaagaggcatagatttccaagctatgcaacacaaaatggcgtcactttggcaacccgggagaggtatgtatgtcaaagaactgaacccaaatcactttctttttcaattctatcatgagttagacatctaaagtatgattgatcgtagc

SEQ ID NO: 123444 - DNA, 4764 bp, Cannabis sativa
  modified_base (2303)..(2310): a, c, t, g, unknown or other
  modified_base (4668)..(4674): a, c, t, g, unknown or other
actcatatcttaacaaataaaaaataattaaaaattcaataaaaatataacattatttttaaaaaaattataaattaaactaaaaaaatgctatgtttatattaacaaatttacattttttgataaaaacaaaatatactcaaatttgttcccgtaaaatttagtttttacaaaaattgaatttttaatatattttttaaatatctaaataaattttctaataaaaaataaatatttttttatatcgcttaattagttttaaaattttaattttcttaatcattcaaaatgatttttttaaaagatctatattaattctttaagatttactaaaaaaatatcaatcattctcatttttattttgagggagtacgatttgatagttgtcaaagtttaaagggcaaagttattcgttaacataaacacatcatcatttaaacggaataacgggatgtaacctaagagaaagactaaaattctataaatgtaaaagttcggagaatttttaataagccgtataattgaggagccaaaataagtattgtcgaaagttcagggctacaattactaattattcataatatatatatatataggtatatgattttgtcccgttattgtactttcacggattgtaatccgtgatgtacgacagctgtcagattatggagttatttgatctgacggctgagattgatctaggagtaattaaggttaaaaagtagaaacgtaccctaacactcatttaatgtaccctgagacccatctaatgtaccacagaatacattccgtaaaagtacattacgggacaaaatcatatccctatatatatatacatatatacattgctatatatctataataagtagctagctcaaataagctgaatagtagtattgtctagaaatgagagaagaaagcatgtgttccctcgtggtgttcctcctatacatgacaacattatcacagtacaatttggctggtaggggtggaaactttttggccttgctaagcctaaactcatttaagctcttgttcgaacctaacaacactatcgacgatctaccatatgccaaccccagtttgccccctaacaaccccaccccacctccaattcatttttaattgtatatatattgttatataaattttaaaatatacaggactatatataattatatataaaaaccacctcatcgctttcttactatattgctatatagtgagatttgaatttggatttgatattgacagacataattattattgaggttggaaataagtactcagccccatcagtaagtgacaagttatgttgaactatatttattcaactaagttgtatatctggtcgtatgaggtcgccattatatttcataataagtcttcaaattaatgagtgatccttgaccagttgatgaagatatgaaaaccaaataattatatgatcttgacactaagtatgaatgggatttcaataattacacgtaattataataattatatttatttttagttattagctagattattactaggttgtgattgatttaaaaatttatttaaaaaataattaataaattacttataacttaaaatttagatgactttatttatttttctataataaaatactagaaaaaaaaatatattaatttctaaaaaagttttattaaacatttcaatcaaaaaattaatttattttaagtatataattaatttaaatctaaaaataaaaattttaagctgtttaaaaaaaaataaccattataattatatttttactcaaactaataaatactcacctcactaagagttcgtttggtacgtcatattacatcgtattgtatagtattatattgaattgtattttattttatgtaatatttttatgtaaaactgtatgtggtattaattgagtgacatgtgtaactttctaaattatatttaaaaacagttacaattatgcactcatttagtttttattaataataattaaaatgagtcatctcatttaattatttttttattttttaaaactaataatttattcatttacttttactgatcattaaaatgtgtgattttatttacttgcttatttgtttttcagacaataaaaaaacttaattaaattatatttttttaatttattaaaattttattttttttaatagataatatgtaccacaatgaatcattcttttcatttcttttataataaatattggttatttactttataaaaaatggggaaatatttcttttcagaaatttgcactaattattattattattattannnnnnnnattattattattattattttgcctcgtatcattcttttttaaaaatttttttttacattctcttaaattgttctcaaatttttttctaatcaaatatgtaatatatatatcgtgaaaagaattttttttattttaaaaaaatgaaataaaagtaaatccatctaacacatactattattttagcataatcatatttagtttatttttttatcttttgttgtttctctctgtatatatatattataacaaacatgaaataaaaaataatttaaggaataatacaatatatataaaaaaaaaaatggatgcaaaatttgttgaaaaaaaagaaagaattattgtttttcattttttataacataaaatagtacatatttattataaaaaagaattaaaaaaatgcataatagtgcatattgtttagtaaaaaaaaataaaaaatgaataaaatagtctaaaaaaaatataagtaaatgagatgaatatcttaattattaatgaaatataaaaataatataattgtaactatacttaaatatattttaaaaaattacacatatcagtcataaaaaaagtataaaaaggagtataatatagagtgtccttaatattcttataatttttataaatacctaaatatatattattttaatataaattaaaatttaacataatattatataaaaatataatatataatggaacttaagaatggcctgattcaaccttcaaagcaagtggtagtatatatcaaaagtatatataatggcgttccttctcatcgcacacatatgtcccacacttatgaagacatgtggcatatacatattacagaatatatagtgtggaaaggattaaagtcgatcagtaaaagtataggaactttatttcttctaatattatttgtgaaaatatgacaggataagacatgatatgaaatctggtactgcctttggtcggcctaactaatatgtatggcctatatgtaagtatcaatcagaggtgttgacttaataaatattttatagaagattatataaaaatagtgattatttatcggtatttttggtgtactaataaattgaaaatctaaagctattgaagttagcttagtggtaaagaaggaacgggaaaagagagaggtcatagatttgaattcaaaacttttaaactataagctattaattcattgtaaaatactattatgctacactcaaaaaaaattaaaaatctatgattcttattgtttataatatagttatagttagaattttttttttttttttaagaaattctgtagaaattaagatagtaaaataaggtacttacaaaaatactataaaatagaagaagacacgtgtctagcttggaagaatgaagatctaaaacacgcaatcgtaagtacacttaatgtggaataactcgttaaaagcacaatttgaaaattatgtttataactcaactggctggacagtcttatgcgagttaaaaatgtacaaactattaacttgtgtctcgacaagaaaccatataaatgcaagtgtgtatgacgaggcattaacctcgtcgcgtgaaggagatataataataatacttagcgcatataacacggcatacaaactaagtataagcagaggggtagatcaaggtgacagacagtgaggcgtctatctcgttgtaagatggcacgcacgcaagaaagatcatctcgacaccagaaactgtaattgtcagaattaaagtaaaatcaatatcaacctcgggaagttgtatgacgagcaccggctcgccatcaacgttaactcatccccatgagataaggcttactgcatatctttaatgtgcgctcatctctgccgaataaaagtgggacattcatagctgtgtgaattctaaataaaaaccgcatttacctagcatgatttgtaactcaaatcccgtgatttgagagaataattttgtaaagattacagttaactttgtaattaactgcttactatattattataaatagtgttaagtaagatgagatgggggacgaaaaaaaaaactcatacaagagaggtcctaaaaaataatcagaaatctgaataagattgactcgtggactatgcagaatttaactgcaaaatcacgtaaaaaaaaccctgtgttcacacttttatttttacagctttattttttctctgtgaaatcactactgtgagggtcaaatttggttaacaaaaatctgcgttaacagttggtactttcattgagagcctttgtgaaaaagctcagaaaaatcctcttatcataaaagtaatggatgacgccgaataaaataatcctcatgaaggtgttggaatatattttacnnnnnnntagatttactaacaagtatgattttaacatcctaaacatgaacttctaaaacgatatgaaataaatacataaaaggtatgagaaacctta

SEQ ID NO: 123445 - DNA, 798 bp, Cannabis sativa
agggcacaaaacccaacattttccccaccgccgattttaaagccaaccgacatgcctcagttttaccaatcaaggggtccacaaagtctataagcttggcagcaacccataaaactgtccctgaatgatcccttgccaaagccgccacacacatagagttgcagccgaccttaacatcgcatttgattttgatccagtctaccggaggaggggaccaactgggagacaccacagccaccactggttcaaacaaacaagacacataatctgtgtaacaaaaggagataaaatctatagcatgattaatgttactcgaggaattattatgtaccttttcattgcgggtcttccagattgtatccacaattatcgaagcatacaagaacaatctgtcagtatccactcctctagactttaagttccagataaatgtaacccaatcccagaccggggcaccagactcaagcaccggataaactccccaaggggaagatctccaaagatggtacgcgaagctgcaatataggaaaaggtgttccatcgtttcttcacccgccccacacagagggcaagttgtgtcttcaatgctcattctccgagagagaatagcacgagtcggcagggcacccgagagaatgctccaccaaagaactttatgcctctctagaatttttgagttctagagtttgttccatctagcagggacaacaacacaatcaggatctctctctaaagcttgaagcaagtaggcggacttagtagtaaagtgaccattggcctcttttgtccaaatccact

SEQ ID NO: 123446 - DNA, 859 bp, Cannabis sativa
taagtacttcatttgaaaaatggtttataaattaatgtacgtacgtgtctataaacaactgcctttagtaactttattgttgccacttctcatttggaatctggattaaggatcttacttgtctctatccatcagaaaatcatcatctgtttcattaaaaagaaaaatcatcaatcaatgtgactatccaaagagaaaacctgggaatgaaagtgaaattttaagcttcatcaatatatatagcccctcttttttgagtttctcaaaaaacatagtttcaaattcaatcctcaaaaataaatatggtactttatgacaaaattataaggccaaaaagaagagttagacattgtttatagatattataataataaaaaaggttgaaatataattggtcatttaattattttatttatacgaatagtgggattgtaatgtttcaatttttattacaaaatcatcaattgataattattgataggtggattttgaaaaatatttcatttaggttggaaacctaatttacttcccaagtgttcatttaagttgaaaacttaatttacttcacactttttttttgatacgattgatcgctgatggcttattaaatcattcactgaggttgttataatattattagggttttcttcctttttatagtaaacaatttagtatatgcatagtattattgttcactacaaatatctcacaataaaatttgtaattaaaaataaaaaattgtgactaattattaaaaataattgttatgttgtgattaaaaatttatggttaaatgtattagtcacaaaaatcacaatttgttaatgattaatatatttttagtcacaatacttgttgt

SEQ ID NO: 123447 - DNA, 556 bp, Cannabis sativa
aagagaagtaggataacttttagatggataacaaccttccaaagtcctgccctaggacctgaagctattccctcttctatgacatcaatgcaaaccaatgggtgcttgacatttggagcctgcttgcggacctgcgctcttgcaaacttaagtatttctcttgcctcccccagtgattccaacttgctagtcttgtgaagactagcaacccaaggtcttctacgctcaagaatctctagggcccatcgacgtgcagtacttactaactcatcaggtgaaactagtgcatcaacaagacccaaatcaaaagcttcttcccctttaaccggctttgatgtctaaatggacacattagggaggtgttaattagatttgtatttactcaacaagaaaagtttgactcttggaaaagttgttagatcaagcaaaaacaaaaacgctagccaaaagcataccagcatcatttcaagtgactttgtgagaccaacaagtcgaggcagtcgctgtgtgcctgagccattttacaagcattaatttgaaaaaattaaaaaaaaaa

SEQ ID NO: 123448 - DNA, 671 bp, Cannabis sativa
agatatacttacgcatctctttagggtcatcgatcgccacacagaagtcttgaagaggacttgggtcgtatgcacaagcaagatgagtagccaaagctaatgcagcgagtgccaaaaggaaatgagaagtcttcatacttatttaaaaaagagagtgttgtaataactaagttttgctgtgatgtgttaattacttggagatctttggtggtccgaacagggtatttatagatggggaagcaggaggagaacatgatggggtttttactgttttagtgaaaatgactcattcacttggaaatctagttaaagaaacctgagctggagtagttgggagtacctaccaatttttgattatttttttttttatttatcttataactagcttacatcaactatatgttataataagtatttaacaagataatatctgtgtatattatatattaatttgttatgtgtagtaattaggcatgagtttgtgttacaatacaacacagggactataataacaatatttcaatcgagtcgtgatgatatattactactgttgaaaattttataataattagttttctagggggctctactataattttagtacgagtaaatagcggcataagtatccaaaattttaagtttgtaaacggcataaatttaatatttatttt

SEQ ID NO: 123449 - DNA, 540 bp, Cannabis sativa
agtgttgatatctctttcctgtatacaacaagtatattcagcaaaataagtcagaaaacatgccacttatgcaacaagtcgataactactaaactccttttgattttcaatcacaggactggtcattgaccaaaaccacaaacagtacaatggtttatttatttaatttttaaaaaactagaatctccatctaaccctataataatatataagtaaccacgatagactcgaacctcagaacttgcgagagcaaactacatgcctggccatttgagctaccacctcttgtcttaagaggtgcaatggtttagttgattagagagcctgccctctttcaaaagactaccaaaaaatctaactctgtcaatatcttcctcatctaacagccacacaaacttgtagcagaataaactttgcaattagtcactcactgccttcccttttttttttaaaagcctcttcctaactgtagaaatatctttgtaaatagctttgtaaagttatatttagggtgtttttgacagcttagtttaggttgta

SEQ ID NO: 123450 - DNA, 804 bp, Cannabis sativa
tcggtttttttgacatggcggtcaattttggtttttgaaataaaaaaaatagttaaaccaaaaaactgccaaaactgcgaaaacccgtaataaaccgtccaaaactgccaaatcgaaaacccaccaaaaatcaccaaaaacagtacgatcagttttataccgttataatttctaaacggtcggttaaggtttttgtaaaataaaaaccgtaaccgaccagacggttataaaattataaaaactgaccataacaaatcgattttcacccctaggacgagctcccctacttgtttttaccatttcaaattcaatggtcgaatcagatttagcatttgagcaattgaaactagcacaccagattgattttcaaccttggtgataggcccaacagtaggtcaaattgggcgatgggccttgtttctagggtctctggttttgttttctccttaagtttgcttgaatcttcattattttttatgacaaaaaaattccatgaacatttttttaagaacttagttggaaaacgcccaggttgacaatatgtcaaccagtgccaggtgtcaacctgcgttgggtcccattttttacccttcgaaaagttctatttggtctccaaaaatatttgaatcttaatctttgctaaaaatgggaagattctcaggagagttctcagaaaagatcattgaaattagcccaaattgacaaaatgtcaacttgggcgttgggtcttgctttttaggggtgaaaatcaatcggttatggtcagttattacaattttataaccgaccggtcggttacggttt

SEQ ID NO: 123451 - DNA, 908 bp, Cannabis sativa
  modified_base (35)..(40): a, c, t, g, unknown or other
ttgtagaatcaccctataataataataataataannnnnntaataataataataataattgggtgattctacaatgcacccccttaaaagggatgtactagttgggtctaccaggagaaaatttgtataatctccacctttgccacttaggttggcgcgtacttataacttgtaatattttgaaaagtttttatttttattctgtattttaaaagtttaattttcgctcttggctctagtagattccggtttagtgggattagcatatgtttagtagcagtatgtggcgttccttttgttaggacgttgcatgaggccccaaacccaatgcccaggttgataatctgtcaatctgagcgccttccaagcatccaatcgaagatttgactttttctttgaatctgccttcatcaaaaatgaagaacatatccttctcgagaaaaagaaacaagctcttggcataaataacaaggcccatcgcccaggttgacacttggagctggccctaggcctaggttgacacttggggctggccctgcgcccaggttgacgtttcaacacttaggcatctcaaaggacttcccttggacgtttcaacacttttaaaacatccaggttgacgtcagatgtcaacttgggtgatggaatgtcaacttgggcgttggaacctaaactaccttcagtaaattgttcgtaactcactcaattttcattcgattgacatgactcaactagaattttgaagctatttaagccctctatcaagtcatgtctcgcacacctggcataattctgaagctatcgtcgccaaaatttaccccaagtgagttataaaaataagctctgggtaactcagagcggtacccgccagatataaaaaattagccatcactaccagaagctaattt

SEQ ID NO: 123452 - DNA, 1078 bp, Cannabis sativa
gacgtgggcgtcgtaaattcatgagtgattctaattactttatcaaaaaaaaaaaaaaaaaatcaaaaacaaattaagttgttaaaaggtgagttggttatttatttttaagaatttttggaagtatttgtggatattaaatacaaatctgactatacattgtgtccacgagtaagaccttgaacatgtgcatgtcatgtaaaacttttcttaccaattccattccactcatccactaccaataattactatttaatcaaaaactttgattcggtactcttcgcattgcatgtgtaattactaattagtgtgtgttttatcttttccatataacacgtttttttgcaaaaaaaaaaaaaaaaaaaactaaatcaaatcaaaaatcatcatcaaaattcaaaagcctacgatgagttgttcatcttattgtctttctcttttctgtcaatattgatattaataaaataattgaaagtagacaaatgctaattaaaagatagttagcactatttttcatggtcaagcataatttaatataataaattttatgaaatattactaattattcttaaagtgtcatttataaatacatgtgcttaactttaaaaaaaaaaaaactattttagttaattttttatttacaacataatgttattataattaaatatgatttttagtaataatgtgactaaaacatagtatttagatacaaattgttactaatttagttttagtcacaattgtaactaatacctttagtacgggccttttgatcacaaaataagaatgacgatttatatttagttataattttttcacttttaattataaattttattttaactaaaagtaaaaaaatttatagtgtaataacaatgctttttttaaaaaaataaaattcttcaaattactgaattgttagataatttaaggtatcatctatttttcacagttaactctcaacatgaactgcttatgtgcactctattacacgtgacacatttatattggtatacctaatattattatttaaaaattataaaaaattatttcgaaatttataatattttttattttt

SEQ ID NO: 123453 - DNA, 1021 bp, Cannabis sativa
tttaacggtcaaaaaaattcaaggacatgatttggtacatattaaaatttaggagacaaaaatcctaattagttttattttaatatgtaaaacaataaaaataatatatgcttcttaatttaatcttatagttaaatatactaataaaataatataaatattatgaatataaataagtaaatattttgataattttggcataaaattaaatatttgttacatcttctaagtgaaagtgagaatagttataaaggaaaagtgaaagtgagaataattagggtgtatccgggtgtagttaagtttggctctttgataaaatatttttgaagataaacggttgagatttaagatacacgtagactttggaacaggatagaattgctcggagctttaggagtgaaaaaggaaaagtgaatttgggtttgggtatattcggatactttggttttacacgtggtgggaatagtgtataaataaataccgtgttattaattttggtccttttcttttattttttatttagaaaaagaaaaattaaagtttctgcttttgtaggtaaaaaattagttaccgccgccaataaaatacaatttaaggcatcaaaataggaaataaatcatttaaataaaatcaagttgagattctagttgaaataactagacaaagctaaattattaaaagagcccattaaaagaaagagattgattaaaagaactagatagaggtaatgtcatatttggtttggtgtaatcataaccataatagaatcaccattacaattctatagtctcatttggtgtaatagaatcacctacaatgtaataattaacaccatccatataaataaagattacagctctaatggtgacctatgtaatcagtctacatgcatttatgtacaaataaaactacctttataccattctattacttcaaaaaaaaaaatgaagtaatgatatttttgttaatacactatttatttattatataattttattaatagcaattaattaaaatatga

SEQ ID NO: 123454 - DNA, 1176 bp, Cannabis sativa
aatatttcggaccctgaccttaattttagaccttaggatccataccctcaatctagacccgaacccgcaccttgactccgaacctgaaccttggaccccaaacttggactcgaaccctgaacctcgaacctagacttactttctctcaactcagtttcttatccaccatttaataaaaaagaactttatacatttttgtttgtgaaaattacatgaaatatgagtttttaaaagtttattacttaattaatagacgttcgtggcctcctttttcctctcccacggcgaagaagaaaagagtggttcaaaagctagtggcggttgtttttaatgttctagcggtggcggaggatctcctttcgatccaagatgagggttttgagcttcctacagaggaattccatgatccttgtgaagtttcggagaacgaacagggagcctctgaggttcgcgatgatgagaatgggatttgaatctctccaaaatctgtaagttgggcgaaggaggtggagaagatggattactagtccaatgcaaaggatgtatggagcaatttcaagtcgaatcaggttatgaccccctctactcatacgatcttacagaaacagtgtacatgtcgcaacctgaaggattcgttgatctcgcttatcctaatcatgcttgtaaattttccaagtctctttatggccttaaacagtaaccacgagcttggtttctcaagttgagtactgctattcttgaatggggttttattgcatctcaagcattcacatctctctttatattatgttcatctaatgctgtcattattctccttatatatgtggacgatatcatcgtgacgggttcttcctcctctgccattgccaccttactatcttttctcaactccaagtttcgggttaaggatcttggccagctgcatttttttcttggagttcaagttaacaagtctactcttggtcttcacttaactcaaacgaagtatattagagatcttctcaccaaaactcatctccttgactcgaatctggtttccactcccatgactctaactttgttgtcactatatgatggtgatccccttgaagatgtgactgcctattagagtcttgttggtgcattacagtaatgcactttgactcggcttgatatctccttcactgtcaacaaatt

SEQ ID NO: 123455 - DNA, 975 bp, Cannabis sativa
  modified_base (31)..(35): a, c, t, g, unknown or other
aaaacatgttttataactatttttatttttnnnnnttaaaaataaaaaacaaaagtgtattctataactttcattttcattgtaagttttcaactaagttgtgcccgagtggggttttgctctgtagcagttagactatttcttaaccgttctgctcccctgttcttcgtcttcttcgcctgtcctgccatgatctcctataaccaccatcctcttccaccaaatgctcttcacgtcttccattccctccaactcaactgttactatgtatcttctatttattcccctgaccaaagcatcttctccttattcctccgttttttataccctcttactgattgttttttgtttatggaatctcttattggtgaaatgtcttcaaaaattattttatctgaaaaagaaagggctactcatgtcctcactgagtctgatcttcaagttgcacacactaaccctcagtttttccttgtagcccgatgtctctctaatgcttttaatccaaaaacttttatgactcgaatgggggagttttggtctaagaaatgtcgatttgaggttactgtttctgagatgcactctgaactttacttacttactcttgtctgtgcaagtgataaatttcgacttttggaaggggagccttggcattacaacaactttctcatcattctacactcaccaactgttctacacaatgtctcaaaggaggatctcaacacagttcaattttgggtccaatgtcatcgccttccttttcttagcaagtcccgtgctcttgcttgtaagattggcgaatggattggtgaatatattgatgtctacgaagattcgctccatgagagttggggctcttttcttagagttcgtgttcggttggacattcaacaacctttaatgcgtggtaaactggtgaaactcccgcatattcatgacgaacattggttggaatttcgttatgaaaatctcccaatt

SEQ ID NO: 123456 - DNA, 1130 bp, Cannabis sativa
tatgccactaaaaaaaatcattgggtttatgccgcttacaaactcaaaattttgggtacttatgctatttacccttttgttaaataataatttagattctatgtttttcataaaataaactctaaactcaatttttagcaatttttttttttatataatcaacctgaagttattatctagcacaaacagatacaaaaatgtaaacttgaggtcaagttactattaaatttttatttgataaagatttgtatagttttaaaaacatagagttggaattatcatttaacaaatcaaaaaatctcattaataatttttacaaaatggatctaaaataatattatccctatatatttatattgtatattataattatatatgcattctatttgttttttggaattttttaaaataatttaatcaataatgtttaaaataatgtacaaataacatgttaccatattttttattaatttatttttatatgcgtgtaactcactactttaacatctataaaaaattggtagggttgatataactatcatgaacatcttcatcatatagaaaaatttaaattatatataaacaaaaatgtctctactaataagaacaaaatggatgcttcaatcattacattatctaacatataaaatattatatataaatgcatgattagcgctattattttttttagattaaattacacatattacatttatttaattaacaaaatcttattatggaattaagacttgaaaagaaaaaaaagtatcaaaccgctgtatcaatactaggtccggtatatttttaaatttaaattaaaggacgtagtatacacaccaataatataaatataacatctcaaactctttgtaataagtaaagatgcacattttccacatggagatggtgccccgcagggacccgcccttaatggggcgggaattccctgtctaaatggagaacgggcggggacggggatcaaattttatccccgaatgttaaacgggacggagatggggacggggatgacactccccgccacgacggggactcgtttaatttattaattatttttttattaatattttatattttataaatgcatttgtatttttttagtatattaatat

SEQ ID NO: 123457 - DNA, 1110 bp, Cannabis sativa
ttttattttttaatatataataaataagtaaatatagttttagtacaaataaatttattatattctttcaatcaaaacaatttttttttaaagttagattgtaccaactttagcttttacttatagcttctccataaattttttaaaaagctactttttgacggtttatctaacatatttttattctaactttttaaaaagcagtttttaactttttcaaaaattgtatcaaattggccctaaataagtagagagttagagaaactcaccaatataagatttttaacacaacttggatattgacgtcatcagtacctaattggttttatccataaacatattattattttttaaatcatataaacttattatatttaattaaatttattgctaaataaatatccaaattcaaaaaattacagtaaaaaaagaaaaaaaaattaaatggtttagactataagtagctattataaatattatttctattcaacgaattaaaaaaaatacataaagactaaactatacatgaattattaggtttttttttagagatttctttaattaagtataatacattcattaaaagttaacaaccaacaaataaaaataaaatttaaatatttttcttattatatatgaaatgcaatatgtttttaatatgtattacatgtaattagattagatcaatttttaattagattttcaaaatttcttccaaaaattaatctaatccaactagaatacaactactcacattcattccaatcttattttaactgaatgtctattttttttgtaattagattgaatttaattagttcggtgtaattggattggtttagtgtaattagatcataaatcatatcacaatcgctattgaagattgggaagagaaatttttaaaattaaggtaaaaacatttgattacaattagactcagtgtatcattaaactttatttatagaaacacaatatttaaaatattatttaactaaagagtaatttgcggcataaatacttaagtttaactcctagttgcaaataaatacttaagtttaattttcggcagtaataatacctaagttataattttgaaacttttgtaagtac

SEQ ID NO: 123458 - DNA, 2358 bp, Cannabis sativa
atatcatgaatctttaaataataaaaatattatataggtttgtgtatttgaattcgaagtcaataaaatttataatccttgatatgattctgatatgtacgtttaccaactcgtttttcaatattattattattattattatttagtttgattattctatttagttgattttgtaattgatggtatcattcatcaattcttgttgaaaattatatatataatcaactttaaagtgaacttggtttaaattaattcatgtgatcaaaacataagatgatattatatacgtattaattaataattagttataattaaggaaataaatagctagattgatttagacctaattataaataaaaggtaaacttaattatggaacatatctattatactaatgttaatgtggacacataaattataggagggctctatgaaaaatgtgatattatgtaaaattataaaaaaatttaggagccattaatttgtaaataaaaaataaaaactatatattttcatagaaatattagctatcctattttgtagtggaaaccctaagtatagagtggtctccgcatcaataaatggtgtcaataacattcttttgttttgagtggaaaataatggatgtacatatatatggtatagttgtacgtgaaaattaggagaaggtgacaattttattagattgtgcataactcttgtcatggtatcttaagagtcatatccctatcctagctagtaggcattccatctacaccaatcctaataggtgagcaaatggtcacttgtaactccgtacatatttcatgatactgaataaaaaatagtcaccatcttaagggaggggcggaatattttcaatcaaaaacccacccacaaggaaattaaacccgaccgacccaaacccaaaaaaatcgagcttaaaaaattagtggtcaggtttgggtaggagaaaagaatttcaaaacccgcgtgcaacgcacccaaaacccgcttgagaacccagtttgtttaattttttttttcttatgtatatatatatcgttggattatggaatttggtttgtttggactttggactttgttttttggacaatggattttagtttgttatagttgttggacttggattatagattaagattaattgaaaagtaattaaggattgtattgtatgtatgatagaaagagaaaaaaaaaaggaccttttaaagtgaaaaaagttgctaaaattttgtgtccttttatgaaaaaatgttaaaaaaaaagatatttaaaaaaaaaaaaagtggtttggcccaacccacccgaatttgaaaacccgaccacccacacagcgggtttggtacacataatctatacattcgaatctgaaaactcgaagcctgacaacacccactcgatgtgcaatcacacagattaaatgttaaaatattaagtattttctaataagatattgggattaaactcacttaatctgccaaaatcagtaagtctatcttttctcttatcagatgaatctagagaaagttgctgttagttataatagttggctttgtcaccaactcaaaatgagccccaccaacatcatactttagattcagagttaagtaatttagagagagagtccaatatcatagtgagtgtgtgtggaggatgtaatgagagtatcactcttgaagtgatttacctcatcgtgagacatttctttgtaataattcactgtgttgagttgtaatcttggacttattcaattgtgtactactgattattcctaatcaacaaagatccatgattcgtttattctcaagctaagtttattcttgtctaatttaagttttaatttttgattttgtgattggttttagattgaattgtgttttcttaaacattatgtaatgaccgtttgataccatctatttctccattggtataatattatccgctttgggcctaagccctcacggatttgtttttgactaccttcccaaaaggcctcattccaatgaagatagtgtttgcctcccctcagaagattacatatataaacctgaatccctcgattccaacactcaagatccccttgagtaagctagatgaatcccttcaccagctagattcgaaatatcccttcgaatataagaatccctcaattcaaccactcaagatccccttgaataagctagatgaatcccttcaccagcaagatttgaaatcccttcaaaccagatctgaacctccgacaactctagcagcaagcgtcaccatctttttgtttggcaatccgaggatacattcacacaactaattttgagttttggctctcataccacttgtaaggaccgtcagacaccatct

SEQ ID NO: 123459 - DNA, 963 bp, Cannabis sativa
  modified_base (62)..(77): a, c, t, g, unknown or other
tagataatcatatagagctcagaatgagctttccaacgatataaagaactcccaaatcggannnnnnnnnnnnnnnntatgaattttcaaagttcgacacaaaactgcctaaaaatcacgagggcgggtcgcgacatgcccaagccatgccgcggcacttgggacgaaacccaggttccaccaacaggggcgggccgcgacatgctccagagcatgccgcggcacctgggttccaaacccagaaaccagcaagcatgaacacgatttttagcaagagtttctaatcttttcaccccaaattctcaatcaaacactcaaattgcatgacacacacaaaactcatgcatctctttcaacaaagttcaagttcaagcatatggacttcaacctaaatacacccaaacttccagctgcaaactcaccaattaaaatagtttttccactagaaaaataccttatactcctactccaagatcaacaacataaattcccacaaagtcatgcaatttcatacacaattcatcaagactaaaacctaacacgaagaacatgcaactccacaatacaaaacatgctttacaacaaataaaatcagcaaggacttcaacaataatttctaaatcacttcaactagaaaatacctcaattccaagcttaaaatctttccaattccaagcttcaaagtcaagcaattcactccaaaactcaacaattttacttaaaattcaagaaagggttagagagggagagagggtcggttagagagagataagcacaaccagaaattaattttctctactctcaaaaattcaattaatcaaggtaaatcaatagtggtcaaaagaccaaaatgcccctatggccaaaactcacatttgcacccacacaagggtaattttgtcatttaatgcataaataactcacaattaatttcatattatcactcatcaaataaaattccaa

SEQ ID NO: 123460 - DNA, 1760 bp, Cannabis sativa
tgaaacaaggtacgtactgcgtttggaagccgaaaaacgtcgaggtttcagacgaacggcggaaaaagtgcagttcgacagggtcgtcgaggcggtggaagcttcgagatattttgagccggagcaggagtgtcggaaaggaagggcttctgtttgcgccatcgattaagaagctaggaagttcgaaacgcaccggaaaagaagagtcggcggcgattgcggcggagaatgaaaatttgaaaaacggcgccgtttccattgaaaacgacgaaggagagaagattaagaataaggatgaggaaaggaagagaactacgtacaaacaggattttgtggggtttttggctaatgttaatggtctcagtaggaatttgcatccattttgattttttttttaaaatttttttttttatatttattgggtgggttcattaaggtgatgattaatcttaatctcaaagctttgtacaattttaattatgataaaaagaaaaaacaaaatttgtatatgtgatttatgtgagtaccaaattactaattacaatattaaaaaaagaaaagataattattattatgtgaggtgatcagttggtgtgtttaagtaagaaaatgagtatatttcttctaattttcacgctggccttcatttttcttaatttttttttttttctattttgcgaaaatttaagataatatgtgctttgattcttaattctggagaaagaggaatattattattattggagatatgtgaatgcgtaatccttactggatagcatgacatgtgcattttttttttctttttttatgtttggcttttgtgtgggtctcacacgttaatagactaatgctaataggcgttgccaaaagaaatccattattttctaggcaaacttttccaagaaaattctatcctaattaatcatactaaatgaaaagtaagccttgaattgtataaatgaaattcaattagtaaaaccgacaaatttataaaactcaaaacaaaatgaaatttgaaatgatcatcacattatattattatgtatattgatcctttaccaaaaaaaatatatatatatatattatgtattgatagtttaacatatagtattatataatattataatgcgtttatatatgatatatatatttttcgatagaacaaaaaaaaacccaaaactccaccctaaaaaacaaaatttctgcaaaaataaaaataaaggaagaagagattcataacatatttatggcattaatcattagacagggccgaccctgagggtaggtgggctaggtgtgcgcctcagcccaaaattataaaaaagaaatattaatatatagataaaatattaaataagaagaaaatataataaaaatttagtgtagtggtaaaaggttttactttaaattaagagatcatgacatcaattttcaatctcttaagagtttttaaaaacattaccattacactaagtactagaattattattttcataatagttaaactatatataggggccccgaaatttaatttcgctctccatataccttaagaccgaccgtggcattaggtagtaatgaatgcaaaccatacttggcattttttgtttaagttcgagcacttatttatagatatatattgagataaacacatatatttatggaattttttcagtttcaaccaaaaaaaagtaacaatatcacaaaaatatttatagttggccaaataaacaaatatacatcccaactaaaaaaaatta

SEQ ID NO: 123461 - DNA, 825 bp, Cannabis sativa
ccattagaaagagagaattccccccccccctcttgtattactctcatttggctggtccctaatcatccccaattcactatcttgctgttcttcttgctccaggccctgaaaggcataatcaacctttaaggtttctttggtagcagcagtatctgcaactttatagccctttgtcacgtccataaacccaccttcatctatagtcttttgtttcaaccttttatcttccttcacaacccattcctgctttcccttggtattcttcctacatttctcggttgtatggcctaagcccgaacaatgactacaactcacaggtttccattcatatttgactcccacctgaacactgaacccatgttcattctcaaaatcaatgaaacctagaaattgttggtccatcttagcctcaattagaattctaggataattcaatctgtctctctcctttgtcactgaatccaccacaatcggtttccctatttgtcccacaatcttgaacaataatctttccccctagtatttcagatctaactcttcaagttggatccaaattgggacacattttatatcttctttcttgaaatttacattgggatcccacggtttcattatcacaggtcttctattaaagaagatatatcccccattaagtacctcatccctatcattcatcgagttaaacctgattatgaaaatcccaaatgatagcaatttcaccctatcaattttatccctccatactctcttagcaaactgtaacaccctaactaacataggcatattacgtgatttttaaacaagttgtgcagctcgttgctaatc

SEQ ID NO: 123462 - DNA, 1568 bp, Cannabis sativa
  modified_base (826)..(848): a, c, t, g, unknown or other
actgtagcgtgccttagcattagggcgttacactaccagaacctgtccaaaccacttcaaacttcataaggcacatatataacatacttacgtaatagaattaaaaatcgagcccttaattggcaaacaccactagtgttcggacttaagctataaaaatttccaaagtcaatttctaacataaaatcacctcaatttcgacaagaaaatatcggagctagtcccatgactactcgagaacaatcctataaggtcagaaccttcataactatcttagttcacaaaacccctatacaaaaccaatcgtttctaacttaaaacaaaattaaaccttaccttaagctttctcactctgagaattttctatcctgctactacccgagcatatattgctaggtttcagattgaaaattgagaaaaatagatataaagaaagaaggattcgtcaaaggagaataacgaggatttcattctattttgttcttcttattataaacttaatatatatatatattaaacttattgattaaactcataagtttcatatatatatatataaaaatagtattatataataatattaaaatataataataataatattaataaaaaatttattattcatagttatcttatcatttcttaactactaagaaatctaaatttctaaggcgctaagtcaaattccacatactcctaattatcccaatacctatattattaacttttcacaatattccaatccattccatcaattaaactcgttatgatatttttgacccccaatcgagtctacaagttcaccaaacctgaaaatatttttatnnnnnnnnnnnnnnnnnnnnnnntcacacatgctatataaatctctataacttataagttacgcttatttactcacttatagtgaatttaaaatttatgttgaattagattagtaggatcataatcctacttattacctgattaatccataatataattataaatcctaattacttaccgttaggcttattgggatattacagtgtgagattgaaagtatggccttagttttcaagaggccaggaccaagcagtagagtagcttttcaatgggggataccttgactcgaccccaataagacgcttgctgatgtagtagactgggtgttgtacgccttcttcctcatgcactagagcagcactggctacatgctcagtgatagccaagtagatgtatacttcttcaccatctgttgactttgacaggagaggcagcttggctagacgatgtttgagatcttggaagggttgctcgcattcatcagtcaattcaaacctcttcttgcttcatttaagtaaattaaagtagggaacacacatgtcttgacttgaagacaaacctactaagtgtagcaattcgtcttgtgaggctttgaacgtcttttatctctaatggtgacttcatgtcactactacaatatgggtctttagcttgcttttttttaacccattttataaaaagggaagctaaagggtgtcaaaatacccacctgattcgaaattgacatttagaggcgggttttt

SEQ ID NO: 123463 - DNA, 1061 bp, Cannabis sativa
  modified_base (59)..(61): a, c, t, g, unknown or other
aatcaagcgtaaaatagccctaaaactagaaacaaagagtgaaaactaaccgaaaatannncccaaaacttagactaattttagcctaacattttgccagcccattatctcaggggaatggtcaatataatttctttatttagacggttatactgaaccaataaactgttgataacgaccaaatatgcctccaagtgaatcagccttcaacatgttgggacctgtacaggacttaggagacgatctaaatcgtagaagaggaggtcaggatgaacatttcatcccttctaatgtttaaccaattaatgtggataactatgtgcttggtgaagttctaaggggtccacgagtgacacaggttgatcaacaggcatgttaagttgatccaatggtgcaagcccaattagattaacttaagagcctcgtacaaagcccgactggcccaaaactcactaacatagaacttgaccgaataagaggatcaccattctcactacaagtcaatgacctcgatctactgcacaagttcaaaatgttcgtatgaaaaatgtatacgggcaaagaagatccactctctcacatcaagtaatttgagatgcgaatggatttacaagttgtaacaggttatgtacggtgtataatttttccagctaccttggcggaggccgcccaatagtggtacttcaagttatccccaaggaagttcaatccatggaactcttttatggcagagttgcacaattatcctcctctaggcagctcctagatcaattagaggacctggttgaagtaaatcaaatacaggggagcctgtaaaggaatacctcagtagatttattaccaaggctacacaagtgaaggggttgactaaaaaggaagattggtcgctatcctaggaggaattgaacccttgggagaattgtggaaagatatcaagaggcttagtgtgggttcgatgggagaattcttagacagtgcagatgaatttataaagctcaaagaagtagttcggggagtagacatagttagccaaaaaatagttggatgagtgagagcatcat

SEQ ID NO: 123464 - DNA, 1921 bp, Cannabis sativa
tttgaaaaatgacacaaaattaaaataaattaagtatttttaattaaaataattttaccattaaaactataaaaatatttaattaaattaattttatgtacaccattaaaggcttaaaaatataaatttgagccttaatcaagaggctttccgatcactgcttttgtagcatacctgagcttcaaagtctaacagtagtttgctacgcgaaaagaaaaagttaacaagtagacgaagaccctaggactagaaatggaggagaacttaacattgtagtttgcgaaatctcaatatttaaaaattgacacatgtggacctcagacgttgaatatccaccctagagaatcagttgagttcggtgctatagtggattttcatgaataaacttgcacttgtggcttgttccaaatcatgaagtttctttgtccttatgcatgtactgcaactcagtaataaagtattagcatgtacgcattatgcttgccatagaaggatgcaaaatcaaaactgaatagacctaaaattatttgatgtggtccaataaatacccttattgttaattattcaaaaaattttaaaattttaaagaatgaaaaaaaaaatatgtttatatgtactaaatttcttaaccacataaatttttacaagttagtttctaaatattttttttaacgaattggcttctaaattttttatttattttttttgataatattaagttcccacaattaaataatagtagttttgttgatttttaattattcatttatttctacattaattctttatttattttttttttttaacacaacttataccaaaacctttacatatagtactaaaattctactattttagtaataattcaattcaacaccatattaatacctttgtggctaaagattgaccaaagaaatccaaaaggtgtagttatcaagccgaataatgcaaagtttttcaaactaaatatgggggacctttaagaatgatttagcgtaaagttttaagagtgatcaaatctcattttctgtgtacaattctttctctacttttttttttttaataaaattacagtaccaaacataacatttatacagagtgtttgataatatttttattttttaattttttaatcataaaatattgtgcttttaaaaaataaaattgtgttataaaatcacttttgctttcaattataaaagtaaaaaataaaagtgtgttctataactttcattttaatttttatttttaattttatttaagtcggatccatgcctgggtctggagacagggtcgtgtccaagtccaaaattggggttggagtcggagtctatgttccaccgtccagattggagttggagtccaaaatattaattaagaaaaaaaaactgtttaaaaaaattttaaaattaaaagtgcttttttttttttttcaaaatttttaaaattttaattcttaattaaaaaactaaaagtgaaaacaactttataaaacaagtttttgaaaaatattttaatttttttaaataaaaatttcaaaaattaattaaaaaagtattactaattacacccacaattattaaatcttattataaacactacaaataaaccctaaacactcacaacttttttttttcgataaaatcacaataaacataacatttatagtcaagggcggatgtatttgaagctctatagaggccatggcccctccaaactttccatatcttataattttctatttatatataatccatattttattattatatactatatggtggcccccacataaagttttagtaatggtttgtgttgaccgaggttttcggcaaccaatataataataataattaagagagctataaaggattaagagagagagttttatgtggttggggcattaatgagtcttagtcca

SEQ ID NO: 123465 - DNA, 1590 bp, Cannabis sativa
  modified_base (665)..(665): a, c, t, g, unknown or other
taattaataaataagttaaatgataattttatttgataattaattataattcttaaataaatatctaatacatttaaaggtttgaaattaaaaatatggtatttatgatagaaaagatatgttgttaaataaatggtaaaattgaaactagtggggcctattgcatggctggccacttaagggaatatttagccattattttatcttttttaattccatataatttaaaccctgaccctagaaggaatcctttaaatagaatatgagtggctcataacctcacaatccttcattagtctattctgtaataaaattgaaaatagagaggctcctctatattttttaattgtctctctcttctctcttgaaattttgaagttcctatagcgatagagtaccttgcccactcatttcaagtcagtactcaatcatagtgtaagattgtgaagaattccaacacctaaaggagatctaggttcggatcttattattactctatgacagaaaggaacaaaggttagagatctgaacggaaggaaccataagatttcgctgccaccaatgtaagattttctagaactttatatgtgtttaactcattgttttatgaaatttatgtttaggatattagattatagaatataatccaacatacatgttagtanatctagatcctggtaaaataacttccaattgtctcacctttcccatggggactagagtagtccgactgaatcctgtgagttgtgaaccacttggggagaggtcttgatcagtgagtccaatggaaataaaagcatctttaaataggaggtttactgaactcccattgtctactaaaatgtgggtgacaatcttgttggcgatgagagtttcaattacttggggttgtgatgagggaaacatgccatcttggcatcatcttccgaaaaggtaataggttcttccataagtcatggcctttgaactgagagttggttaacttcacatacctcttcttcatgatttagagctttggcagaatgcttcaactcattctgtgtagttcctccaatatgtggccctcctgagatcatgaataccctcccattctgtctagaaggttgttcagatgttggatgatgctgagaaaggacttctggagggacttgccaatctgggacttgagctggtgctccaaattgtccattcatgtgtggtaacctatctttgatccagtcgtaaaagtgacctagctttatcaggctctcaatttaatctttcaaattctttcattcattggtggtgtggccaatatcattatgatattcccatcttttattagggtatttccacgagctatcctcgtgcagaggagggagtctctaatagtgggtgttctgcctcgtggctaagtacgtgcattcttgggtgtccactaaatcagtatacttggaggtgtaacctttcttttacctcttgttctctgtctgtgtgctttctttttacgatctcttgcttttggagatgtgaggagcatctactgcacttgccgcaggaggtgcgaattcaaagggatattgcaaacttaccctaggagctaggttaccc

SEQ ID NO: 123466 - DNA, 2604 bp, Cannabis sativa
acgtgtcgagctgagaagaacaaatggctcaaacacgcaatcgtaagtacacttggcatggaacaactcgttagtaacataatttgtagagtatgtttataactcggttgtctgaatggtctgcgagacaaaaacgtacgaactgctaacttatgtatcgacgagaaaccatgagagtacaagtgtgcacgatgaggcttcaacctcggtgcgtgaaagagaaacgataacgataaaaacacttagcgtatattacatggtatacaaactaagtataaacagtatggtgaataaagatgacaaatagcgaggcatctatctcgctgtaagatggcatgcatgcgaggaagattatctcgacaccagaatatatagttgtcagagttgaaacaatattagtctcggaaagtctgatggccagcaactgctcgcatcaaagttaacccgactccatttctagcgaggtatccccacgagataaggcttaccatatatccttaaatgtgcattcatctcagcctaacaaaagtgggatacatacaactgtgtaaattatagttaaaaatctcatttacttagcgtgatttgtaatcaaaattccatgatttgagggaataattgatgtaattttgtaatttattgtccactatgtaattattttgccttagaaaattactgcatctattgataaaagttaaagggattttttatggggtgtaaatggaaatagaagtaagtttcatctcccgtcttgggagaaagtttgcctctcccaaaaatttggtggcattagtttctaagagggaaagaagtggaatgtagctatgatggcaaaattatgtggtctattgctagcaaacaagataatctttaggtaaaatgggtcaatgctatttacctaaaggaacaggacatttggtcgattcctctagaacaagatacgagttggtatttcaagaaattgttgaagctccatggattgactaataaaggcacttaaatcaagttgtttggaatggaaaatttaaggtgaataaatgctatacttttttgattgtagctgctaaagttgattatgcctttgctgtttggaacaaattaattgttccaaaacacttctaactcaggaccatttaaacaggatcatgataataccctcaaccttgtgttatgtttttgagtctgctcctgaaactcatacttggcctaaggacttctctgagcttcattagtggagttcaaaagctactattggtttgaagaatgttgtgctaaatgctattatttctgctgtcttttatctactgtgaaagaacagaaactgctgtatctttgattatgtttgtaacaatgctaaagcaattagcaagagaagctaagagtgttgtcaaggctagggtgatggggtttaacaaaggcacttgtaaaaaaggtgatcaatatgtaagggctgtccttgaaagttggtaatttttcttttacatcggtagcttcggctgctggcttttgtttgtattgtgtttctgttttgaatgaaagattccttctcttgttcaaaaaagaaaaaacaatatataggggtaaatggtaatataaataaaattgtttcgtactcaaattgtaggaaaaacgtacgatcatgtggtgcaaattttgatatgatatgtactatatttagttattgcatatttatttgttgtttaggagtttttactataattaattctcactttcaaatgactaaagaactaaaaaatgatattccaatgagcgaaatccctgatttgaaaaaatattttctatattgttggcaccatttcaacataatctataaatgcaactaaaaaaagaacaattcttttaattttaagaactattaatcgattaggggttgttttgctatgtttttagttttaaaaaatgttttttaaaagtgagaataaaaaattaaattttgtcatttttaaatatttaatggtgtttgactcatgttttttaaaattattttcagattttttttattaaaaaagaaattcaatattctacaccatataacgacatgaacccatagaccctaacccggacccaaaccttggaactcaaccccaaacttagacccgaaaagaccttgagttagggtttggactctgagtccgagtctaaggtagggtggggtggggtggggtgggatccggattaaggtccaggtgcgggcttcggtgttcgaggttcgaggttaagagttcaagtctgagtctgagtcctaatctaggtaggtttagaatccgaatatatgcataaaaatgtaataaagaatatgttagacaaaaaattaaaattatttttaaaaataaaagacaacattttaatattttctattttctttttagttttttaaaactcaattttaaaaaactgtatttaaaaaatttggtcaaatgctataattggtttttaaaagttatttcaaaacagaaaagaatttttaagtcaaacaggcccttagagcttgtttggctgtgttttcaatttttagttttttaaattatgttttcaaaagtgagaataaaaaacaatttttcgtcattttaaaaatttaatagt

SEQ ID NO: 123467 - DNA, 1420 bp, Cannabis sativa
tattcttgtatttagttgcaactgtcctcattatctttgactaaactttgaaaggcacgttttaacattagtcttgcggttactgtctaatctcatttatattccccactgtgcagctttatacagttaatgatgaacaagaaaccataattcgcaaaaccgcacatcttcttcaagtggcagaggtatcgtttcattatttttcaacttgaaaatattattactgctggttgatattagtgatattctattttctacaggaagaactgatgaaggtagaattggagactgctttactatctacaggtttgaactgggtaagaaagatcattatctgatattttgttatggcttttttactgccttaacttctgcttttgtcctctcctctccatagtcctttcaggacttgttgtgtttcttgtgcagcatcatagtagactgtcagtagctaaaatcatattttgaatattctggtagattgtgaacatcaaatagatccttgcatttgtatgttattgctttaatgtggttgttttgagtgaagctatatatttgctattatgtcttttatgactttgtaatcaggttccattggactggcttccacattgggtttcagctcattttgactgtttccaggtaaggatataaatatatattgttgatggcaaaaacttgtcaactaagaaatggtcggaaatttaagattgaagatgatattgaaaacttagactcaagaattagaatcaaaacataaaagaggaatgtttagaagtatattgcttgagagtattgtgtattacaaaattttccaaccatttcttacatctgagaatggggtatttataggctcttatggcttgggatacacatgtggtccccaagggacaagctggcctcatggggctgcaaatcgcaggtgtaggaggtggtctttcatcttgtactattgtcgggtgtaaggtggtcctgaattgcagaggtggtggatttagagtacctgctattgggacgtcaggaactgcaaacaaagtgtctccactatttgtaccctttcgtcaccttgtcatgctgaaggtgtggccgtactctgtttcgtacctttttgcgtgcatgtcttgtcgtttgattcctctcttaacggtcttctctccaacacttaggcaaactttgccttcatctctctcccgcaccctctccttttcgcactctctcctcgcattccttctctctcgcaccctcttctctctggccctcatctctctctctctctctctctctctcaccctcttctctctcgcaccccctctttcccgccctcatctctctctcactcatctctgttagcccaagatatgttttcaagaggggaggtgaattaaaaatttaaattaattttggtaaattaaaactttta

SEQ ID NO: 123468 - DNA, 1716 bp, Cannabis sativa
gggcacaaaacccaacacatacatatacatatattcattcaattatttattttttatctgattactttttataaataaaataaaaaatattttcaatttctgaacaaataaaatttagaaaaaaaaaaacacttatatatacatatagatttacttaaataatttaatttttaaaaattgtttgtaatttttgaaattaaaaagatatattgtaaaatagaaaaaataatcttaaaagaaatttaatctataaatatataaataataataagataattaatatttatttataaataaatttattctaagtagatataattttaaaaaatttattacttctaatagtataaataatatgttatatgttattatattttttaaaacaaaaaattcttattagataaaatattaatcaattacccataaaaaatactattttttgacgtattaaaatgacataataaaaacattactcgtaacctacatgatagcatttaaaataatttttaaaccatgcgagccttttaaatttaagttatttgtagaaaaaataatacatagttttatacttgtagtttattattttttttttttgcttatttatttaattttacaaataaaacttatagtgttcttttaaacaaattgaaaaacctcacaaaatttttaaaatagaatggaaaaatgtaaaattccacctaaactctttatgttaaaaaaatattagttaagatattagtaaatcacttacatattaaaaaatattgtgacaaaataaaaatgttatttatactttatatgtacaacacctaaaagagtatttaaacaatgtgatacatttattttggtaaattataaaaatatttttatttacaaatttaaatatatataaaaatttaaaaaattgtataaataatatattaaaaatagtaacatatttatatgtataaaaaatattaaaatagttatagttcatattgtattataaaaaaatatattattatgtatacatgtgcgtctttgtaaattttaaagaaaaattataaacaaagacaaaccatatataatttgtaaaaagattaattattaaaaatatataattatttatcaaaatatgaataataaattatttatatatatatattaaataaaacttaaaatttattgggtaagacataaatcaatcaccctttaaagaaaactattttttaagcaaagaaaagtagcataacaaaagtgtaatttataacctacgtggatgacactttaatggtttctaaatcatgcgggactttaaatttgtatgtgtagtagttttttcttaaaaaaatatatgaaaacattataaaattttaaaaatacaatgaaaaatctaggatgtcgcctagactttttttgtgcttccctttatatttatgtgtagatatagattatataaaaagaaaattattacttctatatatataattgattatttattagtataggttaagaatcacggggttcctcaattggtaatgactaatgagtaggggtatatgcataaatcgatccaatccaatgacaaccgaccgattcaatcacaactgaccgccaaatattagatatgcaattgtgatcggatcagattgaatgttatttatgaatatccaattggatcagatcagatgttggatggagtgtttaaaaatctaatacatccaacatccaattaaa

SEQ ID NO: 123469 - DNA, 1684 bp, Cannabis sativa
aataatccagtctattcttaaaccgaacataggattactttcagcataattcaatcttgtcctgtctagtccaatccttttcagtccaatcctgcgtaccaaacgagccctaagtttagtaataatgtagtctagagttattatcctagaatatatgaagataaaaaagcaatgatgtatagtaatatataatattgctaatcaaatgaaagcatgcattagggttattatcctcaataggtattattttgagcatgctttaatgtgttgtatgagtaatcaattagtatgcaagttagggttattaccctaaaacttcatatattagagtatatattgaaggtataaaaggtacgcatatatatatgtcaagagttatgtgtataagacataactgggttagacctagtaaacatcatcaggataaactactgaaagaacataatgtatggattatgtatatatgaatagggttatgcaggtaaggtataatcaggttagactcggtaactataaaccgagacaaaccctatactaaggccttattataaatagacgtgtgagcgtaacacgtgggtctatgctacatagacataaataggtgtctgatcgtaacacgtagatctatgtcaaatagacaataagtgcggcgacatcattaattatgtgatatatgtttactgtgtatattgatatttttactgtcttgctgggcttggctcatgggtgctctactgcaggaaagggtaaatctgctagtaatcaaccatgattgcttgagcttggcgatggattgtacatgtttgggccatactagaccaagcaggttggttctaccagcagatatattttgtattctcggatgttgtcgcttaggttggcatgtaaaataacttgtaataatttgcgaaaagttttatgagatcccaaaacatgttgcctttttgatttgattgtaaagtttaaattattgcaagttatgtttttatcccattgtcatcaaagtttacactatttttcgcgctcttattttctagtagtctcgatttagcaggattaggttatattactggttgtcgtagcgtgcctaattcttagggcattatagtagtagtgtcttatggattcttactctactagggcaaattcttcttttactttctttgttgcaggttgttcatggtgatagtatcttcaaggatgaagatacagtgagacctgagtattttaaagggagttcagatttaatgctgaaggaattttgacaagagtgaagcaaggagatcctggcttcatacgtgtaaagggacttagatcaataacttgcttttgtgatctaaatcttaggataaatgtttttaagaatcattgtctgtatgctttaattttcgaggagttttgaacttatttttgtaatttgactttaattcttagtaaatgttatttactctagtttagggaacctaagcactgaaatttatttctagaagaaagcttataaatgtgagtattcttgatttactttatgcatttaattcattttgattacttataattagcaatttttagtggcaatctattaagtttcagtctttaaactttttcaacttctatcaaattttcagattacaaatacaatggatatgtggaataatttaaaaaaaatatgaaaataacaaaaaaa

SEQ ID NO: 123470 - DNA, 1620 bp, Cannabis sativa
gttaatcaacatacttgtgaatagatctaagatcctggtaaaataatttccaacatcaccaacgtccaagtgaaaactaccaaatccaataccaaaaggtgtcgatcctccattaaagaattccttcaaacaagcaatcaaccaccccccaccatggccactgtcaaacccacaaacgggtcgacaagccatggtgccgaaagaggggaaaagaaacctcaattggcggcagactctcaaccctagagagaaacactagactccccttattattgtgtgtatataaattattttattatttacaaatttcatgcggtattttttcattatattttattttcaactcaaacttattttgtttgataaaagaaagaataaataaaatttttatttctaaactatgacactgatagaatttgttcccttaattatttattatttttttttttgtaagatattccccttaaactatgaaaatagctttaaatttgctcatttggtggcatttttagtatttttgcgaatatttttctgatataagacttatctgagactaatacactataattcgagagtctaggtaaaaaaatatttgcatagatagtgctataaggataaaatttaagagtgtatatgcgtaattttaaaattaattttttaatgtttaatgttcccatatttggttccaaccaatttaaattagttaaaatagactatcatactgtaaatatatatgtgtgactcatgagtacaataataaattatctcaaaaaatgaataaaatgcaacacgaagggatacatttgtactatagtttgagaaattgcttttttttttaataaaaaaataattaagagtaaaatgcgtcttaatttaaaggataagaatattgtttaattctaaaaaaaatgcaacaagtaaaaaaatgtggagatgacacaaaaaaacattggaagatgatgactatttacattagggaggtaagttgatatttggtctttttcctaaattcccaataaataattaatattaataaataagtgaaaggaacaaaagaaaaacatggaattattctttgcttgttggtgttacgttcaataaataaattgaagctaactcttggtgtccaagcaaatagaactaattattttttctatttttttttcattttataaactaaaaaacgagccaacttttgatgactatcttccaggttccaaaatctctttatacatgaaaaacaatttgtagttcacttttaagaagttataagttttggaaactttacataatacatttttttttctacaaatttccttttgtactatttgaattttagtgatttgccatctagtaaatttcgttggcttgaccttatttcccaagaatattaggattagcatcttcctttttttagtgatgaatctaccaatcgtaatactcatgctcatatggaaactaatcttcagtctcacaaataccaatgcaggactttttttcattgatttcccatttgatgcctaaaattctttttggctttgttgcatgtcatggctttagtataggaaatcatttgtaattacccagcagcaaggcactccaaaaaaaaaaaaaaaattg

SEQ ID NO: 123471 - DNA, 2099 bp, Cannabis sativa
  modified_base (1975)..(1990): a, c, t, g, unknown or other
cctcagtcgacccgaaggctcatcagaaggtcccttagtgaggcctctcaacctggaagacatatctgcaaaaagaaagtaacaaagtcagaaagcaagtcataaatattcaatgcaagacaagaatgtaagagatagcgttatcaactataaattaccatcatcatcagaatcctcaataactgccttgcccttgcctttagatgtaggcaagaggcgagcaaatccctcaaaagtctagcctccaagcttgatctagagagaagcatcaccaactgaacccctactagccaagcatcaacagagggccctctctttcctctctagattctaagctatacgagacaaaggcacgtcgtcatccaagtcaggaacttaaccatctccaggacaagctccctctgcaattggggctcgcacaactccaggagcaagagggtacaaaccatacttttggaatttggccacactggtcaacctgagtatgcttctcttatccacccaaagagacaagatgtggttcaccatatccctcatttacagtgtggggatagagcatttgaagaacagtacctgccagaactcgtagtgtccaatcctctgaaattcctaagcaataaagtacttcttggcgtacccaacaacttttgacatagttgcactattggtgtcacccaaccactggtagccaacttggctgaagttgaagtacccagtcctattctgcttcagagcagacttcagatcaaaataatatctgatctcataaggagtaggctaaggctagcttagctccctatataaaacaaacattgctgaaaggtacttgatacttttcaaggtgatttgtgttggacacatcccaaagtaagtagcaatgtcttggaagtatggatgaagcggcaacactgcccctgctcaatatgatactttgaccaagccaaccaaactaggggaagtcggttcaccctttgatctctatgaggtatctcacaatggacacccctcactaaaccactaacaagtaccttgccaaaagcatcaacatagatggtagaagcgagtgagacccaactgtctccctgtggtctagcatccagtatctcaggcttaaaagactataccaagatatgatccaagccaagcactgaaggcccaccaagcctgttcagaaaaataccatcagcttcgtaacgacccaaagggtagttggagaggacaaatacatatcctgtatctccttctcctaactatgcatcctcctcaagatcagactcagtatcgggactctcaaccccttagtcgacctcaggcacctcttcctggtcaacctctagattaacattaatgtgaagctgagtagcctcctctacaatcctgacctgaccccttgtagccaccctggctacatgggggtcacatggaggtgctctacaacaagtttattttgttctagccatgatcacaggataaccaagggacctacgtagctgtcacctcccttatccaacactcagaaccacctgcatagaagtaataaagggaggtgagcaacctgacaaagctacaaacacattcaagtcaatagtacccaaggataccttccaggtaaatcacaatgtacaagggcaattattgaccaagtaccgtcttaagtacacttacttagacatatagtaagtcttaagttatacaattgactataatggactcactatcgagccttatacagagttcctaaggggaatcacgcataagactacaattgtatatgcctccaaggtcgtcacgagaccctagccgaggtcaacaaagggtaaaaaattggctacccgcttggagccttggccagccagggtccttagccttagaggtcggctagctagaccccatgacccaatctagggctggccaagaatccattttccaggtataggctggctagcctatggggtatatgttgggttttatgccnnnnnnnnnnnnnnnntcatataatcagatttacttattgtagagggtgaaatctacaatacggaatttgggcaccagcaacctgtcaagaacaaagagagagacaaaagttcaattgggagcac

SEQ ID NO: 123472 - DNA, 777 bp, Cannabis sativa
atcaaaaagactcattgtcgttggctaatagcgaagtcaacactgttgatattaaataattaaatatcatgtcaaaatagtatcattcaactactcggatagattaatttgtccacatgttttctactgacaagtctaggaagttagtaattgcatcttaaagttagtttttttgtacatgttttcttttgttagcccgagtactatacatagaagcctataactaaccactattaatttttgtactgaacttaaaaatgtaatatgagagagttggaggagtgttaaagagtgtactctctgtatttgatcaatgcctctcatgtgagttgaattgtaatggcgcaaggctaatctctattgtctcagattgtaaaatcactttggagattcaatatagaaaccagccattgttgaaggctgctttatcatatcaatctctctctctctctctctctctattttattttagtttcattgtttagtttgattctcattcacttgagtgtattgattgaattcttcaaggctgagttcattgactcattcttctgtgtagttctcattcaaccactaaaatgacccctttcactataactttttatgcaccactcacttccatgtagatcatattcgtccattagatttttcattataactttttacgcagtagtcacaatcgttgtcttatcacttactctaggtgcatgacatgattactttcctatacacacaccatatatacccaaaaacaaaggaaaaatgctctttgatgat

SEQ ID NO: 123473 - DNA, 1286 bp, Cannabis sativa
aaataccgggtaagctgtgcaatcccacatcgcttggggaaggtcaagtgtgatgattctgagatttgttgagtgtctacattttaaacaaaaaaaaattataataactcatactagatttatttaattttgtgagtttttttaattgatttttttttttcaagttaatcacttttctcaaactaaaactcactaaataaaactcttaaaccaaacatgtgtcaagtagtgccattactcttttatctttgcttcttaattactcctccaagtgataacattatattaatgcacataagtagtgtcatattattcaagtagaaaaaagtgtatatagtgtcatattatttgatatatattttttctttttggctgaaatttatttatctataaattcaagtgtaataaagcagtcaaaatgcaggccttaccaaattattacttttaatagagttggcaaatggggaacaatcatgcatcattatatttttttggtaaacaacaaaaatgagaaagccccctttttgtggcttcatccttttgattagtcaaaaattaattattgacattaagaaattatatatatttatataattagtgagatatgtatagattcaaaaaactacaactttttttttttttttgaaaataaccctagctagagccctatccaatattacaatcatgaattaataacatgcatatataaatgtacatgtaagtgaattctatatagatatgcacataatatattaataattaattaattaattaccatataataagtatatatctatacatatatatattctcctctcacatggatgtggagcaagtcaatgtggggcttggttttgtcatcattaaaattagagaagttctcaaaattgtgtgactcacttatatatatatatgcagagagagacacaactttaatattagttgaatggtccaatcataaatatacatatacattaatctaaacatatataattatccctatatataataacaaaagtatatactaataattaatagagacctagctaattaattatatatatatatatatacatgattaccaatagcatattatatatatagtaataactaactaatcgattctattttggttacaggttataattaattttaatggcattatatatatggctactatataagttttaaggctatataaatcagctatacacagttatatatccatataatatatataccctcgaaatatatattaaatacatttatatatattaatattatta

SEQ ID NO: 123474 - DNA, 580 bp, Cannabis sativa
taagcaatattgccaattaatcgtgagacgctacctatgaaaagtgttgggcaccagtaatgctcaataacaatacttatacatcatagcaacataaaaactaattgccataatcaataaactcaatatattttttaataaaataatagcaatattatgattaaaaaagtatgttaaagtaagtcattaatgatgacaataaattaaataaaaaaatatacaataattatatgttaaatttgacataatgctataaaatatatcaaatttgactcattatttagcatgtatcaaatttaatacaagttatagtatacaattgaaaaagaattttttctataaaaatatcaaaatataacattacactacttatttaatatttcttggaaatactgtaaagggcaccattttctgtctaataggaaatcatttagctccatggttaaatttaacaactgttataatagaacaatccccaatacaagaaagggtattttacaattttttatacattattttaattaattacaaaatatgtgcaaaaaaaatttattatcattttctcatacatttttatata

SEQ ID NO: 123475 - DNA, 1704 bp, Cannabis sativa
atcggctagccttaccaccagcgtgatcgacagtccataatgtatttcatatttcaattttaaggaaatattttttagacttgactcatgtcttgagttacaaagcccttgaactgcagtcagatttatcctacgaaggacaactagttgagattcttgatagaaaggaaaaagttcttcgaaacaagaccatcgccttggtcaaggtgctctggaggaacaactaggtggaggaagccacttgggagttagagtctaacatgaagactcaatatccagagttgttcaggttagattttatggacgaaatccatttaatggggggataattgtaatgatcgcatttataatattgattagcaaaggcaactaacactaattactggtatttctataataaattatgaatttatttaattgtgggtcccattattaaaagtgggcattagagttatcatttctcaattcctgagattttattaaagtctaggtgtattatttgagttatatatgaacgatgttattgttacaatttttgctcggtgacaacggaaaatgcgatggatagatagtttgatcacatgggtaagtctagaatctcatttcttagtgggatgtatattgaggaaaaatagaatactatgtttaagaggggttatggtttttgagcattttacccctaagtttaggctatgagggcattttggtcattttgtcaaggagacttagtttgctattttagttgatgacagctggtgtttaagggtttattcagctagtattttagttcattaaggaaaataaggaattcaagagaaaataaaaaatttaagaaattcactctctttcccttctctctcttcgaaccagcaagaaccaaggaggaaccaactttttcttcttcatatttttggaattcagctgtgaattcaagtgttcttgaagttgaggtaacccctagatcatttgttctttgtttgttcaagctttgttggtggtttggagatgtgattttaagttttggtggatgttagggttagacatgtttggggttcagtttttaggtttattttaagttagtattgagttttggttgttgattttgttgtgttgtgatgaaattgagcaagtttgggtttggaaacccaaacttaggtctttaatggcatattttaactcaatgtgtgctttttagatttatttgttggaatatgttgtatatgccctatttaggtattctggaaggtttggtggcatttggataatttttgagtgagatttggagttgttgggaaaacctggtgcaaatcggttaaccagtttgccaggtcctataaaataagttaaccggtttaggcaaattccccgaacaactcactttcccaattcttgccaattttggtgtcttagttgggtgtttccctgtttcctaaggtattgtagttcccagtgataataacagaaccttgagttgtaggttcgggtatcccggattaggattttggcatgtgatttacccagttatattatgtgattagggcatccatccagcacgagatcaagtcggccaactcacttgaatctggaaaggcggtaagaactatgtatataatgtaatatgaatatgcatgcttatatgtttgttacactaccaacacttgtatggttatggtacagagcgcattgtgttgggttttatgccct

SEQ ID NO: 123476 - DNA, 677 bp, Cannabis sativa
cataaaggatacaagtgtcttagtcctaccggtcgtatatatttttctaggcatgttgttttcaatgaaaaggaatttccttttgctactggttttttaaacaattaccagtcacctcctgaaattaccatgaccgcaccatacacttggctcaaccttccacttgatagttcatccttttctcctacagagactcctcacacgaacactaatccctctcattcttcaccgtccagtgctgagttacccactgatgcaaatcatgcctgtcctcttgctgtaacatctcctcttccacctgcttccaacacggtttcaccatcaagcatcagtcctgactcttctattctgccacatgaatcgactgtgtcacctgattttccaccagcagctcccactccttcgactgatattgttccaccacagaatactcaaccttcccatccaatggttactcgtgctaaggctgggattttcaagcctcgcacctttcttggttctacttctagtatccctatgtactatgaacccgattctgttgctagtgcgcttcagcacgaggggtggaataatgcaatgtctgctgaatttgcagctttaaaaagaaatggtacttggatacttgttccgtatactgatgatatgaatgttgtaggctgcaagtgggtgtttaaagt

SEQ ID NO: 123477 - DNA, 866 bp, Cannabis sativa
ttagtctaaggatttacttagactgggaaaggtctctttttgaccttgatactgatatttgtggctttgttggtgtagggttaaaagggtaaaaatcctacatttataaatttcatactgtaatatattgtgttaagctttcattaatttttagcgataaagtattattaaagcggtagaatccttcaattacctgtttattaattaaacagatcatttttagattgatatgctagcttaactaaaaaattatatacattaattatccaatatttatttcaatcacacatttaacttgatggtataaagtagctgtaacatcattaactgtttctttggtcatcataggagtttcttattaatgatctatattgtattatgtttaacttggctttttatgtttctatagtattttggcatttatatacaaaggctaaaattaaatagatttggtgttcattattattactatttcctacatgttaaattcgacccaagaagtagtatcgtcagttttacttcttactatatatcataagtttatttaatcatcaacgtacttataaattcaaatggcatttggttgagagaaataaaaatataaaaataggaatggtaatgggaatgagaatagaaacggaatatgaaataaaatttaaaatgcataaaaaaaattgatgaataaattattaatttttttctcatcatgcattggaatggtctttccttccatttcaaaatggaattatcattccaccaaaataatagagaagccattctattagaatgacattctaacacaatgtttattaaaggggaatgggaatcaattgtataggattcattcccattcatttgtttactaa

SEQ ID NO: 123478 - DNA, 1705 bp, Cannabis sativa
gagtcattatattctgctgcaaccgatgtaaaattttctaaactgttatatgtttattttcattattttagagatattcatattaaggatgttaatcaacatacttgttagtaaacctagatcctagtaaaatattcccaatatatcatatctcctccacagtggtttgaccaccgtatcacctgaacaccacccgtgaccatcacaggacatggacgttgaaaggacgtccgcatgaaatccatgcatgcaatgagacgtgagtcttgtatggctcaagcgagcctactcgacccaagttttgatccatttcttcgtgtttgtttttttgtgctcctcttatggcctcaatggccactgctggcgtaggcggctgtcaagccgccgaccacagttgaccatggtgcccgatttggaacccgtatatatatattacagtatatatagtatatatattatgtatataatgtagatatataatatatatatgtgtatatatagtatatacactataaattatcaaaaaaaaatatttattataaataataaactattattttacgatatttatttagatttaaattcaaattaaataaatataattgatttttggtttaaaattcaaactcaaacctaaaactaaattaagacaaaagttatattaactcaaaataaataataaaaagtttatttaagaatgaattaattaaaattgttttaattaatttatggattattaaattttcttaaataaatatttatttaagaactaattaaatattttaattaattaaaacagtttaaaaggtctattaaattaaaagttaatttaataataattaattaaaattattttaattgatttatgggtttggaaaatatcttcaataaatagtttatttaagaataatataattaaattattttaattaatttagagggtttaagagatgacttaaacaaaaaaatttatttaagaataattaattaaaaatattttatattaattttgagatttacgacgatcctacaaaattacaaaaatgtcattgatgctatgattattagttttataatttagtttctaatttcaaaatttgtaaaattagataaacctaatttatactctattcatcgtcatttatatttattgttttaaataaatattcattaatagttgattaataacatggtcatgtattagtgaataacatatcatacatagaaatatcacacagttatataatcatgtatttcatagtagaaacatgatatattaatattgtcttatgtgtttatgtatttgccattttttgaaaccgaaagtatgtaaactagctaagatcaatttagacttaacttggtaatttaaaattaacctattatggcgcgtttactaaactgtaattagaataagcataatcaatgggagaaatgtatcagtttaaaatagaaaataatcaaaaataatattttattatgatgtttactaaactatccggaaagaaaaccagaatcttattattttgtttatataactaggaaaggtaatcggaatgctttaatttgataaaattgtcattattagaatgtaattattttttgttgatagatttttaaggggtatatttgtctttttttatttttaattaataaaattaaaattaaaataaattaagtaaggaaagggaaaggtattccctat

SEQ ID NO: 123479 - DNA, 2052 bp, Cannabis sativa
ggcataaaacccaacaaatagatgccctggattctgattattgttcttctttggttcctctttcttagcctgtggacagtctctaataaagtggcctaccataccacagtggaaacaagtcttagcccggcactcaccctgatggtgcttcttgcatttgggacactctagatatgatctaaaggtagacccgtgaccttgacgagcacctttgttttaccaaaactttctattacttcctggtgttccaaaagcttcaaacttacgtttgtgatccaggttgccactattggtccccttacttatactaccacccacactaggattcgatgtcgtgacagcatccttagttgcttgttctttaattacactagaaataaaatacaagtgtaaaaaccatttttgaacctagaaaaaaaataataaaaataatcaacatatttctcatcctccataaaaaataaaagcaaaacctgtaaaatcaaataattagggaacaccaaagataaaccacaatcatactcatgaccaagttaattttccaaaccgcgttcatagtaataacaaacaacaacagctataataataataataaacaatcaaaaaaaatgataaggtaggatattgtaaacattaaggaatatcttttttcttttttctctcctagttctttttttttgaaaaaaaaaagaaccttttctcctatgttagtttggagtaggagaacaaatctgactgctccttcacgacttcggcgacttcaaccacaaatcctctgacaattccgacagtaaatctgaagttgctgactggaagatgtctagacgagatacaagcattcgccgaagctaatagcggtgcgtgaggaactagatcgattgctggagctatcttcagctaccggagctaacaatgatcggagcaaaaatcggccgccgaagagagagaagaaaacagagagacggaggctgagagataaacaactttgaaacaattaaggtttgacttagaaataatacaaacatataaatatggtattcaaagctaataataacataaatatggcatagtacataccatatataagtctaaaaataaaaaaaattcttaaaaatagtcaaatttaaaactgtcatatttatgtaaaaatattttaaaatcttaatttgctctaaaaaaaagtctaaaaactaaaatatttcctaaaaagtggctaaatttaaaactgtcatatttttgtaataaaattttaaaaaaatcatattaagtgcatgctaaaacaaaatcatattaagtgtaatttccacaaattttaaattaatataggatgtgcatgtaaaacacagttgccccttgtgaacagggccagccgtgagttgaaatgggtcataggcaaaaataaaattttaggcccttactaattactataaagataaatgatatttttaaaaattattaaaaaaaatatatgtatatttttaaaaaaataatttttttatttgggcccctaaacatgggcctaacccgcctatgcctagggccggctctgcttgtgaacacacaaatccattagatggtgtgaattttgtactaaatttgacttaaatatgagtcaatgttatatttggtctaaattttacaattatgctctaatacattaggagtaaaattaactttatattttatagaaaagtgtaaaaaagtaaacaaaaatattaaatttggattaaaattgtataaatcctaaaaatgtataaataaaattataaaagttattaattacattaatgagcatcagtaaaagagtaaatgaaaattattgtggtataaaattttacatatataaaatttgatacaacttttaacatttattaaatttaaaccccatattatacactaccattcgagttcaattttatcaacataggctaaaaaattacttatatactgcactcgttgaaatgctccctgtaagtgtcgtgttttgtgtggcaaattagataatacttttgttcagtatttctgcaacagtatttgtttttctaacatctt

SEQ ID NO: 123480 - DNA, 581 bp, Cannabis sativa
ttaaataatcaaactgggaatattaaaatacggaatttcaacatttaaaaatattaagtattttagctaccatttactcgaatatttaaataaaataaaaatatcatacgaattattataataacaactaaaaaatgttgtactttaaaaatctttaataacttttttattatgtcatttattctgtttatatgacatttatgattaaaatgtcattatttattattaataacactatgtcacgacatttaaataaaaatgtcattttatataaatttttatgacattaaaaggaaaacgccctgaaagttttgttgtgaaaaatcttatttgttgtggtgtcaaaaccacaacaaaatcacagtcaacaacaatattaataaaggagcaacctgcccattttttagggtgtgagtttccggctcagatagagaatacagcagccatttcatgaagatacaacctcagaaaacaagagagaaaacagagagagttagagagttttcttttgtaataaaaccagaaaaataaaagatgaaaagagagaaaaagcttgagattacctactgaaattgtggcta

SEQ ID NO: 123481 - DNA, 823 bp, Cannabis sativa
aaataagtattattaaaaaaaacttgtatttagataaaacagatggtaccaaatgtgtcgagacccttgatttaatgatgttagttttaatgattaattttaatagaaaaaaaattattaaactaacaatctctgttaaatcgacatatttaatataagagagataagtatattttattttaatttttttaatattaaagtgtacttttaactttatggggtacaaataaaatttcatcttaaaaactttgagctcttttccatttgagatcctttccataatacttttagggtccatttggtacgtaggattggactgaaaatgattggactgaactggacaagattggattatgctgaaagtaatcctgtgtttggtttaagaatagactggactattttatttatttatttttttagacttctaacatgcccaaacactagattggataaattagtctgtctaatccaatctagtcttgcgtaccaaaagaactcctagtgttgatcaagcgcacagtcaatataataaaaataaaaagtatatatatttttcataaatatcttaaataaaaaaaaaattacaaaactacaaatttatagttttttaatatttttacaaattttaattttttttacaaaaaatatgaacgattgttttttttttttaagttgctgctagatgaaaaaaaacgtgaaataataacataaaaacaacattattttttttaaaaaaaaaaacaaaaataaaaacaaaatatgtaaaaaaaaaatccataaaaatgcctaaaaaaaagaatcatgcatatatatatactagcaa

SEQ ID NO: 123482 - DNA, 1854 bp, Cannabis sativa
ggagtatttataatcaatatacacgttattgacatcttacacaggctgaacaacaccctagcccactagaaacttccctaaaataaatcttcaatcagctctggaatttctaattctgtacctatagaatcgtgggcagtaagtacaactttccttttatagaaaaagaaagtttagctccagttttcttttaaagaaatctgatctaagaaaatgggaaattcacacaagatcggaatataccagctagttagataagaattaattgtgtaatcaaacttaccatttgtacctcaatttctataaatagaagctagacaactttccttcaaaaattagatacacaaaatatggacaccaatttaaacactccagccgaaaatatacgacaaataataaaatatttttgtcaattaaatatgcaaaaaatggaattaatagttattattttgcatagtcggctatagtatagctgacgattaaaatgttatagctgtcgatttggcataattgttatgaaagttttaacatgtaagtatacgtatcgttattaagtaataaactcatgtgagtaaggtcgaccccacaaggactgtagctaagtaccaaataattgaatctttatttctacttagcaaacaaattgtaatatcctactagcttaggcgcgctacagtaatttttaaattaccgtactaacctttgctaatttaaggatttagtgaaaaatgttattaaattttttttacaataaacataaactttactatatttacaaaatataaaatttacaaaatttgggatctcaaattcattttacaaaatacaaccaaacaaatggtagcgccaatcgactaacaaaaccgagctcatgatgtctcaaagatctgaacactttaggtctaaccatctagatatatgtacaatctttattatgctccagactcaccgttaatcagtttttgccttacctttacctacatagagaaagaatatatgtgagatgacagactcagtaagaaaagcataaatcataaacatataatctatcttgtaacctatgcacccatacacctaatcacaagtataactcgcgtccaatgcgtatgaatcttgaacgttctagacaatcaaaaactatacaacatgcactcagtacctcgaaggtactagtattagtagtgttgattatgaaaccaatcgatgtatcacatgcactttgtaccccaaaaatactagtttcagtagtatatattggtagcacgactaatcattgtaccacatgcacttagtactctaaaagtactagtgttggtaggattattaacctaacaaatcactgtaccacatgtactcgataccctagatatactagtgttggaaggattagtagcacaaaccaccgctataccacatgcactaatgttagtagaatgagtttgtacttcttgaaacatgcatgctaacatgtatatatgtccatcctttatactaatcttaccttacttttcgtaatcaggtttgccaatcaacccgagtggaaacactgctcaaagaatctgaggcccaaagtcacaatcatgcaaaacaggtaaacgaatctctaactcactttcgggaacttaaactcaaaactagaagttttcatatcaataaataacatgaaaatacaccattgccaacatgttgaactctctatagtcaatacacatacgaagtgttttgtcttccttcttaacaaataatttttggaagttgttttaccaggatctagattcactaatatgtatgtttgattatattctataatctaacatcctaaacatgaatttcctaaaacaatgaattaaacac

SEQ ID NO: 123483 - DNA, 795 bp, Cannabis sativa
acataattgttagtaaatctagattctggtaaaatattccaacaaacactaggagaacgactttgtgaggatgaagaataagattcaacatcatttaccgcattacgcggttgggcccttctttgtgggttgtatcgcttgggatcctcctcttgcggcacctcacggttagagtttcatgcaacttgttccctctgcgtaggctagttaaagttgagtccctcctgtccagacctgtgttctctacaagagcaattattagttcgtcacctactgtttgtaacctgggggttatctgaacgtatgtttggtactcgagggggacgtcgggtcctgacccttccattcaccttagcctgcaaagcttgcatttgctcttgcagggtcgtatactgggcggtggtcaattgaatgattcgctcagacaccacaaccggtgtgataggcaggaactgtcctacagtggctgtcggtgttgatgtttctccggcatgaacgagagttttaggaaattagttgaggggagtaacagtggtacatcccactcctccgttgatggtgtcgacatgtgttgttccattacatgggagtggaacattaattgttccaacattgaacgatccaatattgttatctccattcatctagtttccagccattatgattttcctctgaaatcaatagaaagttctttcccatagacgacaccaaatgttgttggaggaatttagacaacacccaataaaataatatatttaaaaatataaacaggattatgcgagtactcaacctaga

SEQ ID NO: 123484 - DNA, 1894 bp, Cannabis sativa
ggattggatcggatgacaaaattcaatatccaataaataattggattggatcggttgggtccaaatccattggatgtgatccaatgaacacccctacctgaagagagacaagagctacacattaatcaatggacaattttatttgaatatcgttcaacaaaatgtaaataaacattactaagattatttaaaaaaactcctttagtcatgaaccaacaaatcaaattctcaaggcatatgcaaattactctcgatagcttggacacaaactaagttgtccgtttccagtagaacttgatcccattggtgtctatctatccaacttaacacctctttgataccaataattttaactatttttggcttaatgtggcccctcttcccacgatgaaagcttccaggacttgaccaccattatcacgcactaagaaactcattctagaccaaccaactgattcaaataaagttccatcaacatttactttaatatgagaaataccaattaaagtctaatgcacaagagcacttacaacagtcgtaggtgaagacaaggaactatgagtccttaattgtgcatataaaaatttatcaagtagaggtctagctgaaagaacaataaaacctgttgttggtgacttatgttgccaaatgacatcattatgtgcacaccatattgcccacaccaccattgcttcttccaaagctccattaccaagcctagtcgtgcgctccataaaccatgcgtcaaaattaatatttgtccaattatggacatccacactacaagaaatgagactttttatcccacttttatatatgatttaaaataaaaaatggataaaaaagtatgttggaatattttatcccactttttaatttagcacttaatagatgaagatatatttaaggacaagggttgtgtttggtttgaccttaaaaaagaaaaattacacaataaaaatgagttaaagatgagtttttgaattaccaggaaaacaagtccctaatgggtgaggtattgacttttatcccactttggaacaaggaccttatttggctggtcctaaatattttttgtgtttctggcaagggacaagtggacacaagacagatgaccaaagcccatctatgggccctaaacaacaagaattgagccaagcccaatataaaagttggccttccgggaaggcaatcgtggtgcacaactaagtaagctttcgccaagtgcaatccgtattgggagaacttcaagttccgcgtagccgaagagacccattagcatgaatctggaggccaacagtagtttcccatttgtcaatctgcacagaataagagagttactttccacaaatctcggccagaagatcatatcaagctaaaagggaaactacctaaaagaaagatcgagtaattaattcacaattataggacacggtaatgacagcctgatcatgttcaaccttcctagtctgcacaccgatcacctcatgggctgggcctcacaaatacaaccctagcttgtgtatttttcatgtaaactccccattaaagggagagggaaactaagtgtaattcctgtaaactctacaattacccaacaaatccttcaaattaagggttaaattctcttgcaatatttgctcagggaaaaacagagaacatatacgcattgtatttccaaaggcttttctagctaaaatacataataatatcgactcatggagtaaggctctttaatgccccaactacgtaaaaaactctaagtgttgttctgtttctctctttgaagtatttatttattcagttctaatttcttataattattttctaaaaatctcagtaaatatttgttagaaatattttactaggatctagatttactaaaaagtatatt

SEQ ID NO: 123485 - DNA, 1325 bp, Cannabis sativa
ttgttggatcgaatgcccacccctagtttacattggattagattggactgtattattttatattttcaatccaacccaacatagttgacccgctcattttacagttcaacttaaaccaattgaaccttaaacccaattaaaactagacttgtcaactttaggtttgattgggttaggtagatcagcccacttatttttttttacatcgtatactatagggataatgggataattctatagatatgagaaaaataaagttaatttagataaatatggtaaggaaacttaataggaaaaaatatagtatttaaaagaaaaacttaacatttaacatatatgagattgaattactataaaagatattaaaatttagacacaaatagacaattttcttgccttacttatttatgtcgatgacattatagttgccactaacgatttgaatgaactaacactatttaaaaagtctcttgatgctcagttcaaattaaaggaccttggcatcttaagattttttcttggactggaaatagctcgatgtaaaaaaggcatctaagtttctcatagacctcttacacttcaactcctacaagagtctggccacctaggcaccaaacttgcctcaacaccaatggaacctaacctaaaactccacaaagattcgggcacacttctcagtgatccaacacaatacagaagcctcattggcaagcttacctaccatacaatcacaatgcttgacattagttatgctgtcaacaagctcatgcagtacattcaaacacctcgacaaccacacttagatgttgcctgtagaatcctgcagtacttgaaagattccctcgaccaaggcttgttctttcatgcaataactccaacaaaattatccttacaagcctttgctgatgcagatcggggtgcttgcctctctggttattgtgttttcttaggacgctccctcatctcatggaaatcaaagaagcaacaaactgtttttcgatcctctgctgaagcaacatgtgaactcacatggatcatcacaatactcaaagacttttagatcaatatctctcttcctactcttttgttctgcgacaatagtgctgcatgttacgaaaaatatatttaactacgcaagtgcacgtaatcaagtagtactcacacatgtaaggtcgatcccacatggaattgaactgaataccacatgcaaacaataatttttgtgacaataaagattaagaaatacaataaaataaaattaagcaataaaaatgtatttaatcaaggatgagaaattagggaaaagaatcatgttgatttaatta

SEQ ID NO: 123486 - DNA, 1739 bp, Cannabis sativa
gggggggggggtgaaagaatattcggaacactacattccaaatacaatatggccattacgagtttttggtaatgtcattcggattgacaaatacaccaacgacctttatgggcctcatgaacagagtaatcaaggatttccttgataactgtgttatagtgcttatcgacgacatccttgtgtattctttgacagaaaatgaacattagcaacatcttcaaatggtgtcggaagtatcctttttacggcacatagtcggaaagatagaatcatggttgatcagggaaaaagcgagtcagttaaaagttggctgaggccaagaagagtgatggaggtgcaaagttttctcgggttagtaggacattatttgcattttttttcgaagtattatctaaaaatctcaatgccactaactgagttaactaaaagaaccaatggtttgcatggcttaacatctgtgaaataaatttttaggagttcaaggaaagataaattacaacattggtgttaaccttgccatcagaccaagaagagttgttgttactgtgatgcatccaaatagggtccgggatgcgttctgatgcatgccaatagggttatagcttatgcctctcatcaactgtaggaatatgaggcaaagacggtgacaagaataagttaaagattatgattacagatgcttagagcagaaaaagtcccgggtaggttttcaatacatagctcctcagttaggcacaaaaatgattaaggctgaaattgaatttgtgattgggaaatcacacaacttgacacttcaaatcagatttgttgaaaaggatcagaaagatgcaattggaagatcctaaactatttacaatttgagatgaggtattggtcagtcagtctaaggactttccgatttcaaataatgaaatgacactttataaagcttgggtttgtgttcctgataatggtgagcttggaaagggaatccttgatggagctcacactacacctgattcgttacacccgggaacaaccaagaggtgttaggatttgaaaccctattattgatggtgtgggatgataaaagatgtagtggattatatgattaaatgtttggtatgtcaacaaattaaagttgaagatcagaggccggcagggttactgcaacctttagcacttcttgagtagaagtgggaagatattacaatggacttcgtggttggtttgcgtataaccacgggaatatatgactcagtatgggtcatagtggaccatttcacgaagtcagcacattttctatcgataatgacaacctatgcagtggatcaatatgcagagttgtatgtgaaggagatagttcgtctccatggagctcctaaatctattattttagacagagatcaaaagtttacatcaaaaaatttggcaagtcttcagagagctgtgtgaacgaagttgaggttcaatatagcttttcaccctcaaactgatgggcaatcagagggatccatttagatattagaagatttactgcgacatggactttgagggttcatgcaataaatacttgcctttgatagaattttcctacaacaacatctataaaagtacaatagggatggccccctatgaaatgttgtatagtaggaagtatttagatcccgagttagttcaaaggactaatgaagcaatagacaagatcagggcttgaatgcttgctttgcaagcaggcagaaaagttatgctgatccgaa

SEQ ID NO: 123487 - DNA, 1732 bp, Cannabis sativa
  modified_base (26)..(42): a, c, t, g, unknown or other
  modified_base (1703)..(1706): a, c, t, g, unknown or other
ataaatcacttcaaatttcttatatnnnnnnnnnnnnnnnnngtaatgggttttatttagggcacaaaatctaacacatgtaacatatggctctcgtttaccataaaataacctatgtgccccccaagtgatcaaagaagtaccttcattggtcactttcaataccaaattcgcttaggccttcttgatcatgagtcttaggttggtgttacgtgtgtgagaactctccacttatctgaagattcatggggtggccatgttgaactcactaaagaaacaatcaaagttctctcaagaccaactcacaacctttactcagtgtttgagagcgtcatcaggtttgtgagctataaatgattaattttaatgaagtatttttgtaagaaaaatttatgtatacgcaagttcacacaatcaacaacatgtaatataatgataagttgagtatcgtctctatagggattgcaatttaaaatagatgtaaaatcaactagttaaaaacttagtcttttgtaaaaagaaaaaaaaaataaacaaaaacggatggatgattgatgaatgcaaaataaattggtgacaattaaaacatgcttaaaataagacaacaaacactgaaaaattaactacaaggaaaagtatcgatggaatggtagacttgaataactaattcttcctatgttaaacctacccaattttgacagcattacctcagaaaagttgcacagagttacaataattcacaatatgttagtgacgtttttccaaacctcactaatacaattctaccacttaatttcatataatcctacattaaatcaggttgtagaacatcatttaaaaaccaattttcaagttttgcaaggtaataaaatattcttatcttactcactaagaagaacctaaatatggtaattcacttgcatcatccaagttgaatccactagatccaacctttccagaatgagatctagcttagtaaaattgctattcatgtccagttaataacaatcaaaaaacagtaagctcacttgaatgaacaaaggcaaaattgctaaaaccatgcagaaaattagtcatgttgttgccctaaaatttggccaaccaaaagcggggtcgtatttattactgacgcttgccacaataagaataaaaaagtaaatgagaaacaagattttatagaggattatcccccttagttagtaggtaatgacctactccccttttggttgtattaataccaaagataataccgctcagatcacaaaggttgtggaatcggaagtggctctcttaagattacaatgtgagaattaagttagaaaatcataagagagatccaagggcgtgtgagagagaagagaagagagagtttgagtttcagacttagagctcgagagcttggagactttgaacttagggaattagggttacgctagtgctatttatataggagagcttacatgaagattaacaactaacatcccttaaaaatacaaaaataaagccttattcacataattaaataataaaaactaaatgggataattatccctcaagaatagggaagtttttgatattttccccctatttttgtgggctgttaaagcccaaattgcaacttagcttgctgtccctggatgaaggttgtgcaccaaaggcgaaccaggtgtagtgtaataccctagaattaagaaatggattannnnaaccctaattagataattatgaataa

SEQ ID NO: 123488 - DNA, 1435 bp, Cannabis sativa
  modified_base (1322)..(1337): a, c, t, g, unknown or other
  modified_base (1387)..(1409): a, c, t, g, unknown or other
aaatagtttcttttgatgttagtcgactcccatgggttcgaccttgcacttacatgaacactatattccaaaacgattcgtgcacttgcgagtataaatattaaaacactcatttttgggtacaacaagtctcgagatcgtctgacaccctcctcttggtaatgacctctgtcatatgaggattgctagaagagctatcccaactcttttttcagtgcgagccatagcgggtaacatgtcgggcagttttgcggtggttatagaagtctccgccaaggggagctccctatatgggtcaatgggcacccctactggaatgttggtctcaccggaaggaagagggtgtgtccactctcgaggaaaataagattgtatcccctttccaagctcccagatgtgcctgttttacgcttcaccacctatcgtctctcgatagaggtggttgggcgtttccaactcactactagaccccttgtccccagacgagttgtgcgagggtgaggctggacaatcttcgaacaaaagttgaaggagatcatcgtctactcgattctcacctccccaataatcgctataacgcatctataaaatgaaaaaagtgaggaggtgagtacaccgagtaatgctagtaggttatccatgatggactcacctacaagtacaaaataaaaggggaagggaaacatgcacaacaaaaatttacaacaagacaacaattcatgtagctaaatggagggagcaataatgataattacacacttaaaatttttactaagtgtaataagcaaaaacaacacatagaagcatatatttaagaccctgagaggtagacaaacgacaatcgtctccaattcacaaattctcgctatggttgtcacggagcttacaccccgatcacccatgaaggagtctcgggtagtacaccccgacccctcgtggggtgatctcggggtgacacaccccgaccccctcatggtggtcacaggggtggtactaccccaactctcgacccaactaaaacaaatgttacttaggggtgcataccccgacccccaatggggctctcgcagggtctggttgcaacatggggtactacaatcttctccctctgtagattgaaaacccttccaaaagaaatggttaaaccaaaaccaacaacaggaatagagagcaagaaaggctatatatttatgtaaaaaaggaatgcaacttgtctttgacaataaacaaaaaaaaaagtcaaacgagagcagctagcttatgctttgatctatttcataaacaactttaaatgaacttgttgttgggttttgtaccctaannnnnnnnnnnnnnnntataatcagatttacttatttataaagatcaaaaataacattttatgttnnnnnnnnnnnnnnnnnnnnnnnatgattatatttaatgtataaattct

SEQ ID NO: 123489 - DNA, 1570 bp, Cannabis sativa
aaggatgttatcagtaattttcctgcctttcagaaaagcactttgattaaggctaatgatggaatggagaacgttcttaagtctattagcaagaactttggataggcacttgtaaagggtattacagagacttatggggcggaaatcacgaactgttttggggtttttcttcttgggaatgagaaccagaacagtgtcatttatcaatgagatgtccccattgtgattgagtatttgcagaagagcactacaaaggtcagacccaagaatatgccagtttttctggtaaaagagagagttcagcccaccaggaccgggagctttgtcactagaaagactgaacatagcctggttgatttcaagttcagtgaaaccctcagagaaataagcaatttgagaagaggaaagagtggctgtgattccactgagaatggaattaatggctatatcactaataccttgggtatggaaaagatgagtctaaaaatttagaaactgggaaaaaatggtaggagagtcctgagcaatcgagccatcagcaagggtaagactgcggacaaagttattcttcttccggatggtggctttatgatgaaatttttttgtatttttgtcaccagcgcgatgccaatccactcgagatctttgctgccagtaaatttcatcttttagaagcagcctatctaactcagattgaaaatacacagcctgttgagaagattgagaagtaggttgagagtcatttaagagccgatgcaactcaacttgggttctggagatttgaattttaagaggatattgagatttactccaactcttaatatcagtgagacaattcgattgcttactcaggaagttttgaagaggagaggaaatggaagtaacaggagtacaccaggaagaatggacaatatcattgaaagaaggatcattaagccaaaaaatttccatatggaaacgagaggacctatgggatgacataggagtatcttcaagctgaactttgagaactctatgatcagatccatagaaccccaaatggaagagaaaacactattgatattaacgtatctatacgaaggttccaaaaagtagtgtaaaatttggcacaaaatttgctatgatgtaaaatttacaccacaataaatgtattactttttatttacatttatatcatgtgtattagtttattaatatattaaactatgacataaattatgaaatatttatattattttcttattgtcttacatattaaaataataataaaattgattataaattattagtttttattttttaataaaatattaattagatattaaattttatatcaaaattttgcgattctaaaatttgatgtaaatttagcacaaaactactttttgtgccaaataaagcacaatttttacatctcctattggagagagtcatagttagtataattgtatttaacaacgaggaatgctaaaaaagtactagtggtacctagcaccatcctatacgtgtcaatatcgttattgttctaattaagtatcggatcccataaagtttaatataataattttta

SEQ ID NO: 123490 - DNA, 1977 bp, Cannabis sativa
ttttaatgacattaaaagttcagagggcatgatttggtacatgtcaaagttcagggagcaaaaatcgtaattagccacaatttatttattaaaaaaataaatagcatcaatgctactgcatattatccatgcaaatttctagaatgacatttatatatctctctctaatggtataatattttaatattttaccacctaatatgtccacctcagcaagcatcctctaaattttaccattggagatgctcttaggattcattctttatttaagataaaaatataacattttaaaatatctttaatatattgctaatatatataaatattatatatatatatcttttttttttagtaaagggattttcttctcaaaaataaaaatgcattatttaaaaaaataataaatattattatatatattttttataagtaacaaatattatacttaatacaatatttttaaaaattactctaatatatagggtaatagtaatattttttagtgcaaaatgataaaaaaaattatcaaaataatataaataaattaaatatttcaaaaacaaataactaatgagaatattataacttaaaaagttaatgaatcataacttaaataaaaaatatatttattaattattatgtgtcttctcaaatttataaacggttaacatatgacaaaatttttgacatattttttttacaaaagtgcttaaatagatagcaccttaagttaacttatgtggcgagaaaaattatttgttatatatagataaaaaagttaaaattgatattatgccaaaacttaaataatatttattttaaatttttgtaaaacaaaaagaacttattttaaatttcgttgtaggtctatcaacaccttgagacagccctgaccactataggaatattgaaaatgcttactacatatttaaaggtaaaagaagggggattaagataaatttttatatttcaatccatagattaaggagagggaaaaaactaatgactcctatgaactatggtaattaggtcccaaggctaattaagttctaggtagtaacaaaattgttggattattctagaagaaaatgtggtatttttaaaaattatttaaaaaatagggtaatttttatttatatataaatactgtttaatattaccaaaaatatgaaaaaatataagtacataattatatacaattttatgaatacttacaaaatatatgtttataattttaactattgattacgttcaatatattttttaaaaaataaagaataaacacataaagttaaatatataaatataaaaattaatatttatacaaattaacataaagttaaatatattactaaaacaatgtgtaattttttgttaaagaaaaaagttaataataaaaatggctgcgaacaagttatcgaatacctgacaattaatcaataactagtaactgagagaacaggtataaattggttactatgacatctatttccgttatatacatagtaactcataactgattattgtgtcgtgtttctaaaaattttgaaaatacaattatttttacatttatttatttgtatcttttttatctaaaaattttgaaaatacatttacattttaaaaaaaaaaaccattccaaaagaaaagtctcatacttatcatgggcctcattgagcaacgctcctgtgatccaatataatgggcctctattctacaataagtctcaaagcccacaaaaaatacactgttcaacaacacacattgacttccacataatatgaaaaatacggatggtaaaatcataattaaatacaaagtgaaatttatagttttttttttggtgtgactgtataaatatgtatcttatattcaatgtggctatataacacaaggcgtttggttaggaagaatgaaaatataggaataggaatgagaatgggaataggaatatgaatagaatggaataaaatttaa

SEQ ID NO: 123491 - DNA, 1896 bp, Cannabis sativa
taaaataatttccaacagcaaagcccgcttgctcctccaaaacggaagcatccacacgattacaacagacatcaagttgcagatgttggtgaggtttctccccgcccaacccaggattaatatcagtaaaagttgaatagtgagtcgattgaaactcactatatctacgcatacaatccgcatatatatcctctaaactgccacttctgtcattgtgcaccatttcattgcgccatctccagatcgtatcccaaacgcaagcagcgaataaagctaaattatcatctttaaggccacaccactactcaccacagtccttgagagaatcccacttcagaccatcactcctcaaaccccaaaagcttctaaaccaaatgtcgcggaccacatgacacttgaaaaaaagatgcagcgaagtttcttcacaggacaaacaaaacctacacttcaagtgatctccgctacatagaccgattctgcccttcgtaggaatacaatccgagaaaatcttccagcataaaagctgaagccgaggatgaattttcgatgtccataattttccccacatatcacttgtttcattgaacctatgactctgacttagccaataagcgcttttcaccaagaaaatgcccgactttgaagctttccaaaacaaaacaacagccccttcaggaagaggtttaatccgaagaatctcatcagcacttctaggattaaagcactctctgatcagttgttcattccaaacacgccttcctctaacaaataaatcattgatttgccagcaggcttggttacaactcaaattaaaccgcgatttcaactcctccatcctcctatggggcacccacggtctatcccaaatctcattacttccatccgcaacaatcaagccagcaccttctaaacagatttggcgcgctgccagaatactcttccaaccccgcaaatctacctctttcttttccactgaccagggagagagcagcctgcaatatttatcactaagaacccgaacccacaacttgtcctccccttttagaaccatccaaaacaacttggcaaaaagagcaacattcacatccgtcattcttctaaatcccaaacccccacacttcttaggctgacaaagctcattccagttctttaaggcacagtatctagacttcttagagttacctttccaccaaaatctagcaaggatcttgtcaaggtcaccacagaaagtttttggcaaaagagaagttcacataaagtaatttgggatagtttataatacagaactaaccaaaactgacctccccgcttgggccaaatgtctcgctttccatccttccaacttgcacaagattttttccttaaggaaattataatcacgtcttttactagcagagaaaaagaacggatttcccagatatttctcacttgacttcaaacaattaatgcccaatctttgttttatctcgtcacgacaagttctagcagtattgtgagagaagataaaaccttttttctgtttgttaaccctctgaccagaccagccttcataagtactaatacatttcatcaagttatccaaattggcgacagtggcattgcaaaaaaatatagagtcatctgcatactgcaggtgcgaaatttggatcgaatttctagcaatacgcaccccaaaaattggaccattactcttggctttgataatgagtttggatagcacctcgttgcacaaaatgaaaataaatggggagagcggatcgccttgtcgaataccccttttaggattgaagggagctagaggagccccattaagcaacacagaaaaacagaccgttgtgatacactgcattaacagattactataacgccctaatgctaaggcacgctatagtgctt

SEQ ID NO: 123492 - DNA, 1913 bp, Cannabis sativa
gcagtccctctgaggcggaggaagaggaggcggttccaccaccaaactatgggggatacaatgaggcttgggagctagtcaatgttgatggggacgtctttgttgaaggcgtgcactacgtaagtgaggaacttacagctgcggttcctcataaaaggcaaggtacctttggtgccaggtggttgagccctccgtccaaggttccgaggcgcgcctgagggctctcgaccaggatggctatctgggcgagttggactgttacattcccgcccacaataaccgagccacaaatcctgaaagggggatgtgtgcttggtcgggtgctcatgcccagcaaggggcattgtagcctctacacccatattttaagaatgtagcagacttcttctacctttgcccaactcagttcactcccaagggcattaagtatcaatcttctctcttcgtcctttatgcctcacaaaagtgggatatgccttctccccacgtggttagctggttccttgatttgaagtccacccctaagcaaggtaggtcggggtacttctatttctctcaaccagacttcaagtggttaacgtgaagcgaggacaaggccatcagcaaaattgggcattttgttgatgagtacttcatggtggatggtgcgggcatcacccatacttggttctagcaaattccaacatatcaccgccctcccctcactcttactcatagggatagagctcaagagcttgctcagctgccgggggaagaccggatatcatctaattgacctccgaggataactttgtgaagtatgggctctatccgaaggatttcattcctaagccagtgaaggggaggaagaggaaatctgatgttggacgggctgaacgagctcattcggagaatgagctacttcaactgaagcacgaggctaagttgaagggaggtgcaagggccaagcaatatgctcagtaacccttgaatcctgaagatgaagctgaggaagagcatgtgactccgctcaagaggaggaagaaacttctggccccacctaggcctattgaacatgcaattcgcattagggagcctagttcgcttcctcgggcacctcctcccgtgctcggaaaagggaaagccatcatgtctaagataagagggtcaggtgatgatggacttttgggtcttgctcgggcattcgttttgcagactactctgtcttgtttttgagcatcttgactattatgctttatgcttctggtgtctattttctctaaccatgtttttttttcatgcagacatgtctcaaaagatgctcgatgctttgaagaagagagttagagaaagctcgagcgcatctcctcctgccaagaagtccaagggcggtgaagggactccctccaaggaaaaggcgcctacgagggaggttatcgacctttctgaggaactaactgtcgcaaacccctctactccaaaagctgccaagtccaaagattctcgaggaggaagttcggacaggcctgagcaatccaaaggtggatccgaggtgatgccgactcctactcctcctttgttagtgcttccaaaggccaagaaaggcaaggagatactcgcccactatatgaaccggttggttcctaaggtaagtgagcaacttgccggtgctgataacgactcttctttgaagctattgatgggaggagtcttgaaggaattcaccagggtaagcttttcttcacagtttcctttaatcctcttcatttagctcagattataaagttttttctctgcacaggctggtctgaaattggcttacatatactcccgggttaagtctgctgcttccaagaacgcggctctgtccaacaccatgagggcggaggtggacttggccaggaaggacactgatgatgccagggtggaacttg

SEQ ID NO: 123493 - DNA, 1064 bp, Cannabis sativa
tgttgctcgcttactttagcagttcatggtttgacaagcatgcctttcggttagacgatgggctatcttggttcgaagaggttcctgcacagttcgcagatatctatatcgtaaattcatgtgtgattctaatcactacgtcaaaaagaataatatatatataaaaacataataaaaaagtaatttaattaattgaaaaataaacaaatataaatattaaaattaaaaaaaattcaaaactttttcagcttaaaacaaacaaaattttttaatatttatatttatatcgtacgtgataatgtgaaactaatatatatggatttatttcttcccaatctcagtaatttggtagcgttgtgagtatggatcttggataatctttgttggcggggtaacgattttgattgagagagcacttaaggaaatgagaagaaaaataagtgcatatttattttttactaattttatttactgtaaaggtaaataaccattaaaaaaaattatggagatgatggatgataccaatcgatgaggaagaaatagatagatttgacacgtgggtgtgtaatattataaaaaataaaaatacattgataatatttaattttaattttcatacataatggagcatcttacagttagtgatggcaaaaaactctctatcactcataatttttctttaccctcgaataccactcctgttcaattaaattatgtcagcaaagttcttaaaataataaaaaatcttgttagtgtgtgtcaacttactaaagataatcatttttttagaatttcactccacttggtgttttgttctatgtgctgaccaaattcatagcctcacttgcaccaactgagcttgagtgtcaccttgcaaccaaggattccagttcatgttgttcccttattagtaatactaattgtactaatgtcttcttcttgtactaccaatcatgacattaatcataaaaaataaaatttaacgttaattttcatatatatatagactacgtgcgaggcacgtatactaaattttatgcatttttttttatattatttgaaag

SEQ ID NO: 123494 - DNA, 955 bp, Cannabis sativa
tacccattaaaagtgcactcatacatatatatatatatatattcaagaaatataattattcaactactatttaatttaaaagctaaaaaaaaaatagttttaccatggtctacagtgcccactaaatttttgtagacaattctatttataagtttaggtatagtgttaggttggattatatatagtgtgaaaccacagtatttttggtattttgcaggccagttggagatggctttaggattgaacatttagactaagtttgacctagacccgaccaaccagcccggacccagcctagtcaacccataaaatttaaaaaatccactctgttcgggcaagtcaggtccaacctggtacactttcggggtgggttcgcgggttgaatttttataatcatcgagtttcagattggacctgaactcccctgccaactcaaccaaaattaactttttattttttttttatttttattacatgtataatatattaaaaaaaaaccctaaattctaattatttttatttttatcacatatataatatattaaattatataataaattatataatagtttgaaactttttaaattgtcttttgtattttaaattttaaattaatattttaatgtaatgaatatagattacgatgttattaacttatatatgcttaatttaatatatagaataaactatacacaatttaaatttatttttataataaaaaaagttgaccaagttaatctacgaatccgtgactcgcaaacctgcaatcttggccaacttgaccatttcacggactgggtttgggtacaactgtttgaactgaaaactcgacaaatactgatgtttagccttagatttaagggttaagatgcaaaatggccatacatttagaaactaagttaataaatgttcattttttaaaaaaattaagaaaatagccaaatctaataaatta

SEQ ID NO: 123495 - DNA, 2690 bp, Cannabis sativa
  modified_base (2662)..(2664): a, c, t, g, unknown or other
attttatatatcatctttttgtgagatttttttatctttttttccatcttattcctttgatattttctaatcttcttctattttaaatctgcaagaataaaatataaaaagtgtaaatatactccaaacatgattaaaactaaattaaaaatatactaaacttaatttaaatttaatactaaaaataacctaacaaataccttgactcagccccaatgagacgtttgttgatgtagtagaaatggtgttgtactctttcttcctcatgcactagagcagtattggttgcatgctcggtgatttccaagtagatgtatagttcttcaccatttattggcttggataggatgagaggcttgggtagataatgtttgagagtctggaaggcttgctcgcattcatcaatccattagaatcccttattgcttcctttaagcaaattaaagaagggaacacacttgtttgttgacttggagataaaactactaagtgcagcaattcgtcctaataggctttgcacgtcttttatccgcgatggtgacttcatgtcttacaatgccttgatcttttctagaatcactttaatacctcttgagttgataatgagtctaagaaactttcctaattggacttcaaatgcacattttagagggttgagcttcattcgatattctcgcaggatgttgaagcactcctctagatctttgatgttgtctttggatattttagacttaaccagtatatcatcgacgtagacttccatattatttctaatttggttatggaacatacagtagactagtctttgataagttacacccacgttcttgagttcgaagggcattactttgtagcagtaaagctcgatgtcagttcaaaaactcgtgtgttcttcatctggtacatgcatgttgatctggttgtaaccagaatatgcacccatgaatgtgaggagttcatggctggctatcacatccaccagttgatcagttcttggtagtaggaaataatttttatggaatgctttgttaaggtcagtgaagtcgacgcatgtcctccactttccattaggcttaggtaccaaaatagggttggatacccaaaccgtgtagaaatcttccctaatgaagttgttctcctgtagtctttcaacctcttccttgagagctttagaatgttctttgtcaaggagcctgtgtttctgttgtataggtttgaaattgactttgtctatgttgaaggcattacagatgacctgtgggtcaatcatgatcatgtcctcatgcgaccaagcaaagatgtcttcatttctcttgaggtaagccataaacatctcactcaagaccttcatcacatttgttccaatcttgacaaccttggtcgggcccgattttttgaggaaaagttctttgagtttcttgatcggaccaactccttagtcaatttccctaaaacgagggttaatgttgtccccgccttgggcgcaccttcaagtggctttaggtggtgtctctaccttctctgtagtttaatctctcgaggtctttatcgtctctttgacttttgcaggagaggccttactcgtccctcttggtgttataacaacaagggaggtcatgtttgtcccctctgaagtagtagcagcagaagaggtcttcttggcgagtgacaacgatgcattgtagcactcgcaggcagttccttgatttctaaggagacaaccaatactagttgatgttgggaacttaacaaacaagtggtacactgaagagatggctcgaaggttgtaaagggtaggccttctgagtatcacattatacggagacttcatgtccaccactatgaacatggccatgatggtggtttactttggggcagtgtcgactgtaagtggtagcttgatcttgccacatggatgaatactagctccactaaaaccatacatgagttgttctcatggttctaggtcttctaaagttaaacccattttgagtagggcttgcttgaataggatgtttaatgatgctttgtcgtcgatcattaccttggccaccatcatattagctatttagacctcaataactagaggatcgttgtgagggtagctgacatgataagagtctaattctttgaaggtgatcagttcacatccatagcactgagactttggagggtgttccgcgacctgtaggacttcaactcttggttcatgtcaaagtgatcttgcatacctttctaaggccttccttgaattctcagctaagtgagggcctccaatcacaatctccaacctgcttgcaactagcacaggctagagttgagcattgcccccaactggagcatcaagtcatacataccgctgaagaacaacatacttttgtcttattagaaattctatctcatcccataattaattacactcattagtatcaagactataattgttgtggtaacgatagaatttgttcatgtccctcttccctaactctttgaaaggaagagctttgcgatccgacactgttgactaagtggtcgtatgtctcttctcttggagccaagagaattgagtaggtggtaaagcgaggctcataatcactcaagggtttgctcccagttttaggcttctttttttaagggagttgtttgttgggttttatgcccnnnataaaactctttacaatctgattagt

SEQ ID NO: 123496 - DNA, 1875 bp, Cannabis sativa
tccttcggacaatgaagtcggtccagatggctttcaaacatcctcaatcacccaacccgaacgcctcccgctcaagaatgctgaaacaacatatcaaagattggtcaacaaaatgttcaaagatgtcctagggaagaacatggaagtttatgtagataacatgttggtaaagtccaagactttaggggaacatatcaatcatttggaggaagcctttgctatcatccgaaagtattgaatgaaaatcaaccccaagaagtgttggaaaacatattttatgaggatcttacatttaataaacaagtatgttgattattactaatctaacatcctaaatatggaaccttaaaacaattcaaattagtcacatagaagttcatgaaaaccttacagtgattgcaacaaaagtaaatgtctcattccattcagtttttcaacacttgttcctttttattatagagtattaccaagaattgaacctggatttctcctactttgaatgtgttcttcatagtcttctacaaaggcctgagtatcaccttaaacagtgtggtctgatactcaaacaccttttgagaaaaaaatttgagagagaaatatttactactgaattcaaaattaagaaagaagagaaagaataaacattgggttagacttagtgaatttctcttctcatcactttctttatataggcattcacttagggttaggattagatgagatgggcttaaaataaagacttgagcttaaatctaacctctaggccgaattcactaatggcctttaaagttagattttttgccactcaattacactattgcgttcccaagatgtaagtatttgagttaaaccaataggaaagcttttaacaaacgaatcaaagaacatgtgaaacacagttgaggtagaacctaatcatctcaggattaagataattgatctaagatcaacttttaggtatttacctagaaaagatattacagtaagtttacaatatcttttttgttgtaaatattggtccaattcgatgtatagccaatacattcaatgctagtttactttactaatatcctaaaaaagacattccacttatctaaatgtaagtaaaccccatcgttgattatcacgtcagtataaatctagtgcgctgataaattgtgagactaaataatttgaagcatataatcacaattacttttcattgtaataacatcattgtaattatgagtaactatatgttcaaaatttaatagaacttatatattaaacctataatcatgtgtaaaatatgtgaacaaagcttatgactaggtcatggtatgatttctgatctttattaaaagtaaatataattatattgaattggattttatttagggcataaaattctaacaaactctcacttgcactaatataaaactaaaatgcatttcaagttaatctcatatacttgatgtattgatcaaatgtagtatttggcataaacaatgtaaaagttactgatttgttgtattcagtatcaacccaccccaccattatattttctttagtcacaaaatctatgattttgtgaattttccgtctatatgttttactcctcttaaggtacataattatttactgtttggcaattgcatctgtgtcaacacaaagtcacactagtaactattccatgtttggaaataacgccaaattctatatcaaactttcctgagtctaaataattccctaattgcctttagggaatccttattattcagccttagtagtagatgttgacttcgcttttagccaacgataatgagtctttttgataagcgataaacgacatatgagaatatataagaaagcaataataagacacaggaatttata

SEQ ID NO: 123497 - DNA, 1103 bp, Cannabis sativa
tccgggagtatgtggagcctttacttctcctttggggggcatattcttgttggtactcctgatgccaaaagatttagtcgattcatctaatagtcgtgcttctcagatccacgtgtcgttgtcatattggtccacgtattttgggcgaaattaagggcaacaaggggaaatcgaagtgtctgggaatttttaaatgattacttattttcaccaataagcctataaatagtgctgaaaactttcagaaattacttttaccatttttctccatgaaccaaactcggagcaaaaaggaattttcttcaagtctgttgggggatttctagtagaggcatctgagcagcttcgtttggacgacgtctagacttcaaatagtaagtttttaatcttcttctcttttaactttgtatctttaattgttgggtttccattgtagaaaatacaactgttcttgacttgttgtagaagatacataaaaaatctagactcgaaactttgtagttttctctataatagtttgtacgactttgtgattaacgacattttgactttaatctcaccatgttcgattttcaccttgctcgttcgaagctttgtgaaatttaacccttaacccaaaaatttaaaactcatgggttatgacttaatttttatgcatttcttgtattttaatttgttgggtggtcctggttggcatatttgcctattttttgttcgatagcccgaccaaacactcatctcgtgtgttgtcttcggtagatgaaccctggtgagttttggggaggcgaacaccgaattgagcagcatctgcttcaatttctgtacgaggatcaacctcgtcttcgcgctagtctgtcctcttcgagcgacagactttctaacttgagctttgagaatagggaagtgagtagtgatcgttcccctactccaaaacccaaagtgcaacaccactcttactccgagcagatcgcaggagaagggtacgatcgctttatttgggaggtgaagaagggttggaggcgttatctttcgtccaattggatgaatatgttgggttttatgccctaaataaaactcatttcattataatcagatttacttat

SEQ ID NO: 123498 - DNA, 1724 bp, Cannabis sativa
  modified_base (1419)..(1419): a, c, t, g, unknown or other
gtttgaaaatttcagtgcaacttaatgtttccttgactttgtagtgcttgtaattgtgttaagtgggcaataagatttttactaaattactaaaaaaaaaatatttaattataataaaaaatttatgttatgattaaaaaattgtcacgtcgtacccagaatataacttaccgggtaaggtgtaccctaccacagctggtttttattttttttcaccaaagataatgctaagagtgagagatgggaagaaggatacaaaacaagttgtgatgagtgtatgatgtttttttttttgtgtaaaattgacatttgagtttgttttctatgttataatgagtctcatgacttgtgaacaaccaatgtcgacaacactcctttaaagatggtagaaaaataaatgaaatattgtggaccatataaatataaataccaatacatttcacatgcatgacaatgtcattatgtgggaatacctactttataagttatataatatggacaaactattaattattgacttcatctatatttagtacaattgtttttacataagaaaaaataaaattaaaagaaaagaaacaaatatatagagtatttgatattaggtacttgtggtgtttagacctatcacaatgtgttgtcttattaaattaaaatatgtacaacttcatattaaattgtatcaatattgatatgtaatttgtagtagtgttaggtattattaattgtcatttaatgtgaaaaaagtatttaaggaaaaattaaataattctcataatttcatatttttttcttaaaataattgttaaggaaaaattatacatgatactataatattcaattttattttttcttaaaaaaaaaataaatttctatgaataacaatttgtgataaactatcaagaactctatttttttagtattgtaaattatttgaaatttttcaaaaatttacaaaaataatattgcaaccataacgaatatgacaaaaatattctgacgtgtgttttcgagcgtgaaggttgactaaaaagttgtaattagcactcctcttaattttttcatattatttatgattacaaacttgaaaacttttgttacaaatctctaaatcttagttacaaaaagatttgattcaaaaataagaaatttacacttttgagactatttttatagcctcttaattcctaaaatgtcttgagccattgaaattataattttactatttctttcccacttttttttttttaccaggattttaattttataacagtagtacgtatattataactctctcttttctatcatttagctacaatactaataagttggagataaatatatattaggggaattattgtataactttttttttttttttcaaatatacggttcaggtttctaaagtggttgcagcgntagttgcaataggggtttttatacaatttttttgttgcgatttaggttgcagcgctagttgcaattaatagagatttctatatagaattgcgtaaaaatgtaaaaaaaatatttaaaagtgtaaaaataaaaaagaccctaaatattattataacttactcttcgtaatcattttaatatgtgaaaaatatatatttttctactatcttttgcattgacggacacactcacaatggtgtgggggctatagccccagtaaaaaaaattaaataattttcttttcatttgataattatagcacaaaa

SEQ ID NO: 123499 - DNA, 1192 bp, Cannabis sativa
aatactaataacattttataatgagtttttatactatttaaataaaaatataaatataatttttttttatgaaattaaaatattgcggtaaaattagtaatatatgataatttattatttaggtaagtggttaccttaaatttttttttttttttagttttccgacaaaataatttttaaaaaattatactttagtaaacttttcataaaaaaaaaacttaaaaccaaaaattcttcattaataaattaatgaataacatgtatattttactaaatttctttttgctgtgataaattgaatattgggtggaataggaaaatgatgaagacgaaacaattaatttttattttactcttattagaagtaggtttatgatttaattttgaattattatgtatgtatcatccacttagattgtaatattcccaactcacaagatcagtgttgtatctacagctagctaaggcccgcatatatataatatagaattaatattgaagccgatttcagctagctatatatattgcttgttaatattatcgaatttattggattatctggaacttgtttccactatatatacgtactaagaattaaaagagagcataaactcagaaaataatattaggcgactttcaaattaaaaactagccagaagaaagaaatggccaactctaacattaaaaccctttgcttggttttcatgatctctcttctttttgcagtttccatggctgaaagccgactctttggaagtaagtctttaacaattaattagcaacaaaattattgggtcatttttaaaaattactatgtgtcttttcaaaaaaaaaaaaaaaagaaaattgagctttttgtagtattaataatatgcattcatttattcattattcttataattattaaattttatttatttttataatgtatgaaggattcgcaagtggacatggaaaggcagtaccagtgctgccattaccatcgaccccagtgtgtaattcagtttatggtgttaaagatggagacacttgttttgcagtgacacaaaagttcaagctcacaaccgattttttcacttccatcaacccaaacctcaactgtgctgccctcttcgttagtcaatggctttgtgttgatggcacactcgtctaatcgatcatcttctcatttgttccaccaaattgggaacaa

SEQ ID NO: 123500 - DNA, 1309 bp, Cannabis sativa
agagagagcagccgttgagggtttccttttggttttgttttcgcctagtttccagaattgggattattttggtgtgtgaggagagagaaagaagagagagaaagaagagagagaaagagagtgatgtgttgatttgtgttttgagtttattttggctgttttgtttgtgtatgtggttgtgttttgatgcgctggtgacagtcaaagaaaaaagccctaaattattagtccttttttaaaatattaatgtttaataatttaatttatctaataattaaatgagtgttttgatggcaaacaaaattagaacaagtaataataataataataataataataataatattttatttattttatatttggaagcaagtgagagaagttttgtgttgtgtgcctcttttttgaccgttcaaactttaatcttactttactattattatttttttgggagttttaaaaaggtgattttcaaaataaataataataatatatatataattatcaaattagttgattttgacacttccctacctgtgaccacctccctttactcttccaataaataattaaatattgacacaatattttagatgtgttaggtttttctttcttttttttttcaatgaaattttaaggtattattttttgagaatttcagtaattatattcccctaaaagaaaggtgtagaaaatttattataatatgtccttttatcttttaataaataatctacaaagaaaaaatacatagtgcatcattttaagggtctggtacattatttattttatctacatctaataagagaaatgttttagtttaattatataattttgtattacattagattttccatataaaaataagagtggaatataaaatatttaatttactaagttttaaaatatatttacaattatgtattaaatttttacattactacttttacattgttgaggctaaattagtttaattgaatgaaatttacagttaaaaattattatatttttatattaaaatattaattgtttatataatttttaaatatataaatatgtgtaaattagattagatgttatttttatattattaacatctaatccacacaattacaaaatttttaaatttttcaatctaaattggattaattattttatgaagactctaattacaacttccgttgaaatagatagaagaagatatacctgactagggttgtacaaaaaaaattgtaaactgcccaaaccgaaacgaaaaaaccgataaaaattataaactgaaataacccgaaaaaattacaacccaccc

SEQ ID NO: 123501 - DNA, 1242 bp, Cannabis sativa
  modified_base (46)..(46): a, c, t, g, unknown or other
tagcaacgagctgcacagtacgtataaaaatcacgtaatacgcctntgctagttagggtgttacagtatgaatcaataatggcaaaactctagtgttgagatgatgctaatataggcatgtgagagaggaagtgaggaagaaagagattatcagacttaggcttagaggttggaggtaggttttaagcttaaattcaacttaggtttctaggctaggggtcaaggcctttatataagaagcctaaaccctagattacagtttaaaatcctagatatttgcatagtttgttagataattgcaaaagactaatatgtccttgaatctagatattattagccattctattttgcttttagggcccaattcacagcccatgagttgttgtccacgtgtaaaagtgcacaggaaaccctacacagcacctcctggaaggccaggcccttgtggagggcatgctggccagccatggtgtagtcccaaggctggccgcctgtgaggggctagcctatcacttgatgtcgcttgagtatcagggtctccgtttgcttaggtgctgacttggccttcttattggtgagctgtgctgccacgtggcactaattttgtccacgtaagcatgccatgtcaagagaacaaaatcgatataatagtaaatataccacttatattttgatgggtattaacaaaccctcataaggggcacaacttaataaagttcagtgagtaaaatattaattattcttgtttaaagatcccttaaggaaattgtgatacactaaaatttcacactatcacaaataatgccatgaaattaaattcaaatgcacaattcaaagtgatatagacttccataaaattatgtggctaaaattaaggaatatttatggaaatagtacccaaatttcacttattgttacgcttcataatgttagttttatggtattaaatcagttaagcagcggaagagtttcatattatctgattatcattttaccatagcccaatagatctttttggctaataatatccttgcctaatgatctttttagataggctttgccaacctgcatgatcctcacagaagccttcttgaatttatctaatgattttgtttgcttcggcgggaggaatacacgaaaataggggcattaaataccctcttctatatagtttgccttcgatcattgtgtagcgaggcactgtatacaatagttttcgcgcctcatttttgtcgtttggaa

SEQ ID NO: 123502 - DNA, 1055 bp, Cannabis sativa
  modified_base (851)..(854): a, c, t, g, unknown or other
catattctaacaataagataatcgacaaaatctagacattccatcaatatctcattaataaggagtgtcataaatttaagcagtgacaaaaatcaatacaatgtcgacattctattcctattgtaatcgataaaatttgagacacttagaacaatccatatatcattgatatcctatcaataaggaatttcgtgaatttattaatgctacttagtttttggtgtttatcaacaaagtgttgacaacataccaacatatattatcgataaatgcatattgcatgacaatcacatgtataattagatatttaatgttaactaatttttgacatttattatcccaccttcccaataattattttggtcatatataatagaaaatttctactttataagttatatatatttttctgcttctttaacctcactacaaaaaataattatctttagtgacaaccttttagtcacaatataaattttttgtgacttttagtcacaataaaaaattatttgactaaaacataatatttagatacaagttgtcatcaatttaattttagtcacaataagtattgtgttgtgactaaaaacatatttagtcacacaataaattataatttttgtgactaatacatttagtcacaacaaaagaaaaatattttataattaatcacaatttttatatttttagtcacaaattttgttatgactaaaaataagattttttgtagtgcattattctcttctaagttgtatatgtctagtaattatagttctgcaagtcatgatgagcaggttcgtagattagtgggtcattatttagctaggcccactacaaaaaactgctacttnnnntgacaactttttagtcgcaacataatttttttgtgattaaatgtgacttttagtcacaacaagaacttacttgtacctaacacataaattttgtctaatttttcaccaccgagggagattgagaccgagtgagcttagagagagagctgtgagaggaaaagtagagagagggagaaagagaccgagtgtgagggagagaat

SEQ ID NO: 123503 - DNA, 1046 bp, Cannabis sativa
atcctcaaagtttcataaacacacaaacccacacaacatactaatttcttatctccagttttgttttggcaaggaggttagattggcccttaaaaaagatttgacaggttcattatactttgagttgagagcagttatatatatataggtgaaatcaggagataaattacaggtcaaagccagaaggtggcaggcctctgatctagcttgtacatttctgatctccaaaaaaatggtggttatactctcttcgtcccgaaccgaagagttataagagttatgctggtttgcattatcagcttgcagaattcaaaaaggatctgttaagtaaaactgtaaaaaaaaaaaaatgtgaaggttctttttgagcctctgcaatgctggcaaaagccaaaatgtggtttttgcctaaaggaataggtttagtgtcacataaatttatcaactttacagcctaatatgaatataaacatgttgagttgttgatagtttttttttttttttctttttctaattattataatattttaattttttaaatgagttttggcaattttccaaatcaaactaaactacccatcttttttaaatgttcaagaagttcaaaaaggttgaacaatgattttttttaatcccctggtaaatgtcaactcccgagttatcatcaacacttaattattgaaagtaaatcttcagaacaggtttttttttgatggttatgactaataattcaatacatggtgcatttaatttttaatcacagggaagtgttgtagttttcaccaatttaagtgtgtctaatatgatttttatttttatcttttaaaaaaagaagtgtatgatttctcgtgctacttctaatcagtcttctcacgatgaatgtaatacatatcatttgggaactgaagatcacccaaaccatctcatcgcttcatttttcttgattggtcacgaaaatttctagtcatggaagcaagcgactttgatcaatatcactgttgggttttgtgccctaaataaaattttttacaatctgattagttatc

SEQ ID NO: 123504 - DNA, 1944 bp, Cannabis sativa
atgggtcgtcatcaataccgtcaccaacgaccatattgatttcaccatccaagccataatgagcgggttgaggagctgtgaccttctgaataggaacattagtggtagatttctcatttgtatcaatttgcatcgcttcaacaaaaggagtgggattatcctctactttggtagaagaggatggaaaattacttggagttatttttgaaagcatttcctctaacactactttactttgcggcttgaatttctttatatagtcttcttcaaggaatgtgacatttgtagaaacaaacactttattatacttgtgactataaaatagtccaccctagtctccttagaatttccacaaacatgcaaactttagtttgcgcttctagtttaccttctttctttcttaaaacatgagtagggcacccctagattctataataatgtaaactaggtatacgaccattccatagttctataggtgtcttagggactgatttagattgagcaacatttagaatgtcattggccatctaaataacatatccccaaaatgacgttgttagagttgaatagctcagcatagacctaaccatttctaaaagtgtgcgatttcttctctctgcaactttgttttgctgtggagtgctaggggcagtatattgtgattcaattccaagatcaattaaatgatctttgaaatgaatatccatatactctccacccctattatttactgagttttattggcagctaaataatattagagattaagaaagtaatgaaggtataaataatgaaatatcaaacaagagatttttacgtggttcaggctttaattatccttagtccatgagtccattttattaggctctttgttcggtgattatgcattcaaatacaaaagagatggacttgactcaaccctactgtgttcctcttgaaaaagaagaagcttagtaggaatattccagagttgataatatggttacagtaacgtgtttacagagaatacctcttcggttctgaggttaaaagctgaaggaaatgagaagaactcaagggtcagaattgaattcctcgccttgtgtgccttcaggtgtatttataggccgatccctttgcatgggccatcttcggtggatcttcacaagggtgaaccctcaccgttggattggtaggtggcatattttccacttggcctttaccgatgttagattgtactggctatactggcagtgctttggacgcgtgtcactctagggccattctcatttggattaccttggtccctagttattggatcgtattgcacaatacataaggacacgcatgctttgcatggtagtgtggcgtgggggacaacttctgacatcgtaccaaaaatagctctagcattgggtctgtagcctatcactcttaggcagagcctccgtgggttaaaggtgtatcccaggccaacattccttagtcaaagatccatgttccttgtgggagcgtaggttcccgacttctagagtcgagtgagtctctagctcatgggcatcttccatggggctcgcatttggtaagacatcccatgcagaaatctgttcagcgatattagggctcttactttcccagaccacggaatgaggcactggggcagccttaacgatttcttgactttttcttgattaatttgcacatgttatggtggccaaaatgtggataacatttacctcccaatcttccaggacatgccatgtaaagacctcttaactttaatttggaaattaacagataattagggtttaattatgaaacttgcatattagttatgaattatcttttcatggagatttatttgaattcaaaatgcattttatatgtcatatatagaattttatatttttgcatgttttgtgcccgacaatattggaacgtagcgtttggctattagaatcacat

SEQ ID NO: 123505 - DNA, 907 bp, Cannabis sativa
aattatgtaattacctccaattacacacaaatctaattacattgtggctttccaaacgcaccctagatattattcaaataaatttcattatttgggcatgacttcatagactagtagtaatttataaagattgttgatatcatgtataatttcttgtgttttttattgtatgtttgtttttatctttttgttgataaattgtttaaacatattggtttttatttaaacaatttctgggtctgtataaatatttttataataaaataaaaattaattatttaatttgaataattaaattgattatcataaaaattaaattaactatcaggtttttattgaaaagtgaaaacaaaataaagattgattattttagagaaaaaataaatcattgattatattttggattggacaaaaggctgcattacacgaattaacaaaagaagataagacaaagtctatttataatatatttatatattaaattatattattccaatttgtttggtggtccatccttgttggatggtagtagttgagttgagattgagattgagatttcttcatttttcatgcctcttacaaagagtattgacatttcttttaattcaattcaagaatctctcttcaatatattgataatataaaaatattatatacaaatgcaattatgttacgttattaagacaaaaaaaaaaaaaaacgtcaaattttattcttttttgactttaaactcaaatgcttaattctatttaaaaataaatttctatactctattaaagaataatgattaatttgctataaaaaattaagtaataataacttttaaattatagggctatttacaaaaatatgggaaaataaagataagttttgatatatatggcataaatacttaattatactaaat

SEQ ID NO: 123506 - DNA, 5596 bp, Cannabis sativa
  modified_base (5216)..(5222): a, c, t, g, unknown or other
tcctcggaattccatgcacaattttcttcttctcgccaactcccgttgcatttagaagacctggtccaagtgaagcaaaggccaggagaacctttccgagcttatatcagcaagttcatgatggaggcgacgaaagttgcacggttaaccgaagaagggaaattggctgcgatactggggggcatcgaagttctcggagagctttggaaagacataaaaagagatggagcagtagattcaatgagtgactttctcgatcgtggagatggttacatcaagcttgaagagccattcagtgggctgaagtcgagcttataccgaaccagccacaagttccctctgctggaacatccgttcaacactctcagtacccaagcaattcaagttcgggttgtaaaaggtctaacaacaacaggaaagacaatgggaaaaagggaaagttcgctggcaaaaccgaacaggcccctagagaaaatccttccaagtttactgctttctctgtcctaatagaggattcagagactatctgcatgggcactcagttagtagcttcgtataagaaacatgctcccacgaaaaaggacataagtaaaatagacgtgtccaagttttcctgttttcatggagattatggccatgacaccaatgaatgcaacaatctgaagcgggaaattgaatttttaataagaaagaataacctgtacgtgaaaaaatacgttaaggctgatcaaaatcagagggctgctcagacagataataatcaagacttactgccaccatcggtggatgggcatttacaagtcattattggaggcccgcacatagttggagattcaggcaaagcccaagaaaggtatgcccgaaccttacaacatgagtaaaaagaagtggtcctggccatcgaagaaagtaagccaaaagtgccacgggtaggggaacccaccataacattcagtgaagaggatgctgtcaaagtaaatttctcgcacaacaatttggtggtcgtggaagtacagatagcaaacaaaatggttgcctgaaccatgatagataatggagcctctgcaaatatcttgttcaaaacaccatatgaaaaaatgggtttccaactcaaagatttaacccctgtctttagcctgtatatggtttctccggccagagtgttgcatctctagggtaaattcgcctacccctcactgttgatcaagctccgaagagcataactgtaatggcacaatttctgatatttgatgttccatcaacctttaatgtcacgttaggccgacaagccttatatgacctaaaggctgttacgtcaatatttcattcgtgccttaagtttccaacgaagaatggggtcgggtgcctaagaggaaatcaacaagttgcacttgaatgttacaaccttgccctaacaaaggttaaaaaggaagtatcctctaatcagagttcagacaagggaaaagacattgccaaatagggaactgcccaaggcaaggatgaagatgtggatcccgacttggggaacaaaatacaaatgttgggccagtggaagaatgagaagaaattggaatctacccaaatgttccgaccaggaaactcaaaatcagaaaaggttggctactagaagtaaaatcagcattgataaaatttcttagagaaaacttggacatctttgcatggtcacatgaggacatggtcggaatcgatccccctataatttcacacgtcctgaatattgagcttaattttcgccctgttcaataaaaaagaagattgttggacaaggaacgagccctagcactaaaagaagatgtagaaaagcagtaacaatttcataattgaagctttctacctggcctgggttgataatcccgtactagtacccaagctgaacaaaaaatggcgagtctgtattgatttcatcgacctcaataaggcgtgcccaaaagactactttccacttccaagaatagatcaacttgtggatgcaacagaaggacacgagatattaagtttcatggatgcctattcggggtataataaaatcaagatgcatccaccagaccaagaacatacaagttttcgaaaagatatgtgtctgtactgttataagtcatgccatttggtcccaagaatgcgagagctacataccaaagattggtacacaaaatgttcaaagaccagatcagacgaaatatggaagtgcatgtggaggacatgcttgtcaaatccaggaaggctgggggaatatagacgacttggacgaatgcttcaaagtcctcaagaaatacaacatgaaactcaatcccctaaagtgctcatttagagtcagctcgggtaaatttctgggctttatcgtcaacgcccgaggaattgaagctaattaagagaaaattcaagccctcctagtcatgaaatcgccaacaaaaaccaaggaatttcagagtttgactggttggattgccgcactcaacagatttgttttaaactaaacagacaagtgtgtcccattcttcaacatcctgcgaggaaataagcaatttgaatggacggaggaatgtgaaaaagcctttcaagagctaaaaccgcaactcgcaaaagctctggtgctctcaaaacctttggacggagaagaattaggaatatacctggcagccacggtttacactataagtgccgtactgaccagagaaagagaacaatatcaaacacctggtatactacatcagcaaaagattcattgaagctgaaggccggtacccattgatagaaaagctcacttattgcctaatcctagcaacgagaaagctacgaccctactttcaggctcatcctgtttaggtatacactgacaaaccattacgccaagtattgcaaaaatcggacgcctatggaaggttgctcaaatgggcggtggagttgggccagtattaaattatctttcaatcatgaacagcaattaaaggtcaagccttagcagattttgtagttgaatgtacgggtaaagaagagagcatttcagaaaacaacccagagctagtacaagtacctcagccgagcgatggtgaagacgagccaacttggaagctacatgtggatgggttagctacggaccggctgtctggcgcaggaatcgcccttgtcacacctggggtgcaacacctgcacgctgtagtcaaattccgatttaaggcatctaataatcaagcttaatatgaagctctgattgctggcctaagacttgctccgaaaattaaagctgaacacgtttagatctgtagtgattcactgttggtggtaaatcatgtattcgaagagtacgaggatcgggggcagaagatgatagcatatctgagaaaaatacatgatctacgtgctcaatttaaaagctatggtctcaagaaaattccaagggaagaaaacacaactgctgatgcagtagctcgacttgcgagctgcaacataaatgataaagcaaatctgactcctatctagtttctcaaaaaactgagtatcaccggcacggaagaggttgaaatgattgatacatccccaaactggatgacgccaatagcagcctacctcaacactggggagctcctagataacagatttgaagctcataaaagaggagaaaggctgcacggtacatcattgtagagggagtaatgtgtagaagaggattctccatgccactactcaggtgtgccacacaagaagaagctgcacgaattttgtcagaagtacatgacgaattttgtggcaaccacgcagccgggcagagcttatccaagaaaattctaaggcaaggctatttctggcaaacaatgattgaagagtccaaggcctacgttaagaaatgtgataaatgacaaagatttttaaggatacctcgggcaccgcccaacgaactaattcagatgcaaagtccttggcctttcgccatttggggaattgacctgattagatagttacccaaaggtaaaggcggagtgcagtacgcggtggttgcagtttattattttaccaagtggacaaaagccgagccattggcaaccatcacgtccaaaaaaatgtaagacttcattgtcaaaagcataaattgcaagttcagattaccatataagatagtctcggacaatggaaaataatttgacagtcagtgcttcactgatttctgtgcgaaccatggaatcataaaaagtttctcagaagtggcacatccccaagcaaatggtcaagttgaagcactcaacaagacactcaaggacaacctaaagaagaaacttgaagatgctaaaggaaactggctagaggaacttcctgaagtattatggtcataccgtacaaccgagaaaacaacgaccagacagactccatttaccatgacatatggatattaagctatgctgcccgtagaactcgaactgccatcccacatgagattaacatatagccatgaagccaatcatgtactcctcgcagaatcacttgatgaagttgaagagaaaagaactgcaacaaacttaaaactgatagcccatcagcaaaaagtagcttagtaatttaacaaacaagtgagagcatgaaaattctttatgggagatatggtcctaatgagagtatttttgaacactaaagacagtacaacacgtttgctcgaaccaaactgggaagggccatatcagttggtcgaagttctagagtcgggaacatacaaattgggtaagtgtgatgaaaagatgcaacttgttgtagtaccaaggtattggaacggggaacacttgagaaaatactaccattaaaagtaccaggtcggatgaccttatcaagtatgaaataaaaagaacatttgctcttaagtgaatggccttctaggcggaccacgcccaaaggttcggataaaattatcaagtactcaggtcgaatgacctcctttgcaagtataatttttttttttttgcaatttgttttgtttatgctaagctaaagatcaaaccagatcaacataatagctttgatgtaagttactatggtaacaaacatatttccgaccaataaatgaataaagatgtttatttaaattcaatttgagtcgagttcatttgcatgttaccaatttaccatccagtgcatacagaaggtctgctcatacccgaaacccagaacagagaaaaaagcatacttgtgaaaaaacaagtgaccaagagtcnnnnnnntgcacggtcacttggggggcacctatacatgcacaaagcatttcgtaaaaaacaaaaacaaaacaaacacaattgcacgatcattataaacaagggatgaaattcattgaataataaatacattcaaagaccgcttgagcggtcaccttgcttaaagaaggcttactggccgaataataaacacattagcctcagccttgagctcctcctccatggcctttttctcatcctccaacctgcaaagaagggtctggagaccctctctttcattttgaagacttgtaacgtccagagacaaagaatcaatatcagcttcaagttgctcggttgatggcgtctcctgcagttctttggtcggctcgacaacttttgtc

SEQ ID NO: 123507 - DNA, 1658 bp, Cannabis sativa
tctattataatatagtattaataattctttattattattattattattacattgatattttttggtattttaatttttttcttctactgtgactttatttagttaaattagaatataatttacttagtcacaagtgtattattgaataaaggttctactatataagtatatattagggatatttataataattatatttttgcatctaagttacaataataaatttactgttagtgttgcatctaaagattttaatttttctattattattgttttcaagtattttgagtaagtttttggttagtaataggtttgataaaaaaccaattcattactttttttttatataaaaaaagctttatttttatgttatacaatttgaaatatattttggttacttctaaaacttatttgtatacatcttagtaattaattggttatttgtaaattatattatggtatattataattgaaaatacatttaattaactttaaaaatagttgtcgaaactaatgagttatcatgtaatatatcaagctacaatttgtaaaaataaattattttgtatatcttttttattttgaaagttaattagttattgtataatttaatataatttaattaataaaattttaaaataaatattaaccatgatttaaaaagaattataaaacagtaactaatcaatatattagtaagtaaatgatttcttttcttgaaataaggaagaaatatatacttcttacatcttgaagtattcacatttaaaagtagattacaatgattttttttaggcttatttgattaatgacatggaaaaaattatttttaaaatttatgggaagagagagaaataaattagaaagaaatgatataaatgaaggtattaaaacatatccaaccaaataaaatttttattaatacgtttgtcaacttatttttgacaattacattaacaataaaatatgaggtgtaaaatgcctatataataaagatgatcttacgtgataaatgacgcctactatcggaagaattttcaaaatggatactgcaattgtttgatgtaattaattacttttattgtttagttttgtggagacaataatgaagttccattcagctaagattgtggtcctgtgtaataagtaccactcaagtaaaactctcgtaggacctctatatatcttttgttgttacattacatacatttattattgattttctctcgatttacttttaactaattaataaactaaatgaaaatatgatatttatatgcaacccatatgaattagaaacttatttgagggagctcatctacttttgtattggaaaaaaggacaaaaatagagtgtatgtgattaaaattatcaacagaaatttgtgtcatttctacactgttctttggtgactaatttatggaatttatattagacttatagctacaaaacttgataacgagatcaataaatactatgaatgtgaatgaaatttcactactacaaaacaaaattttagagacgctttttcagcataataataaataaccgacgctataaagtcaaatttttttagaagagaatttaactccacttttggcgtcggttatttggaaataactgacgccaaaaggatttataaccctagcccatcgctt

SEQ ID NO: 123508 - DNA, 1151 bp, Cannabis sativa
  modified_base (850)..(855): a, c, t, g, unknown or other
aaagataatagaatagataagaggaatgagctactcctcccattgccaattaattttgggatggaaccttatttatcttattctcaaattctaaacttatagaaagagcatccggtattacaggtatcacatagtgtgtatggtgatagattaattttaatatcgtgtcttttttttgttattgttgtggagaaaataaattttgacaagtttcaaaaaagaaaaattatgtctaataacacaaaagaactgcagagagtggagaaattctcgaaacaagctgcaaaaatccataataaaaaattacctgatatatataaggctccaatgaatcaccaatgagcctcatcgacttttagttttagtgaaacaccatgtatgcatggttcaaattatataatgcttcataattttttttattttttttttattttttaagaatagacatgttaacatgataatatgtctacaagatatattatgcttcatcacatttattttatttttttccactccaaaatatggtgattttaatattcacatctaaattctcctttccttatcactaatactaggtattagtattagtattagtataattagtattaatattttttttttaaaaaaaaaatctattatctatatctatctatttatatatttatatttagtcaaatgacatggtgctctatatgaattattctcattttttttggaataagatgattttattgcacaacaaaactgatacagcatattctcattttttttcttctcattttttctaatttttccaatattattttatttttattatttttttcatatttaatattaataataataatannnnnnataataataataataataacacttatatattaatttaaaaaattaattctcagacattttcacttccctaattatatatatataaataacagttatatatatgctcaaataacaataataaaccttattatattccaattctaattataaatgaggtacgtaaatgatatcgtaatttgttaatagtattgttgaaaaaagaaactttttttttttttttgagggaaaatacttagttattattaaccaatcaagattcgtttacaataaccgagtatataggcggaggaataatc

SEQ ID NO: 123509 - DNA, 1469 bp, Cannabis sativa
  modified_base (1268)..(1276): a, c, t, g, unknown or other
aaaaaaaaaaaaacaaagttgtgtacataaatataaattcatgcatttgattttgaaaaagatatttaatagtaacaatgatattctggaaaaaataaaaaattaatatatattatatatatatatatacgtgcacatggttatcatgtagtagcaattttcttcagttttgagtgaatatattgtctctcttatttctctatatgtatttccttttttatttaaagaaaaaaatcgttatatgaatatatatatattagatatgatttcaattttacacaaacgtggaagcattgaaagagtgatcagtacacacagaacttacattatttgttggtccccacaatatgatgaccactcatataaatttcattttgaacttatgtttatataaattattattaaactcatttatcagtacaaaattttcaacctataattatgggacatgatagatctattgtttacaaacagttcaatgattttttcttcttctagcttggggttgccccgacttttcttttttcttttgtttcttgtgcttaaattattatacatatatatgtatattcaagaaaataaaaccataaaaatatacatcaactcagcatcacatttaataagatggttttcatggattattatacagaatttatgaaaacaaaaataataaataaaaaattaatttaaattagtttaaatgagaaagtccacatggaccattaacttaagagacccacgtcaaaatcaaacacgcatcacgagtgtcgaggttttaaattcttagagaactactagtacttgttgttcgtcgtctaaaccctacaaaaacttgatgaaaataaaaatataaaagtgaagtttcttcaatacattaataaaagcaaaatttacataagcactttaaattgcgctttttcattttttacggacattttgtttcttcaacttttatttatttatttttttttagaaaacattgtgtacgttgtacaaggtaagttcaaataatgtttttgtttaacatcaaccaaaaaaacaatggtctatatatcttttgtgagaaaaagaagggaaattgataaaaatgtatgaatatgggttaatttttataaaaatattgtcaggaattttttttcaaaagtagtttatttttataaaacaatagttatagaatacaaaacaaaacaactaaaaataatagtggaacaacaaaaaagcagtacaacaatagtgaaaattgaacacaatacacagtataaaacttnnnnnnnnnttttgaaaaaaattccgccccacaataaaaaaaaaaataaaaaaatttgaaatttcaatatgttgtgtaaataatccaaaaaataatccatatatattcattctacataaagtgtggctatgtaacagaattcttcgtttaacgatacataatggatttctacgttaattttaacaaaatattctttattaat

SEQ ID NO: 123510 - DNA, 1267 bp, Cannabis sativa
atattaatactcatttatatgagaaaaatgaggtgtgtattttgaattctaagtgtgatcacataaacattataaaaggaggtctttggttctcatttgagagaactattttccatcaaaaaagcacattgctagaaaatcttaaggcttgataattcccaaaggtatttcttagagagttcccttagtgtttagagacaggagaaataagcttttggacaaaagtgtaataccttgttcaagtcatagtgatccccactaatttatcctcaaggtagtaagtgagtgtatatacatatatattcttctgttgttatatatatatatgtattatattatatgtgttgtattctttttcttactacctttcatataatatgtaatatacatatatagtgtatatatgtgtattataacatctatgtaatcaatctcttattttagtcattgtattattttacaatagagttgtaatgcatgttgatttttttctattgtaataaaatctctaacactccgatgaattcaagtggccattaaagctcaacaaaagacaagttcttttcacattatattttgtcattacaatcaatactatcatttaaacatgtatctttctgtgcaagtatttacttacaacaaattatatgtagttgtgtcttgagttgccacaagagaataattgattataataaacatcgatgatgagatggaagacacaacctatcaagaataccatgtaaaaaaaatatttaaaaatattttctaatcaccccacaaaataaaggtattttattttaagaattacttttataattagaaattcgcaaacaacttcataatatacttatcattttaattagctattttactttaaatatgcaaaatagattatagaaaacattagtcttattcataaagaactccattttcaggtacatatttcacttcttcataatttgttaaaatatatcctcttatttaaacattttatatagtaaaattctatcactacacttttatataaatctctcatttttttttatcttaagaaataaataatgttgcgtaacatcttttacaattgtcctcttatattcatttttgtagaataggcatttcaatcacacctcaaaacaaaatatctaaactttcataaatagcatttaaattgttttttttgttataaatattaataattatgtggatgtccaaattttttatttattactattaattgtaatcaacattcattttttcttagttt

SEQ ID NO: 123511 - DNA, 558 bp, Cannabis sativa
  modified_base (507)..(508): a, c, t, g, unknown or other
atttgtaccattttagaaaatacgtggtctattttgtcatttaacaaaacagatggtccaattgataatttttgcaaaacagacatccaaaatagtatttaccctaaaatcattaaaaaaaagaacttctctcaaaaaaggaaacaccaagttggaatctccctttcccaatatacaaaaatatcaattaataattaaaaagattaaataaaactaaattaaaaaaatttaaattatttttttcaaatttaattatagatatagcggtggtattaatgtggcaacattttatacatccacatcatcattatgttcgtcacgtatgacaaaacttaacaaatggactacattaaaaaactgtgaatagtttgagaatcatttttaatagagtgaaaagttcaaaaacacaataatacataagttatatttttggaaataaaaatactaaataacttaggtgtcgtttggtaacacttttgtttcttaattttttaatcacaaaatganngtaaaatttttgtttttaaaaaaattattttttaaaaataaaaatgcgtt

SEQ ID NO: 123512 - DNA, 2112 bp, Cannabis sativa
  modified_base (756)..(764): a, c, t, g, unknown or other
tttcaaataacatagaaaaaaactaacataaaatttagtatacgtgcctcgcacgtagctttttcctagttatataataaatttgtataaatgatggaagatagaatgttataattgataagatagaatgttataatgaaataatatattaggttataattatgatttttatagaatgttagtaactaatcataaagctctttaagtgcgtaacaatgtttaattatatttattcacaattactttattagatatattattgaataattttttttctctataatatatttaattatataatctcccaaagccttataaagttttatatatataggaagctagagaaagtcgcttattacatcaatatataattttgttattaacattgagttcaaaatcggttagtggaccatagcaaaataaaaattatacacctattaaaaaatatacatttttaggtttattaggatttttatttcccgaactttgatatgtactaaattttgcttctgaacttttaaggtcgttaaaaatgtcccttgaactattgagattgttaaatttaaggacttttgtttaattttagtaaaaaaaagtctaatatggatggaagttcaggaggtatgatttaatatatgtcacaattcgaagggcatgatttggtagatatcaaagtttgggaacatgatttagtacataaataatcactgaaatagtaaaattgattgaaattaaataaaagtccttaaatctaannnnnnnnntagttcagggagaatttttaatgttcagaaaaattcaagagcatataatttggtacatgttaaagtttgagagggtaaaaattctaattagccatatttttaaaagaaaaatatatttttttggctggcccctagactaagtgggttcttagcacgagtttagtttgccttagttcaaacccaaccaatttgagttgaaagttgtcggtaaaaaaaaaataataataataaattaattaaatattgtaaatacaaagtaaaaaaatgtgatgaaacgaagtcggtggctcgtgatatttatgatctataaaaacaatttgaaaaaaaaaaaaaaacaaagatcaatcaaagaaaatgatatgtgtcttagcttgaaggatatttctattttctagcaaatgacttattttaatgaagtgctaaaataataatgtaatgttatattttagcacattttaagaaaagagaaatgctaaaagtaattattagtgcttagtatagtatgttcttacatgttaatacgcgtgttattagtgtaattaagtatatcgagtctcatataatttaatgtaataatttttaaggagtatcgctgatcaattgcaagttgacatttctaaaagatgctagacactattagtacctaatatatagcaatgctcttaagaaaaaattaattctccaactgtatgctaaatttgacttatgctaaaaattgtaccaaatttaatccaaaatatagtagtgtgccaaatttaacacacaataaatacatattttttttaattacaattttgtcatttaataagttttaatatattttttaattacaattaatattgtcatgatttataatattaaatatgaatattgctattggacacctgtctaacactatttagagatgacatcttataattagttagtaatattttattattttaagatatatgtgacttaatacttaattacactaataacgaaatgacaacgaaaaagattctaagcaccatgcattaaagtatcattacaaatataacatttgtttatattttagtgctaaatttagcaaaatatttacattttatattagaaatagtcttagtataaaaaaattaatacaaatatattagtggtgttagcacttttaagataatatctattcgagtttaatataataattttttaaaatattattaactaattataaaatgtgtagtattaggaactagtggcacttacaatcaatattatagcacaatctaagggatagttgttaggttataattaacctatatttcgggtctttaaagttagcattatctcgtctattggtgtcttttggagc

SEQ ID NO: 123513 - DNA, 1547 bp, Cannabis sativa
ctaaattttcacatgtaataaattatgtcttctgaactcaagtcctaaaaattaaattccctctaaactattgagatcgttggattcaagaatttttatctaattttatattagaatcctaacataaatgaaagttcatgagcatgatttggtaaatattaaaatttagaagtaacgagttagtacatattaaagttcaggagacacaatgtaattagtacatgaacaatcattgcattagtaaaattgagtagaattggataaaagttcttaaatttaactatctcaatattttgggaaaaaattttaacagtaaaaaaattgtaaggacacaacttagtacatatcacaattaaaataaataccattttaaaccctgtattttataaaagttactaattagaccatttattttgttaaatgacaaaatagatcttgtattttctaaaatagtacaaattagactcaaaactaaattttttatcaaaataatttttaataataatccgatctaatagtgttatgacaaaactgtttatattttctatatttattcgtgttaagaattatttttaagttggtcatattaaaaaaaattgttaaaaattaaactcagaatcttatttttatcatattagaaaatataagatctattttgtcattcaacaaaataaaaatccaataataatttttataaaacacatagtacaaaataataattacccaaaaactaaaaatcttaattaacttattaaattggacagccatatgcaacaaaaggaatgtaataatatatataatataataaatagagaaagagcttaataataggacaaattattatgtaaggatattatatgtataaagtgtgttgtcatcactaaattctaaaggaaggtacatctttttgttggtattcaaattgacacacaaacaagattattggtaaaatcattaggtaattttgaaatagacaaagcataaaatattgaccttattaatataaggagacataacttttttgtagcagtgtttagctacctagttaatgcttaacacagacacactactactactacacattcattattcattcatatatatatattaaatagtattaattacaatctattattatataacttgtggatatattattttaaagtgatatttactatagttacaatatcatccttttaaatttttaaaaaattttaagtagttgacagtactaaaaacaaagaacttgacattccaatttactatacgtgcatgttcagaaaacttcacatatttttcgcaatgtaaattattcgaaatttttcaaaaatttacaagaataatgttataagcataacagacaccgccataaaaaaaatttaaagaataatattgtaagcatagcagacaccgccaaggaaaattttgaaaaaaaaatattcaaacatgtattttcgaacacgaagatagttagtaacactcctcggatatgattttgttccgtgatgtactttcacggaatgtattccgtggtacattagatgggt

SEQ ID NO: 123514 - DNA, 1628 bp, Cannabis sativa
aacaatctcaatagtttagggagaatttttaacggccaaaaaagttcatggagcacgatttagtacatgtcaaagttcgggggaaaaattactaattagctttgtatttttccggaaattcacataacaactcacataataactaacgaaacaatttaaattgcaattaaaattcacatagaaactaccaaaaacaaccccaactaaaaattaaaaataataaaaaaaaaatagtatatatgaaataatttcccaataaaaaatatccatagataattcagaagattgaccaaatcatttcactcgttttgtactcattcagatttggatgatcaaataaatgaagcttaattaaagatatatgatagagaagaagaggaggatataggttggtatatccaaacctctttagcacatgggtggcgccggattcacaattaagttaattctaacaagataacaaaacttaattagattgacttctctacatttcaacccaactctcaaaaatctgtctaaattctttgaaataatttgttgagagaatatataaatttatttaattagtcataattttagttaggtttactcacctatatatctatacatatatagcaagacaaccctgagtagaagaaactgatacttatttgtgtatatattgaatataaatattttttaactaagtaaacatatatactatacatttttggtctatatagttctttattgttaaggagtatttaaataaagtttttgtatacatgatggagacatcagtttatcaagatagaaaatatttaataaaacctctataatatgttatatgtatatataggacaaattaagtaactataagagggtggttccaaaatccaaataaaagactattgcttaagaagaatactatcacattttttccaagttgatcaatatatatagttgtaatttggtactttaattttataaggagagtcttagggttgggtatgatgagttctacacgcattgtagtcataaactaaagttattttcatccaattttaatcttgaaaggcacataaaaatatataaatatgatttaaaaaatatattttaaatatgaattgttaattgcccttaatattttgtctaacctaataagacggctaatttgggctgttaagtttggcaatcagtttaattcaaagtacaattaagagcttatcgattgactactttcgtctacatattatgtgagcattgctattggacaccagtggtgtctagtacccttaagacgtgtcgtcttgcaattgactagcgatactctctaaaagttattatattaaattatatgagacccgatactaaattaaactaatagcgatatcgacacgtagaaaagtgtttggcaccactagtaccttttagcatttctcatcatattatatatatatatatatatatgaaactttattatagatattattagtttattaaatgataattgattttgatttattatgtattccatacacattctatatgggttatatacatatattattccacatgcatatagctataagagtaagccacgtataattatttattatgatttagtctcaatcaatcagtaggccatg

SEQ ID NO: 123515 - DNA, 909 bp, Cannabis sativa
  modified_base (27)..(41): a, c, t, g, unknown or other
aggatgttaatgaaacatacatggtannnnnnnnnnnnnnnggtaaaatatttccaacaaatataataaaactaaagaaaataaatgaaatataaagattgagacaagaatttttacgtggttcgagtattaacaaactctagtttacgggtcaatcttattttggtagaaaagccttcgagtattacacaagtgttcttgcattgtttacaaaccctattcttggccttagcttgtaaaaaatgaattatgaaccctttgcatgaaggattcctattatatttatagattagggttttatgtaaacataacctattgatggggtaaatacaagtaatgtattgatattgggacaatttggagaggcccatcccgtgaggctattgttatctgcttacgtataatctgcttgacgaaaaatagaaaacgtgtgtcatttatgcgtgtaataaatgtagtttaatgactgcttaataatcgtcatattttcttatatagaatgcttaatttttagggttaactttagaaacaaagtcctgatatgatgggattcagtattaaatgagcatcaaatcaaccttgacatccgtaggctgatttatcacctttttggaaggattgctggtaggtattcgggtgctctctttggtggactcttcttattgcctagacaagatgtctttccagaacccgaatagcccgacttagtaaatttggtctattatcctgattgggcttataaattaggtctttgttaactgaatttgggtcttaaaagtacacatgtctctctttcaaaaatactgctaatatttgttgggttatatgccctaaataaaactccatttcaatgtaatctctattctttaaatatcaataaagaaacagaagtatttatcactcatttgt

SEQ ID NO: 123516 - DNA, 929 bp, Cannabis sativa
  modified_base (63)..(64): a, c, t, g, unknown or other
cggccctgggtatgattttaaaatacaaggtactaaataagcattattaaaaatacagggtannaaacttgtatttagataaaatatagggtaccaaatgtgtagatactcttctttatattgttctttaaaacacatcacttgttggaccatcatcatttttacactttttcacctcctctctttttcattttaaagaaaaactagttttgaaggagttgttgggagtggtctaatagagtgtcttttgagtttgggaaagaatgtcttgaagcttttcaaattcttgaggaaaaattaatgttagtaccaatagtcactacactagattgggagctatatcttgaaattatgtgtgatgccagtgactatggtattggcgcagtattgggacaaagggttgacaaggtatttcgtactatttacaatgcaagtagaactttgaatgatgtccaactaaattatgctactacggagaaggagatgctggccatagtttgcaagtgacaaatttcgaccttacttgattggaaacaaggtgataatatacacacaaactattcagcaatcaagtacttaatgactaaaaagaatgcaaaactaagactgattcaataggttcttcttctacaagaattcgatttagaaatcaaagataaggacactaagaatttagtaacagaccatttgtcaaggttgaaactagaagagagccaaaaatagtgagtttgcaacttaaaatgttcatctaaatgtatttacttataatatttttagttttaaatcaaaaaaaaattgtaaactattttcctagccacttactagtgaaaattaaacattttatggatttttaaacaatgtgcaaaaatatgggtttttctccaaaaaaaaaaaatcaaggaaaaattcaaaagtaaaatatatatata

SEQ ID NO: 123517 - DNA, 1087 bp, Cannabis sativa
accacgtaaaaatcctcatctcgctttcttacagctcactactataatcatattttaatagttgccgaaaatctcggtcaactgtagtaaatatatcaaaattcaaaggcaatataatatagccttaagcctttgtttttaatttcacaaaaaaccttgcttttgaataagtttataacataaacaattaattcttcctttgaagataagttgttagtgctataatgtttcctaaaatacttactaaagtaattaggttatcatagtgtgataaagttcgggcatatttagtttgccaaaagtaaaaggtggtgcaccttgttactttactctattgtattctgggagagagacgctattaaaaatctctagcaccaacgggagaagaaaaatttgttttaaggaaacagtgtgctacacaggcctcggatattttctaaaaatttcacggttaattttttttatatctatatattagttattgaaatgtgtagaatatatttaaacatattaaaagatgtatattaattgtattttatcatcaagtttatgtaaatattatattagtctagctaaattgtgcaataggattaagatcaattagaaatgttggactttaagtcaaggttttttcctttgattttttgtcttcggtgttagctttaaataataattttgtgtatcacattgaaatatatattttttaaaaaaaaaaattattgcttaattttttggggcatctctctcaagtctcatgttagtcataattttaatgttgttgtttttggattggctaaacatataacttttttggattgaaaaagccttctctttccatatgtaatgttcatgacctttagttttttttttttcaataaagtgattatgaaaaaaaaacaaaaataaaagaagaaccgaattacttactacaaacaaattgttatatttagtgacaactttttagttacaacataatttttttttatgaatgaatatgatttttagtcacaacaaaataatactgactaaaatatagtttttatatacaagttatcactaatttagttttagtcacaacaagtattgt

SEQ ID NO: 123518 - DNA, 2674 bp, Cannabis sativa
  modified_base (1481)..(1496): a, c, t, g, unknown or other
  modified_base (2020)..(2027): a, c, t, g, unknown or other
  modified_base (2273)..(2273): a, c, t, g, unknown or other
actgggcagctgtccatggctggccagccctatactaggcaggggctggctgcccgtgattccctagttggttgatgttgttggtgtgttgaaaggaggtagatcacaccaattgttggagtttggtggatctagatacatgaagtgatcagtttcacttctaaaattgttgctttcggtgtttccacctgttctcagttctagtcggttgaagattggcctttgagtggctcgctcccctaagggagggagtgtactcccctagtagactagaggtatacctgcaagtttttggtcggccaaaggttggttgatgggggctattgttgagcctgagatccctagtccacctctcagacccctagttatcgagatttgactgttctcgccattagaccttcatggcaaggcctatcctccttcaggtaggggaaggtctatcttggttcctgaagaacccggttggtcagttcgctgatataccctccctgatctatcaactagtactccttagaatggatctttgattagatcctagcctctttcattgattctatgattgaattaccttatcaggtcactgacttctctgttgtggaaatccagctccacctgatgagatcagaggatgtactcttggtcatctatccctctcataaattcacgtctttgttttgtgagtgtatcacaaccaacaacgcgtggttcttcagtttagctgacttgacaaacgacctctctaagtctggctaacttgagatcttctcctaaatctacatggggctcgaaattggtagcctcgccaatccctggtcttgtctctcctgcatagttttagggacgacgttcggttgttgttcttcggggctggtcttgtcactattccacatgtactctatcttggcttacgtcgacataccacgttaggtggacaaaatttgggataatagggagaaagaaggcttaaggggggaaatccaatgctttattgccgaagctgccaaggtaggaaaaatgttcaacgatgaacataagttctccataggtgctagaatatgcgctgggagtagattatgggggaatatgttgaaaagggaattggatgactttaaagacttctatgagagagcaggaaaatatatctgcatcgaggaaggaaatggaatcttggagacagacacaagaaaatgtactttgggaggctcgccagattcttacagggtctactaggcaagagcctaatgctcgtacatcccagtaaagcctcccttatacaacccataaaaataaatatccaagatataagtaaaaatccacaatgaaagaaggagttcataacgatagcaagttctcttttagtgtgctgcaataaatcaaagaaggtactcatgaccaaaaatagagatcaaatatccttataactaaagctcattatttgaaaggttgtattttcatttgatatatattttaatctatttatnnnnnnnnnnnnnnnnttaattaaaattactaatttagataactgtaaataaaaattttaatttaatatttataaaattataccttaggaagatctaataaataaaaatattctccatccttagtattaattttccaataaatattatgaaaaattacttaatttaagttggtcgaaaattaattaaataattaaatttgagcttataattaattttcaactcaaatttaattttttataaatatatattttatagaattcgaaatccaatgtatttaaaatgcaatacattttcaaaatttactttagaataaaataaaataaaaattggaaaaattactctaatttatgttggtctaaaattaattaaattaatttttaacataaatataattttcctatttaattaaatctctaaagataaatatcaaatatataagtgtcctgaataaaatcaacttaaatattaattttccttataattaaatatatctaaaaaaatactaaaaaatctacctagaaaatatctatctagataannnnnnnnctaattacttattttctaattaaaacattatattttagtctatttattttaaataatatcattaattaaaatcacttcaatccaagttgatctaaaattaattaacaaattaattttcaacctaatctaatttttaaaattaaaaaatttcaaaatatcaacatttaaagaaatgtatttcaaaattgtaagaaaaatgattctcaaaataaaataaaatgcattctaaaaattattctaatttangttgatctgaaattgaaaaatttctaacttaaatataattttctatttaattaaacttattaaaatagaaataaataatttagcatcttgaataaaatcaacttaattattacttctaatttaatatctaagaaaaatattctaatttaagttggtctaatattaattaacaatttaattttaacttaaatatattttctaatatagttaaatttcttgaaataaaattaaataattaagtatcttgaataaaatcaacttaattaattattctatgtaagttctaataataaatatcctaatttaagttggtctaaaatcaattaacaaattaatttttaacttaaatatatttttctacttaattaaatactagataaaaaatattaattagttactag

SEQ ID NO: 123519 - DNA, 1055 bp, Cannabis sativa
agtcataaataattttttgttgtgactaaaagtaacatttagtcacaaaaaatttatattgtgactaaaaggttgtcactaaaagtaacacttttttatagtgataatttatattttttctttgtctttttcgttcttttaattaattattttttttttgtatttttctttattttaattaataaatatatgtaaagatataatatttaattaatataaaaaaaatataacttaattatagtgtaatataaatatgtctgcagatggatcgtctttctcccaactactcaatctatgtctgcatatatggatgtcttcctaaaatcctattgaatctcaaaacccagtcatactatagaatttactgtaatcatctataaaatgtatatagtacctatatcggggtctcaaaaatccctatagattaattcaaggggttgagagactctaatatgagatataaaacatggtaacgatcttgacttgtttacatgcttcacaaaatttaaaattttttaaatttcatgatatattcaatttagataaaattttgttagagattttggagctagatggccctactgggtgtgccaaatattgacatttttagattgaacaagaaaaattgtaagggacacatgtgcatataaggaagaaaaactatctttgttcatgaaattagtattacaagcaatggaattggatgttacaacatcaaaattacaaagtaattaaatttcaagatgaagagagatttgactttggtttagtggtagctagctgacattgaagttgcacacttggaggtgagaaaattttttgagacagcatataaagtctatttttaaccctccccctagcaagacagtccttgttgccttgcccttgacaaaataacaagtaaagtgaaattccaattagaacacaatgttatattgagtgagttttaacttttactgtaaataactcgagctcagtgctgttcaactttagccttatctttatttacacatgcaaataatatttgtgagtcgacagactcagtaagaaaagca

SEQ ID NO: 123520 - DNA, 785 bp, Cannabis sativa
aaaaaaaaagcatgagttatggtctctttctcacggttacaaatagagtaaattgtcgaatcaattatgtgtctcgtgtggagaatatcagccactggaagacaatcatggatggcacgccgaaggaaaattcgaaccttcgaaggtaatgacagtccccagaactttttcaaccattgaagagcttgatgaccgctagctgaaggtgattgatcttccaagtgcatagccaaagcataaccagacttaactgtatatattccatttgattcatgatgccacatgagtaagtcttgttgctcaaatagagtaagcggggatactaagaattttgttgacatctgaatccaaaaataaagttcttaaaagagaatgatcccattgtcgagaatccaaaagcaagtctgagactttcattgttatgtcttgtcctcgaaaaatcaaaggcttgaaggaagtgtaacctggcagccaagagtctgaagcacaaagtatattagcaccaatacaaaccttctaacggagacctttagcaagcaattccttaccccatacaatgcccctctatgtcaaggagggataagaacccaaatcagcctccaaaaaaaattatttttgaaataccttggctttagaactcggcaaagcagagaagaaggattagaaaaaattctccaagcttgctttgctaataaagcttgattaaaatagacaaaacttttaaaacccatcctaccttctgttggaaattattttaccaggatcttagtgttggaaattatttt

SEQ ID NO: 123521 - DNA, 1761 bp, Cannabis sativa
tgccatgaccttagcatcttcactgagtgtctttctggatggtggcctctaagactcattgaaggtaatcctttagaggttcatcttcttgttacttaatgcaaactaaatcattaggcttgattgatctgtgccttgatggagagaattggtcatagaatgctctcttgagcatctctgaagaattgatagatcccgaggaaagcttgagataccaccgatgtgcatcttctaatagcgtggttggaaagactcaacaatgagaatcatcccgaatgccttgcatgtcagtttgtacttcaaagttgtagatgttagagagagggtcttctttgccagtgtatggatgccacactgatttctgaactttgaggggatctccaaagccttgattcaattcaagagaggagaaaactactctcaatctaactcctactctattgtctttggagtagtgatacccttaaccaaagaggcaagggtgtcaaatttagccttacacactcttgtgatgtgtgtatcagctggccacttcctatcgatgttgttatgtaggctcttttatcttccaagtcgatcaaaggcattgattaacctacgccttgtggttagttcatagtcgtgtgggcttgttgataactggagggattaatcttgtatgccaatagagtcgtctctagagtatttgctccgtgagcagctgctcgtagtattacaccgactattccttcaaaatagtcttcctcagagtgacatgtgtggaggagttggaccgattgttgaggtttaatatgtatccatgcacccatgggaagtattcgtactgttggtcgtcaagacctcacgcgaagtacctacagcaagcacctcgttcatcacaaaagtatttttgagtgtagagtagttcattgatcttcactctctgaatctcatactcttcaatttcgtggtagagcttttgggggtcttcctctaagtctaactacaggtccctttccctttgtagggtcacagggtggtctagagtcattagacttgtgaagagaatccgatggaggggattggtttcctgtatttttttgaatttcttcgaatagaattacaattggtcctatcaactacgtgtggtgaacctataggcctatgatctcgagtttgagtccttttggatgctcactcattgcttgttttcgtaacaggtgcttgcttcatattaggcaaagatcccatagatccacgttttttagtctgagtcctttcggtcgctcgctcgtagtctgcttccttatggggaatcttagtgcttgctatttgctgagtagtggcatggatactaggactagtagtgttactttacattttcattgttgatttcttgcttgcacttatgaattccttttgaaacaaagttcttggtagaggaatcgagttataattggggaactcgagttattgctctcgatgaaagcatcgaaaatattaacactaaagagttgccaatatcagctcgctagattgacgagataattaataagtttaagtaaataatttagagagacaaatttatagtagttcactccccatgtcgcgatggtaatggagctacgtctactttgagtttttatttttcacgagaattacaaaaaaaaggctaagtgtttaagctctagtttctagagagagtaactagagggagatgctcactagatggtattatagaaataggctaagtctcagaagctccaatttatagagagagaa

SEQ ID NO: 123522 - DNA, 1959 bp, Cannabis sativa
  modified_base (28)..(74): a, c, t, g, unknown or other
ttaaacctttatgtgtttattttcattnnnnnnnnnnnnnnnnnnnnnnnnnnnnnnnnnnnnnnnnnnnnnnnaaatctagatcctagtaaaacattcccaacagttcagatacccccaaatgttcgtgactgaggcagaggccctacaggcaaggcacgcggtcgaggtgatgtcgacccgccgcaggctgcctaggaatggaaaaataggtttgcagaaatgcaagccagaattaatgagcaaaatgaagacattagatgtttgagacaacagggttctccagcgatccctactccagaaattcaggtagctcccgccccaactgtgcaggtaggactagttgttgcagtgaaccaaatggaaccactgaatcaaagattccgcaagtaggcacctccagtgtttctgggaggtcccgatgttatgaaagtcgagcagtggctaatggttattattagaatcctgaatttcattggcatcaccggcagtgacagagtggcctgtgccacattccagtttcaagaagatgctctagtttggtgggacatggtgtccctaacttgtgatgttaccactataatctaggaaaagttccaggagttgttcaatgcgaagtattacaatgaagcgatcagaagtgctaaaagaattgaatttactcagctaacctagaaggagaatatgagtgttatcgaatacacaactcagtctgatcgattggcaagattggccttgggaatagtgccaaccgatttcagtaagaaagaaaaatacctggatggattgaattcgaagataagacatgaccttatgatcaccactgatgacaacaccacctatgatgatatggtggggaaggcactgcgagctgagggcgcagtggagtgcactcaggagtcctgagggtctcaggttgttggtggggcccctactcttcctacctctggttatggtaggggtggtagtggctcgaccattgatcagaaaagaaaggcacccattgcatttggtggcttaagccaggacaagaggttcttagggaaccaaggtcgaggcaaccgtcaaggtagctctgaaacccgatacacttaccctgaatgccccagtagtaaaaagcatcatctgggtgagtgtagaggacaagggtgcttccagtgtggtttgcagggcactataaaagagactgtccacagtttaagaaagaagaatagaagactacagcaaaacccgctctagctagggtgtttgctctaacttaggcagatgtagaggctagcccctcagttgtaacagatcagctctcggtcaacaactcttacttcactgtattatttgactctggggccactcactcttatgtggcagccaaaatttttagttagttgggtagaccgcatgatagttgtgatacagcgtttagaaccctactgcctggcagaaaattagtcatctccaaaaggtggactaggtctatgccgatcagaattgaggatagggagttgagttctgactcaatagaaatgggtttggcggattttgatattatacttagaatggatatcttatccaagtattcatccagtattgattgtaaacggaagatggtaatcttccaaccagagggtgaggaaccgtttgtttttggtgggattggttcagggatcctgtgtaacaccctaactaacttaggtatgttaacgtgatttttaacttactgtgcatctcgttactaatcaacgaggttattgaaaatcatgattaattaattaaaaatataaaatagcatacataaaagattctgggatcccgtttacaaaagtttaactatacatatacaaaattctgtcgcctaacgactatacaataaaagtccagatgtctcaaagatcgtacgctctaggcctaactgccccgacatgtacaacctgttggaatttattttaccatgatcttaga

SEQ ID NO: 123523 - DNA, 923 bp, Cannabis sativa
aaacctcggtcaacacttacctttgcctttatctacacatgcaaacaataattgtgagtcgacaaatttagtaaaaaaagcataatcatatcataaacataattcgaattataactaggctctcatacacccaattataaccttatctcgcgtcccatgcgtactgagtctagaacattcgtatgatagtactattgaccataatatcaacctatactcggtactctagtcgtactaatataataacatcaatcaatactttgccaaacatatatatgttggtatttagtacaactctatgtatactaatactgccattactgatatgttatctaataggtattcataaacatgtacactaaacatgtaatcatatatgcagactattatattaatcttaccctgattctgaattcaagtgtgccaatcaaactaagtggaaactgctactcaacggtttacaagcctctaaatcacaatatacgtaaaactgataagtaatatgctaaatcacatttcagttttttcctcaaaaaatctgatcaaacataataggaaactcatacaagatcagattaaacacaactagttagatagaaaatgaatgagtaaccaaacttactatttttaccttattttccataaatagaaaaactagacaattttcttttcaaaaataaattaattaatgtaaaagttaaatacataaaatatagaaattaatttaaatttaataatatattataaaatattttttttgtcacattaaaaatactaaaaatagaattaacaatttatttattctattgatcattaattcgagtagggctgtaccaaaaaattgtaaaccgcccaaaccgaataacccgtccaaaccgaaccgaaaaattcgataaaaattacaaaccgaaataacccgaaaa

SEQ ID NO: 123524 - DNA, 779 bp, Cannabis sativa
ggctttccaaacgcaccctaacttatgatttctcctctcactaatagaacatcaaaataataataaaaaaaagaaagttaattaatgttaaatatatgaagagttcaataaaatatcattagacaatttagacttaattctatgatgtaaaagctataatttaatttgtgctcatctttgttgctgaaagtcacaattatatcttatattttcttatacttacaactaaaatttttagttatattatacttgcaactacaaataaaagttaaaattttattttattgttaagtattttcgttctctttgaaataaaaaatagaaaataaaaattttattgaacaaagccttaagtttcgcaaaaattctttagtaatgttctcttgcaaggtatttttgtaatttaaaataatttattttaattttatggcaagtgactagaattttaaaataaaatagaaaaatgtaactaataaacgaggaagaatcagaatcaatatttataatatgttatacattaaaattatttgaaaacataatcataatgatcttttcttatttattttatgaaaaaaatataatcgaaatgcttaaattaaccaaattatctttatttattaaaatataacatattttcaaatgacaaaattctcctcattactttaacgacattccttaagaaattgtaaggaaatctgatttaaaattaaaattcttattctattaaaatacattggttaaaaattgaaaaaattattactaatatatttttaaatata

SEQ ID NO: 123525 - DNA, 1315 bp, Cannabis sativa
  modified_base (820)..(821): a, c, t, g, unknown or other
ttttagataaagtggtcatatatttttaatggtaatatgtattagtttaaaaataaaatattaagtatatataagtataaaaaatcaaatttctcatttgaaaattctataatggatataaccgaattcatatataatataatacatgaaaattctacaatggatatataaaagggtctatccatggatctctatttattttggcatttaaaaaagaattttagtttaatttttttttttataatcgtgtacgttatagttatttcagagatcttataataaaactttgaaactttcggagaaatttaacacatcaaaaaggttcaaatagtctattacgtacgtgtaactcttttattttatacgcgtgtaaaataactataaaatatacgactatgaaaaaaataaactaaaattcttctaaatgccaaaatagataaaatgtggattggtgtacctttttaggagtgtgcattgtagaagcaccttataatatatataggggtgttcattagatcacattcaatagacttggattcaaccgatctaatctatttatttaatgttagattttgtcatccgatccaatccaatcaaattgagtcatccaattcgatctgatccaatatattggattgaatcagttccaactattggatgccttaattggttttctattagattggatttgatccatccaatttaatttaactaccatttaagttgatttcattaaaaatatatatatatatatataaaatataatttaaaacctaatattccaacatacataataaacattagtttagtccaatctaannctcatgatctcataataaaactgcataaaattaaaatttattcaatgtagcattttattcgtgtttaggaagatgagaattaatattttaaatttaaagtttttcttctttaatctcatgtgttaaatatatattaaatatataaaattataaatgcattttaaaactatataaatataattgaatgattattagatgatagttcgatcagtttgattatccgtaagatcagatgtcccatctaacaattgatataatctgattgaatattttaaaatttacatacgattcaatccaattatgaatggatatccgattatattaaatcgattgttctaattagattgaatgacattctgtacacctctatatataatatatattagctcaagttaaatgactatatatatttaaagctatatattcatgatgctataaaagcaaacttattagtacgtacgtattcatacacgtttagtttttttttttttttt

SEQ ID NO: 123526 - DNA, 3796 bp, Cannabis sativa
tatattttttttactcacttaggtttttcgataatcaataatttaaggagagaaatttttagtacaattcatttcttaaattaatatagtgtgaggtgtttgttacttttgattattcaattcaagaaattttaacagttgatacttaaaaaataagttgtaattatcctattatattagttacttttttattttattatttttcttattttgatactaatatttttttttcttatttgtagatttattggtgggacaaatatactttaggggtttctttttttatattaaaattttattatctaattttttgggccatcactttacatattagtggcaacattatatgttgtgtcttataaattagtttaacatgttcttaagacaataaactcttttaaatagaaagaatcacttcactttacttctcactattttttttctaacataggttaccattaaaaaaatatatgcacttagtcatacgagttgaagtagccaagtggcaacacgtgtaattatatacctacactttaccaaattatatattaaaattaaactatgactaaagttattatataataataattttttggaatgaatttactaaaattgttcttatttcattatgggtcatactataaatagttatagatagtgatcgaaaggttttgtatgattgtaaattaattgtttaatataataataataataatatggtccgtacatccacagtggtagggtggctcactagacaggacaatttaacaattagtatcatcacgtgatcaccacaacttctttatccccacacacacacaaaccaatcttttcccatggggtataccccacagtaacacaaataggcttgcaacttctcggcccctttaattatatatttatttttagaataattgaatcataaaatttttaatttctttttatactatgttagttttatatgtgtattgtgctaagttgtcaatgttattttacagttattttttagttattttactgttgtttttagttattatattatgtgttctattgttgttttataaaaacacagtatttttgaaaagattttcgtgtgacagtatttttgtaaaagttaacccgaatttcagtatttttgtaagtttccctttattttttcttatattgaatgtggttatttaacaaaaattgttagtttaacgattttttttttattgttttcttataaaattaacagttaaaactaatgtcgttaaattaatcaattaattattttttttaaaaacaataactttaattgtctaaatttaatttatatattaaaatataacctagataagtatttaaagtatcaataatttttttcatataaatcttaatttaaatttaaattaaacgttaattcaattaattaattatattttataacaaatttattaattatattgtttaaaatatctaaacttatgtgtttaaatttattaatcatatttaatagatgatgttcgttgtcttctgtccttttttcttagagttactgtcattcatgttcgtaggcatgctaatcaagtggcccacgacttaataaagtacgctctagagttggatgaaaatgtcatttgaatggaagaaatttctcatcctattttctctattgttgtaaatgacctttgatttataataatagtgaaaatttctcaaaaaaaaatatctaaacttatttatttattttcaataaaattagttaaatatattttcatataaataaatttaaaattagtttaaattttatatattttaaaaatataattgaattgaattagatttaattattattattatttaattattggtgtgttctttttgtccctatcaattatttcaggacacattacttatgcggctgcatctggtcaagagattaactttgagaagtcggttatcacttttaatccaaatgtgcaacaggtggattgagatggggttctgagagtattggggttgacataagtgtggctactcatgacaagtacctgggcttgcccacggtgattagtagaaataaaaaaaaggcatttgaggggatctgtgagaaggttagaaagggtgtttggggatggaagcaaaatttcttttcaactggtgggagagaagtgcttatcaaatctattcttcaagctattctaacatatatgatgagtgtctttaagctcctagtgacaacttgtaaaaaattaaagtctatcgtaagacaactctggtggggttcatatggtgataaaagaaagattccttgggtgaaatgggaaatattatgccagcctaagacgatggacgggcttggatttaagaatttttaacttttaaccaagctcttttggctaagcaagtatggaggctatttctatatccagatacattacctgctcgaattttgaaacaaaaatattttccaaattgctccatcctagaggccactaaaaaagatggttcatctcatctttagtcgagtttgatctggggaatggatttgcttaaatgcggtcttcggaggtccattggagatggaacgcaagttagggcttttaaggacccttggatcccgcgttcgaggtttttttagccaatcacgaggagaattaatgatgattgtagggtgagtgaattcatccttccatctagtgtgtgggatgtggggaagcttcaacaggtttttttgtcgatggatgtggacattattctatctattccattagcgaggtgtgaggcaaaagatggttggtattggcactatgatagagacggagtctataatgtcaagagtggctactctttggcgtggtcgctctaggttaaggagggaatcacagattcatccaggttaactcgttggtggaatagagtatgaaatctcaatatgccactgaaagtgaaagtttttgtctggcctatgttccatttggctttaccagtagcaacacaacttatctcctaaaaagttcatgtatctctttattgttcttgatgcggagaagattttgaaactcctgacactactacaaaaaggcttatagtgtcatttttcaaatgacatatataataattgtgtcagatcgtgtaaccgatgtatatacaagagacgcaaacagttactctattatgttagttcgtaactagcgacattaaatagtactgtcagttttgaaccgatgcaatataaaataattataccatatacgtcggttcataatcgacactcaaccataaaaacaaaaataaaaatatagatttgggcactcaaactatcttgagcccaaatctctattcaaaatactaaatacgaattaaagaacataaactataaaattgaataaaaattaaatctgcaaaccaatatatatacacaaaaattttaattagataaaccaatatacatacacacaaaaatcagatttgccaataatcaatataaaagtgaaaaaatttatggatctctaaaactccatagccgccgagagtgagcaacataactcataaccatggtgcatctgaaaaaaaaatgaaaatcaaagagaagaagagagagataaagggaggagatgcttactcatctttcgtcgttggagaagaacacaataattatggctcgatctgcgttgagaaggtggaggatgtcatggtcatgcagcgtcgtgttgctcctgcactaatgtgggcagctccatgtgagaggagagagcttgtagtgagtgagtgagagagagcttgtagtgagagagagagagctgaagggggc

SEQ ID NO: 123527 - DNA, 599 bp, Cannabis sativa
  modified_base (490)..(496): a, c, t, g, unknown or other
agagagagagagagagagagagagcttgagtatattgctctttgtacttgttaccataatctctctcagtcttggtcgccttcttctcacgagcaacaactttatctagagactcatttactctttgcttgataatgaactccatctttagcattaacatctgctagagcttgggtagcctcgtatcttctttgttcagcattggtgcattttgacttcagtagctcaagttcacaggccaacttgttgaccaaagagcagctcctctccgccactaggctaacttgtaaaaagagttatgaatgaatcagacaaataaaacaggcatatcttttgtcttaggcaatttgagtgaaaattaacatacaatgttgacttgagtcctcatagtatctaccatgtagacggggtctccactcgccatcattgcaaacctatcagcaccaagcttacaactgatagttgtacttgttaattccatttttggcannnnnnnttgacaaaaatattttattattcattgtatattttcggctggtatacattaatatggtttcctatttggtgtattcaaacttgaaaggaaagttgtctagctt

SEQ ID NO: 123528 - DNA, 1907 bp, Cannabis sativa
  modified_base (1842)..(1848): a, c, t, g, unknown or other
ggcaaagggtaccatgcccgccgaggtggacacggcggggccagccgatgagcctgtggaaaactcctcaatgttccaagggttcctagtccttcccccaaaccaaatgtcatcgtaggctaatgaacccgaaacaagcttggccaccagcactgcccctgctgacttgagcctcttgtagacccaagcttcagtgttgaggacttgattcttgaaagtggtcgaaccccatgttgttttgtattttggtactgaaattatgtcctttagtccgtatggaataccatgaagaggacctaaatagactcctttgtcaagcaaataatctgccctttttgcttgtttgtatgctaattcttcggtgtaagacaccacagccttaagaacaccattgtacctaataatacactctgcttattttttgcttcaatatatatagacacacaatatcaaaagtggtgtttaccttttcaatcttctcaagaaaatcttagtgagctccaaagatgtaatttgctttgtcttgatgagttgtcctaactcagtaatctgattaacatcatcaaatcaccacatatataaataaaaacatatatattgataaccttaatataaagtagttagttaagcatgaagtagtgtttacagtcatgaaggcaatatcttcatcatttgaaggccttcgtaatagggcagaggaagaagggtatttgaatctattggattttggtggttggtgttgactagttccccattgtggattgaagaccaaaacagaagggtactgcaaacccccattaatggaagccacaagttttctattggctcttattatggggatgttaaactcctctgcacccttcacaatctccaacatctacaacatcaagtaactaattaatcggacccccataattatttaactgaaaatcatatatttatacataataataacaatattagtgtttatgattaatgacctgagtgttgttgaaaaagctggcatcacttaacttaaatgcacaggtgagagatgaacattgaccaattttagctggacattcagtactattattgtcaattacattgtcctgtgtcacaaacaagtacacatcatctttatttaatcagatttgcataagattatgagagattaaaccaaacaaaaatgtatattagtaccttttgatgggcaaaaacagagttgcgatttccactactaaaaagtagtagtcccaataaaattagaagtgacatatttagtgataaaagttgctgtagatctttggttttatgtcttgaatgaaagaaatttcaataaatattttgtagttgagagaacattgaaatgtgatgagttgaactgagctatttagatcaatgtccaaattttactttatattgatcttaagtatcgtgtttgacgatggggttctcttctctctcattagtcaattttgggtcctcactattaatattatatattttcttactattttaatcttatatttatcaaattgtgccaaatgaacaccgcaccaaattggtgatagattaatccactttttctttttgagttgactttgtactacgaagattttagaaagaaaaggtatttagtcatttcattcgttgttttccatatgattcgtcgagtttgggctcttctctaattggtgcatagcctgtcaagtttaacaatattattgcttcaaaacaaaaaaaaaaaaatatttatttatgcttcgcaaactttgacatatactaaatcatgcctctgaaattttataatcgttaaaaatgtctcttagattgttgaatttaaagacttttgtctaattnnnnnnnaaaaattctaacatggatgaaaatttaggagacataattagtacatgtcaaagttcgag

SEQ ID NO: 123529 - DNA, 1882 bp, Cannabis sativa
agttcctggtaaaataacttccaacaaaagctgccataaaatccatcttgtccatttccagatcaaattttacaacctttgccatcataattctgattgaagtttgtttcaccactggagagaaaatgtcattgaagtctataccttccctttggctaaatccctttgccacaaatcttgccttgtacctgatttcttcacctgccagtccttctttttctttgaaaatccatttgcgaccaattagcttctgtcctgttggcctagtaacaatcttccatgttttatttttcttgagtgatgtcatttcttcatcaatagcagcaagctatttatccttgttcttgctgttaacaacttcataataggtgctaggaacagagcattcaacttcttctggaaaagcaagagcaaatgcaatacaatctgcaaagccaaatctgtcaggaggtttgacaaccctcctttccctgtctctaacaagctgatacccctgagatccaccttgataagtttcattgtcttcagcttgttcttgactagtttcatcttgtctagcatcattttgaatttcttcaatctggatttgcatactatctgtgacatttgtccgagtcttggttcttgtatttgattctttcattggcatttcattctcattgaaaatcacatctctacttatgatgcattttctgaaaccatcttcaaggcgcaatagcttatatcctttgacccctatcagggtatataataaaacaacacttcaaagcccttggctctaacttgtcttatcttatatgagcataggcaatacacccaaagacccttaaatgatcacctggtgcatgtcctgtccacagttcttaaggagttttaaagttcagagcagcagaagggcacatgttgatgagataacgggcagtcttcaaagcttctccccaaaattgtttacccaaactaggagctgttagcatacaccttactctttcaatcaatgttctgttcactctctgctatgccattttgctgaggtgtcttgacaactattttgtgccttctaatttctgtctcttgacaatatctgttaaacgcatcagaacagaactccaaaccaatgtcagttctcaacattttaattttcttgttagtttgattttctatcaaagttttccaattaacaaaagtgttaaaagaataatttttgttactgagtaagaaaacccaaacctttcttgtatagtcatcaactatacttaagaaatagcttgctccaccaattgtttttgttctagatgcaccccggagattagagtgaaggtaatctagttttccctttattgtatgcctagcttttgtaaatttcaacctgtaacttttaccacaaacacaattttcacagaattctaatatcttaccaagtttacctttgagtatctcttgtttttcaagctcatgtagccccctctcaatgacatgtccaaatctcatgtgacatagctttgtctgatccattccttaatttttgactactgttgcagcccttccaatgattgttttgccaacaagatagtaaatcccatttctgagatttgctttcatcaccactgtagagtcttttagaactctaagtgagctatctattttgatgatgtagcccttaagagttagtgcaccaatagatatcaagtttcttttgaggtcagggacatacctcacatctttaatggttctttctaatccattgttcattttgatcagcattgaaccaattcctgcaatctcccaggctttgttgtcacctaacatgactgaaccactgtcttgttcctgaaagctgcaaaagaaatgttttttaggggtcatatgaaaagaacaacctgag

SEQ ID NO: 123530 - DNA, 1605 bp, Cannabis sativa
  modified_base (1569)..(1573): a, c, t, g, unknown or other
aacatacttgttagtacatatacttgttagtacatctaagatcctggtaaaatatttccaacagtaggtcgctcttaagctttatggacgtcattacctaccatttctgctccgccagcttcggctagggttatattacttgccccgagatcgggagccctttaacctctagggctcgtttctccgcctgtggacggacatgtcacactcacaatgcacaaaaaaggtacttgatggaagtagaagagggggaagtatgtgcactggtaaaatctcctgctcaccatcccaggatgatgaactttccaattaccttcgtagaggttgatgctagaaatgtgcacatcccccacaactatcctttggtgattgatggacaaatcaccaataaacaagtttctagagttctcgtggacaatgaaagctcttttaatattttgttcaagtttacatttcaagcgattggactcatcgaagcacatctcaccccatgccctatccaactacaaggcttgaatggttatgcattaatgccaatgggtaagatctagctgcccgtcactatcgaaggggaaaataaggtgagtgcttttaagcactaaaccttcgtggttatagactagacgaccgcatataatgccatattaggacgacaaaccctggtggattttggggcggtgacctctatctagcatttatgcatgagatttccttgtgacaatggatgcattgggataataaatggtgattagagaagtgcaagaaattgctacaatgtttcatcacggaccgtgttcatgatccgcgaggagacccttgttgcttctaggacagaagacttaatgggcacataaacggtctgggaagagtttctagatgagttaaacccatgatttaggattgaaagaaatttggagctgatggaggaggtagaggaagtaagtattagtgaggaagtcccgacgaggaccattagagttggaagaaatctaaccctagccatcaaggaaaatgttatagatacggtcaagaggaataaggacgtgctagcttgaagtcattctgatatgattgggattgatcgaaacacaatctaccacactttgaatatctgagaagatgcgacccctattcgccaaaaaacgaggcctcttgaccccatcaaggccgaagtggtggaaacggaagtggataagttaactacaaatgatttcctctaggaatcattgtatctagtatgggtagtgaatcaagcgttagttccaaaacccaatgactcatggaggttttacttagactttatagacttgaacaaggcctacctaaaagattgttatccgctcccgcgaatcgatcaaaagagctcacgttcatggatgcctattttgggtgcaaccaaatcaagatgcacattgcagatgaggaacataacagcttcaagactgaaaagggtgtttaatactataaaatgataccattcgagcttaagaatacatgggctacataccagcaaatggtaaattggatgttcaaaaaacaactagggaggaactgttggaaattattttnnnnngatctatttactatcatgtatgttggattaac

SEQ ID NO: 123531 - DNA, 1051 bp, Cannabis sativa
  modified_base (558)..(562): a, c, t, g, unknown or other
attagtaggatcataatcccacttattacctgattaactcataatataaatgtaaaccctaattatttaccattagacttattgggatattacatgcgaggattataaagatcttcctgccagatagtgaagatcgattctttactcagcgagctagttcggatgacccaacaacctcgataacccaataaaaactcgcatgtcttaagtgatcgacctattacaggatgtctgtatatgcgactcgaataggacgtagacatcttagaatcaaatattcttgtacgcatcttaagcctgggagcttatgcaagaatatgaacaaacaactcgtactatggaagacgcatacgtttctgtatttaatgaatggggccgaaactgttctccatttattgtatttacgttttgttgatttaaatgttatattcaatgtacaaacggattgataataaaataaatctctgtgtaatcaaaaggcacttgctttgtatataaatgagtgatccaacgtgaaatggataggacagaaaacccttgcaacagtggactaagcannnnntgatctgactgaaccactatactcactttgtattctttatatttccagtacgtttgtgtattcgtagtttgaatactcgccattctaggttgagtactcacataattctgtttatattttaatatattattttatttggtgttgtctaaattcctcaaacaacaagtagtgcaaaaaaacctgccagatctctaggaaggatgaaattgattgtgttgaagaactttgcgtgatgatttcaactcatagaaccttgttaggggtttaaaagaaaaaaaatttaagggagaaaaaagataaaagatagattgtacaaaacctgtggtaagtacaacgtcccataaataggaggagtttaacaactaaatgaagacaacaactagggtagtgtcccactctaggaggatttcctacaatcaataggaaaatctgttggattatttattttaccaggatcttagatctgctcacaagtatgttgtttaaaca

SEQ ID NO: 123532 - DNA, 851 bp, Cannabis sativa
gtgaatttattttatattatagtgtaatctatttgttatattattatttttattttattagagatataatatggtaatattaataatattattatataatgatattatatggtatagttgatacacatattatttttattatttttttatacatacggttacaatagctaaaattgtgggaataaattgttcaaactttcggtttaaacgattaagaattcgtgagaaaggcagagagtgtgtgggtcgggagcgtaacgaaccaccgtagcaactaatttttttttcttttcttccttcttcgggttgggcgtgttttgggttactttgagagttttcactaagtttttgagactctaagaaagtgtttgagcatattaaaacagtccaaaaacacccagaacaagattcaccattttcatgcatgttcatacatgttcttgagcgatcttgaatttgaacgtgtttgaatcgtttctgggtttacaaaaggttgtatttaagcttatgggacctaaaggatcatttttgaggtgaggaatcgaagctttaaggccccatacaaaaatttctatttttggctccattattgactgtacaccggagttggagaagatgactctgatctgatgcgttggggctgttatggtgggtagtttttgatcattttgaggtcctaagaactgtgtaaatcttccccaatcgaagggacgcgtcaaaagcaatcgggcacaaagttacactttgctggcgacaaaacggccgagaataccggcgaccgtgttctgggtagttctgaggtgtttttcccatcttcttttgtagatttcgattctacatattattttagg

SEQ ID NO: 123533 - DNA, 1013 bp, Cannabis sativa
attattgattctgccaaatagaaacaagaattcaattgattggtacttagctacagtcctcatgggaacgatctcacttacctgagtattacttgtggaaaaaaaatccatcccaagcatgatatcaaattctgctaattccatctctactaagtcaacattcaagtccctatctttggctctaactagcatagacataattctccttttggagataattaattccccgctaagtagtaggattctaaaccctttttcaataaagtcacaaggcctacccaattgattaattacctgtgttaccacatatgagagtgtagcctcagagtcaaataacgcagtaaaataggagttgattataagaagctgacctgtcaccacggaagggctggttgcagcatcagcttgagtgatagcaaacacctgagcaggttcgggttttgcctcctgcttttgctcttctttctttgcctgagggcaatctttcttaaaatttccaaccatgccacactgaaagcatgtcttctagttgcactctcacagatgatgtttcttacaacgtgggcactcagggtaagactaaccctaacgtccacatctgccttggttccctcagaagcctttgctctgtcctaaaccaccagatgccggggtagcctttcctttctaatcagtagtggaatctccactatccttaccttatacgggagtaggaagagcgagggttccaccaacacttggagtcactcggggctattgaagaatttttatagcaccttcggctcatagagccttatcaaccatttctacatatgaggtcgcttaatttgtagtaatcaccaggttgtgtctaatttttgcatttaaaactaccaagtgcttttccttcttgctgaagtccgtgggtattatatccgaggccaacttggctagacgatcaaacttctattggaatatcttttacaaggatctaaatttactaacaagtatatttttaacatcctaatatgaat

SEQ ID NO: 123534 - DNA, 1064 bp, Cannabis sativa
gtaaacttcttgcatctttaaatttgttttttattaaacgatttgccaatatagttgctcatagtcctgctagaatatcttgtttcccaaattcagcgttcaagtagatgatgttcatcttgaacaggacaacctagacataggagggctagacccgcgtctaggaccaaataaaaaatatcttatattttttaaataatttttaaaaataccatttatccgcaattttttttttcctcttgaagtacaacctttttttttaaaaaaaaaataataagctcatttccctttcaaaaataaataataataataaaattaaaattaagggaaattgatatgaatttacggaaaacccgacccggccaaacacactctgttagttgcagtgaaatgtaagaaagaagagagagagagagagttgggattgaagaagatctccatagctgcatcgaaagctatacatacaatacatacgcacatacaatctatagctacaatcaacactcttcaaaaagatccgaaacaatgcgcaggtggttccatcttcaaattcgttttctctgtcaattttttcttgcttactaaacatacctgaattctatttcactttttgatttgatgcagaccaggtttccatcaccggcagcctgggaaaccaggaggaggaggaggagcggtgaaaggtacggtcgggaggctatcgatcgctgttgtggttctcatgatctgcactattgctttcttgattaatttcactagtaatgatagtactggatctgtatcacgttccaaggttagttcgaacttcacattttttgaattttctgttgtgtgttgtggatttgggtattttattactgtttgggaaatgtggaagaaatttgatgttgaatttaattgccatttgattgtttagaagccctagagattggtcgactaggatgaatgattcagtttagggatatttgcaacataagcatccaaacctaatgattttaactgtaacacataaggcccaaattctaagttattggtctcatgtagaaacttaatacactaacaca

SEQ ID NO: 123535 - DNA, 1791 bp, Cannabis sativa
  modified_base (48)..(77): a, c, t, g, unknown or other
agttcggggggaatttttaacagtcaaaaaagttcagggggcacgatnnnnnnnnnnnnnnnnnnnnnnnnnnnnnnttactaattagcctatatataatattaaaaaaacttgagtttttaagtgacaaataggatttttaaaatttttgttcaccaattattatttattatttttttttttcaacccaataaaatttctgaactattataactaaataaccgtgttattgtgtaacatgtgtgatgtcacatgtgtcacacgttaatacttagtttagtattacgttagtgtcatatgtttaaactaggaaacaaaccgcgcttcgcgtgcggttgtattttatttaataataattaaattataaaattatatcaaattttaaattttgacatttttatataacatttttaatagtgagtgtctattcaaaatttcatttcttaactcttaataacacaagaaaaataaattaatattttagagtcttaattttttcaattattttgaactcgataaattataattattaattaatttatttattgtacatatgatagagttttagtaattggatcaatgttattttggtgtgattaaatttatataaaaaaatagaattgaaaaaaaaaatataacgattgataagtctataggaaactcatcaatttttaatattgtcatcgtatctcatccgatactataaattcaacacgtaaatcaataaactttggagttatgaattgaataaatatttgcaaatttaaatatgaataaaagttaataattgaataaatatttgcaaatattctattatcattaacacgtaaatcaattaactttggagttatgaatttaaacgcaaagtagtctatactcacttgagattgccacactttttaaattttaaagacaaccttcattcaatatgttgttaaatttaagagttatttttttttttcttattgttgcatgcattagatttttttgtgggataaatgataaacacattgagtatttaataattgataaaaaatagaataaaaaatatgaataaaaataataatcacatttttattaataaaaattatttcgagacttattaattctttattcttcttagtattaagagactctcacattctacaaactctaattaagaaaagaacactgataagagagaactaaaattaaaaaaagttaagtaataaattaaattatgaaattaaaagaaatagactaggatatatatagagtttagtaactgaattaaaaaaatatgattattttttaaatatgatatatgtatttttgggtgataatttttaattttttttttgaaaaaaatggaaaaaaaaaacgtgatatatataaatatataaaagtaatagatcaaaaaaagtttaacaaattttttattaatttttttttttaaaaaaaaaatacataaagttaattcaaaatacattttgaaaattttaaaaaataaatattgtttctaattctaaaaattaaaagaaaatatactctaaatctttaaaaattaagaaaagactgaaaaataatatcaatactctatcattataaaacctaaaatatacgtacatttcataatttctaaaattaatgtcattgtaacaaataaatattcgaaatggtctctcttgaatataaataaaaaaaaaattacactataatattaatgcaaatacaaattgaaaaaagaattatggtatattaaatttgcactataattcacatagtatgtcatcttttatggtatattaaatt

SEQ ID NO: 123536 - DNA, 652 bp, Cannabis sativa
actactttcccttggaagtaaaaagggaacaggaggatgcaaccttagagtttctttaataattaattttaagtatttcatctcatgaattgatgtttcaaataacccttttcttccaaaaacttccctaacttcatcttgagcctttttcatcattattggatttctcattaattctaccatagcccaatcctctgttacagctgatgtttcacttccagcttcaaagatgtcctgtaaaattaaaacacatcacaacttattattcattattatataaaaaaataataattatttgtcgcaaaaatactaaattttgtaaggagtttttttatttatacattctaaagtatttttttttttttatatttttacgaaatatgcagtgcaattcacggagcaaccaacagagtaactcagatcgcaaccaagaaagcaacccatattctaaaaatgaaaaaaacaaaaccaaaaaaaatcataaaaatagaaaaaagaaattaaaaagttatatataaagcaatttctcattttataatagttacacttaattactgaatttattttttaacgacaacaatattaaatatttgttcataatagaggttttttcatttttacgctttaaaatagtttttttttttttgtattt

SEQ ID NO: 123537 - DNA, 2473 bp, Cannabis sativa
  modified_base (501)..(502): a, c, t, g, unknown or other
attcatttatttccttccgaactcataatataatatttaatataaaacatagtatacgtgcatcatatactagtatatatatatatgctgatggtaaatttcttattattaaaacataaattatcaatatgtacattactattttttaataaatattttataaaatactaaaatatctagcatttgttctcaacttatttttttttattttttattttttaattttttattaagtttataaatattaaaataaagttataattaaactaaaaacgttatatatatatatggtaggttttattttttttaaattttttattaaagcataaattatcaattcgtattttactatttttttaataaatatcttacaaaatacaaaaatatttagcataaattaattattcaaaaaattatacatataaatatattgtaagttttactttatcacacatatattaccatacataattactatcatttatatatataaatatatanntatatatatataaattcaaatatacatttctttctacaaactaattttcattgatgggtgggcatatgaatttttttcttccctctcaatataattttatgataatgttatcataagatatcattattgttttatctatgagtaatgtgtattttaacataaccatgtattatatataaatctccttttattattcttttatttctaatgagaaatttttatatgcattcaatttatgattacatgattgatttagcttcaattattttacttttttgttattttaaatttaaaataaaaatatcttcatttaaatttcagtaaaatatttattgatcaaaagataataataagttattcaaaaaacataacaataagttaatgatatataaattgatattatacaattaacaattaaaaaataataatgtatataatatctaattttttaagaataaaataagaattatatagaattttttaacttaaatttacaagtacactagatatgaattaaaagtttatatagtaataaacttaattatttatcaataatattaatttaaatatacatgtaatttgtttataacaatttttttcataactatatataataaaattatataaatataattatatttattctatagtttcatgatcaagtttactgatttaatctattttctcatttttaataaatatatcatttgaattccttagatatttacatagctatctatttaaatttgcttccaatattttcatttatttatatatttattctttttatttatttttattttactttaaattctctctttaattatctttttttttatatatatatatatatcttctatcaactgtctccttatttctctttattttttaactttaaattatttccttattaattctcatatttttttttattttttcattctattttatttaattaaaagatcaccaattaattaaaaattttaaatttttttgcataatcataataactaataaataattatatatattaaaaaaaatattaatctacctaatcagaggaaatatatacaattaatattaactaattatccaaaaatacataaagaataatttatgtagagcgaacttatgatattaatgatgactacaagtgatacgatgatgacatcaattttaaatatagtagtgaatacaagtgaaatccagaaataataattgtttagaaattatataatgcgttttctatagatttattatcttctttttgttttagatctctatttttgtgtgagaattgtttaatttcaaatttttttatagtacatttgaagatatttctttgtattttttttatataagaaattgtataataattttttttagaattctttagatttctctatataaatttattatcttttaaaacaaatatttttacaaaaaaataatcactaaacaaatacaaccgcacgcgaagcgcaacctgttgactagttttttatatggatcaattaaattgtgtcatgtgtacattgtttccacgtatatatacacgtggacagtccaacatggcacttaacacttaaaatagatagaattgttaaattgctaacataatacaagtattgagggttttaccgccaaaaattgaatttttggggttaagtgtaagtaaaatgaaaatattagaggttttgccgcaattaatccatgaaaaattaatgggtgagcatttaacccgttgggctgaccaaaccggccgatccaactcgaatttgggccgaaacaaccttatttttcttgggcataaattaaatgggtcaaaagtttcttaacccgtgttacttgggttggtaataggctgtatacaatgtaacccaaacaactcaacccgggccggcccaataaggtttttagaaaaataaatctgaaattccgtattttaatattcccagtttgattatttaa

SEQ ID NO: 123538 - DNA, 1585 bp, Cannabis sativa
  modified_base (855)..(862): a, c, t, g, unknown or other
tgctgacttatagaattgggtttagcagatttcaatattatacttgaaatggattttttaactaagcactcgactagtgttgactgtaaacggaagatggtgatcttccaactcgagggcgaggaaccgttcgttttttctgggatcagttcagagatcatggattccagtgatttcaatattaacagttagagatttattacaaggcgaatgtttaggatttctggcagtggtattggataccgcacgacctaagacagatcggccagaagatatcagggaagtttaggtatttctagatatttttcctggggaacttccgggtttaccaccgcagagagaaatcaatttcattatcaatctagcatctggagcagaaccaattttaaaggcaccttatagaatggctccagcagaacttaaagaattgaaattcagcttcagggattgcttgacctagggttttctcgacctagtgtgtcaccctgggaagcttccgtattgtttgttgaaaggaaagacgaatccttacgcatgtgtattgactaccgagagttaaataaactaactatcaagaacaaatatctgttacctagaatcgatgacttattcgatcaactttgggggaaacaatcttctcaaagattgatcttcgacgggttatcattagttgagaatccgagatgaggacatctcaaagactgctttctgtactaagtatgggcactatgaaattctggttatgtcttttgggctaatcaatgctcccacaacttttatagatattgtgaatagaatattcaaggatttcctcgatatctgtgttattatttttatcgacgacatccttgtgtnnnnnnnntcagaagaggagcatgagcaacatgtttggatggttctacaacggttatgagaacataaattgtatgccaaatttaagaagtgtgagttttggatatctcaagtgtcttttcttgggaatattatcagtaaagagggaatcaatgtggatccagggaagatgaattcattagggattagccacgaccaaagatagttatagaagtttgaagtcttctgggtctggctggttattaccgtcagtttgttgagagattttttaagatctcaacacccgtaaccgaactcaccaaaaagaatcaacgatttttatggacagatatgtgtgaagaaagctttcaagagttgaagcaaggatttattacaactccgatattcgccctaccatcaaataaggaaaagtttacagtttactgcaatgcatgcaggcagggtttggggtgtgtactgatgtaagccgatcgggtcattgcccacgcctctcctcagttaaaggaatatgaacagcgatacccaactcacgatttagaacttgtcgcggtagggtttgctttgaagatttggcggcattatctctacggagaaaaatgtgagatttacaccgaccataagagcctcatatatttctttaccctgaaagatttgaatatgagacagagacgtttgtcggagttggttaaggattacgactatgaaacttttaccatcctgggaaggctaatgt

SEQ ID NO: 123539 - DNA, 1207 bp, Cannabis sativa
  modified_base (1124)..(1165): a, c, t, g, unknown or other
agattgtttccaagatagaaacatccaccactagtgctttttctatcatctgcaatacctgcctaatcagcatcactaaaacaaacaagattagagatagtgtctttaagaaaccaaatcccaaaatcaacagtgctatttacatattgaatgattcttttcacagcagaaagatgagattccatgggatttccctgatatcatgcacaaacacaaacactatagcaaatgtcaggacgactggcagtgagataaaacaaactgcctacatagctcaaggtgaaaggtgaatacatagctcaaggtgaaaggttgatggcctacttgagtaaaatcaaagatttgctaagttagcttaaaggctacacgatcaagtgaatccccagagatcagaacgccacagccgatgcacttgcccgtctagtaagcaacactaaacttggtgcccatacatttcctataggaacctagcattgttttcctagttgaagtcgacatgttggatgacacttcaacatggataacacctatcgtagcttacctccaaactggagccttcctaaaagaaaaaaatgaagcaagcaaactgagaaaaaaagctactaggtacttgatccaagatgtgttccatgcctctcttgaggcgtgtcaccaaagccaaagttgaacggctaatgatagaagtgcatgaaggcttctgcgacaaccatgccgggggtaaagcttatcgaaaaagatactcgaacagggatactgttggccaacgatgatcgaagactcgatggattatgtcagaaaatgtgacaagtgccagaggtttttgaagatacgaagagttccacccaatgatctcatgatgatggaatctccttagcccttcgcaatgtgggggatagacttgattggtcaactcccaaagggaaaaggaaggatacaatttgttgttgtcgcattaaactacttcaccaaatggacagaagctgaacccctagcaacaaacacctccaagaaggtccttaactttgttgtcaagaacatcatatgccttttcagccttccttagaagatcgtgtcaaacaacgacaagcacttcgacagtgacatgtgttgggttttgtgccctnnnnnnnnnnnnnnnnnnnnnnnnnnnnnnnnnnnnnnnnnnaagatcagaaataacattttacgttgcatggttcacatgatt

SEQ ID NO: 123540 - DNA, 3317 bp, Cannabis sativa
  modified_base (3289)..(3290): a, c, t, g, unknown or other
cacctcgcttacttgttctttgagatgatctaatttttacacttagtttgttcattgcacgctaaggactttcacggttgatacatatcgcttttaccggtgcttcgctatttacatttagcgacatatagtttctcgctaatatactaagtgccagtttgtaaattgattctttgcctaagaccttactggcaacgggttacaattatagtctgatacttatgtaattaatgagttatccataaaagtaatggcatcgattcacatttccttcatcttgacacgtgtccttcattgaggcggcaaccgaattttgggtataacaatgtcatactacatcaataacccaaatcgagatatcgtacaccaaataatgggcatcaatgaactacactagcaactattgattaaagattctataactttaataagttgcacactattttattcatggctaagtgaccttaattctccgtacaatacaagtcacatcctcatatatgaataaggaatttttcaatatttatatttataattttttcaatattaaatatcagtaatttaacattaaataaaaatgttcaagttatattgataaatataaataatctttacaaacttttcattgcataaaccctaacagatactgcctcgacagccacccaaaacctccaagatctcactagcagactttctcaatccaaacccccacgccttggtcatacagaagataaaaactttatggatttgaaatcagagtggagcgtaatcacatatcatccccattagatccaagaactcataagattaggctaacaaacaacccatgcttcgcctttaagaacccacttccggtcagtcatcatatctcgaataaaaaaaaaagtattctttcctctcgttgttaggtttatttttatgtattttttagagtctaatttagggtgtattttagtctttttattattttattttgcagatttatgcttggtttttttgtgtgttttttaggaataatgttatgagatccttaattttggtaattttggtcattttggtgttctgcaagctttttctagcaaaaatgaaaaaaaatctaatgatgaaataaaaattcttttaccttagcgtaatttcctattttttacaatggatcaaatattgaatttttagctcttaatttcgtggtcaatagtaaacagtgatcactttaaaaaaatgaaatttctatgttttggatgttcaaaatgctcattttttgattgaaaataaagtctcaagattcaagcgaatttttaactatgattcattcgcttaaaggataaactttctgaatgaaaattctagatctttcttttatctttcaaaaatatcttgaatcgtctaattctgagttatatatagaatgttgtggctaaaatactattggtcgttgcaatagaaaacaacaaagaaaagaggaaatcacttgtaataggaaacttcaatttttggctctatttaaagggggctgatgccaaagctttgggaccaatcaaaaatttagaggattctgagtgtagaaggaaaataaagagaagaaggcactggtggaggactccaaaaagttttctttctcttccatctctatcttttatgtttttcattgaatttttttattttagaatgtcttttagtagctaagttcttttaaggattattatgtgaaccacttgagattattttatggattaatatgatgatacaatttcttctacttctctttattcaatttctattcaatctgttttaattttacaattatttactggccatctataatcgttatttatgaattcaagtcaaaagtctaaaaggtgatatttaaatatgctctgattgatattgataaaaattaatttaggacaaaagtacctaggttgttggtatgattttattagttactatgttttatgtgatttgtgtgattaaacttaccatagaaatataggaagtctttacatagattgagtttataagtcttaaccagattataaacttcttcaatcaacttatcaattgaataggaagaagagaaattagataattacattatgaagtaaaataaaggatagttggggatcataataatctttatttttattattgttattttaattattatattattttattcactctttatccaaaaattattattcatcaaatagaactaaagaattaattgattggtacttggtaatcaataatcaatttttgtggaaataatacttatactttacttatcattatattacttgtttcgactgcgtatacttgtgtattaaaatttgttaagtttatttttatgcatttttagagtccaatttagggtgtgttttagttttttattattttattctacagatttatgcttggtttttgttttatgtgtttttaaggaaaaatgtttggagatcctcaattttgatcatttttgcattctgtgagccttttcgagcaaaaatgagacaatctaatgaagaaataaaacttcttttagcttgaagtaatttcctatttcttaaaatggattaaagattacatttttgtatcctaatttcgtagtccatagtcaatagtgatcactttctaaaaataaattgaaatttcgaagttttggatgttcaacatgctcatggtccccacactagttgagataatattatcttaaactcaattacttgattttaattagtcaattagaattttgaataagactatgtcttatttatgagttttcactaagcaagggcttatttaagaagaaaagagattttaaggtttatttattaattaagagactttgaaagatctaattaataaataagttaaatgaaaaatttatttgataattaattataactattaaatagatagaattgacattcattgagttagaattaaaacatagcatttgagaaaaaaaaaagataagtttcaataaaatggcaaaattgaaacccattagctaggcccactaaggaatttggccataagggtttaaataaaaccaatttttttttattccattataaattctaaacctaaccctaatagctatcatataaatagaatattatagctcttattctgataacctaatttgactattttgttagacaaaattagaaaatatagagagcctcttctattttcaaatttctcttctttttcttctcaaatttttgaaccttatagtgtttgagtgatttcccacccaattcaagtaaatgttgggttttatgcnntaaataaaacttcatttcaatgtaatc

SEQ ID NO: 123541 - DNA, 636 bp, Cannabis sativa
ttacagaaaatacggtcttttaatgtatttttatgttgtacttttgttaatttgttgttatttgtatgttattttttgttgttgttttcttgtttacttgtagttttctagttgtttgggtgttgtatttatagaaaaacgtaaaatgtaaaaaaaagaaatctttgaacatcaaaatataaattttttaaaaaaatagtgtattgtgtaattatgtaatttaaaattgtaaacttttgctaaaaatataatatttttgtaaatacttgtaattgggggtttttataccacattgaaatttcccatttttttttcttttttaatgtggggtaatttttttcttttcaaaaatacagttcaagttttatactgtgtacagtgttaagtttttgttgttccacaattattttttagttgttccactgttatttgtattgttctattttgttgttttacagatgttttataaaaagacagtatttttgtaaaatttccgtgtagcagtgaaactgtaaatttttactcaaaatctaatatttttgtaaagcattggctacatcaacgaccttgggcttggactcattgggcctaattaatttggtataaggaaattatactctataccctttttatatt

SEQ ID NO: 123542 - DNA, 1838 bp, Cannabis sativa
  modified_base (1737)..(1737): a, c, t, g, unknown or other
  modified_base (1800)..(1803): a, c, t, g, unknown or other
aattgtgtctactctttttttactaaagttatcttaaaatgtacttacaacaaaacctccaatataaattaaatctcacaatttgtgatctatatatagtagagatgtttaagtccaggaatatactttacactttatcgattagattgaattggatcggtgtattagattaatgttctgttattacaaaaatatatttttttttattttttggaaagcttatatatcattacttaactgatagaaatgctaaatggtaaattaatgtttttttttttttttactttgcttaattttattattttacatgtaatttataatattattagaagtcaatatcaaattacaaaagagaatatatgctaagagaaacaatggtccctaactaaaaatagttttatttctatttttgtttgcttagaatccaacaattatacatattcaattaaaactttattaataccttcgatttatctataattaaaagaaaaagaaaaaagaatgaagaacttggatataattggaaatatagatatgaatcatatgatatattatatagtgagtgatatgatttgggaaatgaaagaaaaatgagaatctaatatagaaggaacgtggaaaacacaggtatacaaatgctgccaaacgcttaattacgtgattcccaattaattccttcaataataagggtcaacttcctaattaaaaaggcacgtgtgactgattattacaactcaccaaaaattgtttatttaagaactatatatttccttccaataaaattaaaaaataattaaataactaatttctttattattgttattaatacatcccaagaaaaaaaaaataaagccaagaaaaatgatttccccttatttaaatgttataatgcagtgtgaaacctcatttttctaagcactttccatgaatgggaacttaattgctgctgttacccagaatattaattcatttatttttataagttatgtaacaattcattaacctctttgtcaacgtagttttatatcatttattgtacttttcattattactcaatgattgaaataacatgtgtatttacgtatatgtatagtaaaattaaggaaaatattaattatcaacatatataattgaactcatcaatatttatctgagaaatgggggtaaaagtaagaaactcattcagccccattttatttcttttataattgaaaaacatcaaaagacattattagtacctaacatcttccttagcatcatactatttaattaaatattgaatctcatataacttaaaaaaataacttataaagaatatcgcggttaactaattgtaaagtactaccaataaaaaatgttgggtacacacaataacaatgcatttcataatatataactaatcctaacaaaaacaaaaataaataattataaaattctctccttcctcaccccttctcgtttttttaatatataatataaattggtaaatggtaatgatttcatgaatatgtgctaaatttcaattgtaagtccaaaagtgactctttaaacacttttttttcttttattattagattcttcttattcattcattaaattttaaaattataatttatatgctaatagggacacaatagaaattaagtcctttttatagctatataatgttttgaccatgatatatgattttggattatttgagcgtgaaaagctaattatatatacagtagaacctcnatccaagaatacacttgggaccaactaaattatattctaattgggaggttataactaaatagnnnnacactagaaaaaaaattaaaaaaatcaaaaaatat

SEQ ID NO: 123543 - DNA, 1189 bp, Cannabis sativa
ttccagcttggagaaattccttgcggtaacgacttcaccaccacctgagaatcagagaaaatacagacatcttcccactgctgttccttagcccaaagcagagctaagtgaacagcttgaagttctgctgttatcagggaatccacacttccagcaatggttcgaataaaccactgcttgttaacatcatcaatagccacaatagttgctccaaagttcccatccttaaacgaaccatctgccaaaatcaccttcaaaacaaatcccgtaactgggagagtaagcctctgttcagagagagacttaggaatattgctcatttccacaaaacggtttaaggcattgttgagcatctcatcaactgaaatcgtcactatccgcccatatcgaattctattcctccacaacaaaatatattcaaagatggaggccatcctgataagaaaaggcagcttcaaagacccttctaacaagtgcaataaggaacaaaacacttcgggaagcgttgcaccagggatcacatctgatctgagatggaagggtcccccaaacaatagagctttggccatcggacaccttacaaatatatgcagagggctctcactatcagagctacagaaaagacagtcattagtatgagacttaccatatttatcaactgtgggaagagctccggccacagccctccacaacatcatgctctgcctcggatggattttacaattccatatccaattccacaaatccttcctttcagcaagtcgggacttctggctacttaaataagcccctttaaccgaaaaggcacccacttccgagtccttccaaatgatctaatctttctcagcataggcattaatctgaatagaactaattcgatctcccatctcacttccaaagacgaagttcaggaagccacaattctaggtcttgctccttctgaacataaggtctgccaccctacataaagatggagctttggcccgagccatctccatggtttccctgaattccgagtaatctagccacggaatccaaggttgccaccagatattagtgtcttcaccattagcaagcatagtacaagttccttcacaaatcaacttccgagcttccaagatccctttccaaacagggatgtctgaagggcgttcctgaatgctccaaaaagagtccaagggaaaatatt

SEQ ID NO: 123544 - DNA, 849 bp, Cannabis sativa
gtttataaaaatactaagcacgataattaccctttagaatttctctgccaaaaaatatgaaagagacttataggagagtgataaaaacacattttctttaacataaattataaacatcctaatcatttaaatagtaaattaaaactatatatgtctattattctttaactaatcttctctttttaagttgtattgtagatgttacgtctaatgcacgtttattttttattttttacttttttagagaaaaatatatataattttttattaatagataaatcaggtaatgtttattatataataaaatcacgaaaaaagcaaaatcaacaataataaacaattcacatatacttttctcgatttgtgcgtgtcatccttgcgcagggccatgctaattttctctatatcgttccaattttatcggatgtccccgaagggacattcacatatacttagttacttataatttatgcatcatactagctatcataatagtaaatgaaaaagaaaaatatttgtctaaaattttgaaaataaattttaatagttgtttgtaacttaagatgactaagaacaaaaaatgcttcaaacaaaaatgtttttcattttgtgtggaatagtgaaataattatattttctatcccacaatcattttgtttttctaaccatatgtgtttggagtggtcggttaaaattagaaaaaatagacccaagttccctccgtccttttgcatttataattttatatttattattattattattaaattaatgatttaatttgttagtttggcgttaacttttggagacttttatttgcaccccaccaaattataaatacaccccatt

SEQ ID NO: 123545 - DNA, 681 bp, Cannabis sativa
  modified_base (41)..(49): a, c, t, g, unknown or other
tgatctatattaataagcaaatcttattatattgaaatgannnnnnnnnagggcataaaacccaacagtcctgccatcattacaactcctcctaagaaacatgcccccacgcgtgcgtgttaccaaaagttgcattaaaggtgccgcatgcgtgccacaccaatggtacctacagttaatgaccctttacttggtaacagctcatgggatgcgtccgtgatcccatccagcaccacatgtcaaaagcttatcttcaaggagcagaagagtattgtaagctcccggaccgcattgtatcccgaaagcttggggagtaaatgttattcgtgtttctacaaagtatgacacgtggcacttaatgaggaggattattctaatacttccctaatcaaatccctttgatacaaccctgacacgggcaagcctcttggaaccgggaacaactcgagatggatgaacacacggaagcctgcttaagcctaccttaacttcctagacgcagaaggaaaattgcttctcccggacccagaggggtctaagaagggaggctctcccggacaatacctggacatgtatttgaaaggcctaaaatggatattgaccattctagagtgccacaaattttgagcttttatgcacgcttgatcaccaagtgacagttatactttttttttttttttt

SEQ ID NO: 123546 - DNA, 1006 bp, Cannabis sativa
ttaaatctaaaactacttaattagctatatataacaatataaattactttactaattatcaccaaatagttttgaaattgaaccctaattattattatgatatatattgagatccagacaaggatttaacatcagaacttgtaattagattgccatgtgaatcttagaaaactaaagatatgtcacacttttatgagacgaatatttaaaattcctctttctttttctttgtgtatactttttcagacaaaatatataaaataaaatataacaaggctatatatgcagatatttatacacatgcatgtatctttaggtacacagaataatttatacagagatataaatccaaacaaaagacaatagagatataatgtgtttacaaaacatttaaaataataatttgaaaagaaaaaaagaaacagaatgatacacaccaaaagcactgatttttgttcttaagataatttaggaacatattatgcctaccgaaatataattcgggttatttttcctataagtatgatgattaactaattaattacttattctagccaggttcaaataaaaatagtctctacaattaataattttgagaagatatctagatcataatcaacatatatagttataatgaaaaacaaacatttatatataatgaagtgattatatatattatttttcatatatataaacttatttgcaaaatgtgatgatagcaatgatatatagcaaaattttcagaggaaaaatatattctttgaccttctttttctcaccaaaattttggagtacctttaataactgatcgatgatgcatgcatgtataaaatccatacaaaaatatagatgattgtgaatgtgataatattattccaaaagatccctatttttttttaagtattttaagtagtttaattaaacatattttccaaacacaaaaactagctgtgtgcttatataacatatataatatttatttatatatttatattgattatacctg

SEQ ID NO: 123547 - DNA, 878 bp, Cannabis sativa
attgtgattcaaatgtagattactttttttatgtgagatatttgtattataatttagcacactattagagtagatatatttttaataaattgaactctattttatatttatatcacttatttacatttgcattaaagatgttgttaagatgataatttgtacttcttactgaattttgcaacacttttttttttctttttatttttacgattcatcagattttttggatttactaatattaaaaaatatatttttaccatactcaatttcaagtcttaataagttacttttttaacaaaaatacaaatatgaaaaactcatttgttataaaatagagtgtgcaattatataattataatatgtcaaaaaacaggatcaaacattaattattaattacttatttcatttaatactttcgtatatacaatattggtcgaatctctaaacagtacactatctcaaaataaataaataaataaataaatctctaaacagtcacttatttcatctttgatcgagtattaaattatacaagacagagatcgatctgtagacttattaaattttctttggtccatatatggtgaccgattgtctttctgtccatacgtctatatatcttcatatctactaataattaaatttctcttgcatgtagaccatgtagtataattaattattaacacatattaattgattgacatttatttattatattattatatataatttttattaaatcttgggcagtttggaagtttggtacttcatggcacttattctcttcgctggatatcttaagaatgcaaaaatttccgtggatgccctttccatctggtaagtaaataaataaaaatattagctatacaaattaatat

SEQ ID NO: 123548 - DNA, 2664 bp, Cannabis sativa
  modified_base (352)..(357): a, c, t, g, unknown or other
gatcaaatttgatatattatatggtattttgtatagggtccactagctcaaccaccatcaagatgtgatgtgtcgaagggaaaaagccccatgccttctcgaaaaggcggtgctgatcaagaagatgaattattcacaccaaagatcatggctttaatctctaggtcactaaaatggatggttgatgaatttctaagagtcaaagataaacgtgatataatcacaattcgggtaccctgaggattcatagcacctcgtacccagatcatgttatctggagaggatttgcagcaggtggcattgtgacttcattggcaaccagaaaatgttgtttggaatgatgtatactctnnnnnnatctaattaaccttatatatatatatcaaattctagtgaaattattataaaacactttaacaattaaatgcaggaacatctgggagagcataaatgatctaagaaaaattttcaagttttacgacctagagcttctttgcaatgaatgctatcaacgatgaagagaagagtaacgatgaagagaagagtgagtcttttgacaatgcgtcaaaacgattggccctttggttatcatcgatgaataacaactaccaaatgttctttattccctagaatattgggtaaacactatttaattttttagtgctaatttttttctatattataacttgaaattatttttatactatcttacatacatcctaatataattttttagtgcgcattggatgctagagattgttgcgccagggaaaattatctatttagaccctatacgtggccacaaagttccctaatataatttttttcttaattactcttgatgtaacaaattttttaattaactaatgaattgaaatgttaatataatttttaaaatagagcataccagattataagggcatcaaatgcgtaacttgggtcgtggccaggaattgcactagcaaattgtccaagacaacctaaaaactaagaatgtcgtttttatattttgaaatacatgactgacatcgtcgtacatgcaaaccccaacctttatatacaagatcaaaaagctgtaagttttaattattaattatagcatttattatattaacaaataacaatatatatgaaccaatataaatttttacttctttttacattttggagaaaaatagacatacaatctaaaaattgaattgttaccattcctgtgcgagtgtatagaacgattgatgacgatgattcatgaaggcttggacaaatgatgctgaaaggcctaagaatttttcttccttagcttatttttttaagttaacttctagatttattaaattgttaatacttagactaagtttacaatatttgtgtaatatataattgtaacttatttaatttctttaatttattttgaagtgtgaatgtcgtatgtgaaatgggagggaatcatcaatacatatatataaagaagaagtatgagacagtgatatggcactctaaaatcactttaaatatatatatatatatatttgttctctcctcaattctctcattattctaattttttataattaaaaaaaaagttaaattaaatatctatccataataatttatatatatataaagatgttatattattcatatgattttttcgtatctaatcatattatattctttaattcatatacatttataattattataatcctaaaccgtattatatattctaattaagttgtattattcatattattattgatgctaaaagagatcaaaactattaagctgcttctaactaatggaggtatacgtatggtatgtaaatttactcttgaatcttaaatactttaatcaatcctcttgagtcttgaatacttcaatcaataatttagtcatcattgttaaattgatgattgcaattgttgtatatggccgtgccccttaattggccaagggtttccaaaaatacccttggcacaattaacatgctcttcacttgaaataaaaatggtactcttttccttctgacacttgtcagttttgttgataaaatttgtaatctacatattttggttttttttgatgaatcagaattttcattactctacaaaacttatgactttacaaatataagcaccttccaagaaaaaaggccttaattttagctatatacaaatttcttataacaaatcaaaccaatctttatcactttgtttaatcttttttggcattacaaaaagtattctactctttacaatccacttcacttgctgcatcacttcagagatccctatcttttttccattccataatagttcattccgagtcttctacaactgatatacaacagtagcaacaccagctaccagcacactttttttaaacctggaacagcttgctttcctcacccatctcattaaagcttgaagtgaattagccctactcttccatccaaaccagaccttcaaacatctctaaggcattctgcagcaaaatcacactcaaaaaataggtgatttgctgtttctgcagcagtgttgcagaagctgcaacaacctgtgtcaatcaacccttgtttgagtagtcgatacctggttttgaatctattcagcatagctaaccataataggaagctatgtgtaacgtccccgcttcaagcctcca

SEQ ID NO: 123549 - DNA, 1958 bp, Cannabis sativa
  modified_base (1884)..(1904): a, c, t, g, unknown or other
ttggaggactgttcctttgaagtgcgttctattattttgaacgaatttattaattaatagatgttatgatttttattcaaaaaaaattatattttacatagttattttaattaattaatttattattgttattaattttaaatatttacaaatctattcttctctctttttcactaataaaataaaatatcaaatcttaaaaaatacaccacatctctacttcaactacaaaaattaaaaaaaatatatatataaatattaaaatatctataataaaaatatcctaactaaatagcatatctatataactatctatctatatatatatatatatatatatatttatataagtaagagatataagatagtgacatgtcactctaaaatctctctaaatactactattctctctcttttttttttcttttaattttttaatttttaattaaccttaaaaatattaatgtaaatagctatagatttttaattagccttaaaaatattaatctaaatatctttatatattctctctttaattctcttttttttttttaatttttaaatagacataaaaatattaatttaaatacctcttaattctctaatttttttaaaaaataataattatgtttataaatattaattaattgattaattaataaaaaaaatatataattatagaacaataacacgttagatatatatatatatttttatttaaacataattgtattttaaaaaatttatattttttaataacctatcattaactattttttttaaatatacatatataaattaattttaaaaaatatatttaattaacctaactctaagaccctattttgtttcaccgcctcattcttctgtttttcattggatttgttcaccgtctctcagtatccctccctctcaggtggcaaactcctatccagtcgctctatcacaggctatataacgtttttaccataaacaagcggcaaaggagtggtctatgtattataaatattaacatattttatacttttgcatatttttctgtcttttttgggtatatattgttgatctatttatttggtctaattatttttttcaatttaggtggtaaaaaatatgtgcaataatgttttaaactataagtattctttttatagagtattattttctatgtgagagtcacttataagtttttattataaaaaatactttctatgttttcaaggatacatgtgagtttcttttttgttgttttattttactttttctaattctttattgtttttattttataacaaatgacatgttgtgtaagtcgtgtttttattattatttttttacaataataatattgaagaataaaaacaacaaccaaagaaataaaaaatatataaaacaaaatcagtgaagaaatttatgaagatgagtcattctgtatctttgtagtaaagaatgactttcttactacaatttacatcataattatattatttaactgtaaatataaatacatatcctttaatttttgtgtttacttaactttatttttttgttttggtagatttgagcttgtgaattatttgagaaaaaaaagcctatttacaatttacaattattgattttttttaggttctacgtactttagtttattggaagatatcaataagcatcggtacaattttagtaagatctttcttttcaagttcaacaacaaaattaatcaaaaggaaggaaaaaattcaaatacaattttatagtaaaatctttctttttaagtttagcaacaaaactaataaaaaatatacatatatatatatatatatatattgagtgtagatttggtaaagttgtaaaaagatagaatttaagtgcatgtttggcatcatnnnnnnnnnnnnnnnnnnnnnttttaaaaacagaaaattgtttttaaaaacaatttgacttgtttggccttgttt

SEQ ID NO: 123550 - DNA, 694 bp, Cannabis sativa
tttaagccttaaggcgcttttttttatgtgaggcgaggcgtaagcctcaaatatttaattaaaagaaaattttagagcacttaaatataacaaagatgaataatgtgttataaaactcaaataaaccataaaatgttctcataaaactcaaatagagcataaaatgtctcgttaaactcaaactaaaatatagataattgttgtttctaaaactaggatcctcgtttctactatcctagaacaaacttgagcaataatagcataaaatatatcatcaagcgcaagccacatagcttggcaagattttttttgtttctccttgtgaagagtgcaattgaagggaggaaggaggagaggagcgactggccgttttttctaaccctaaatgatacctatgaggatttttattgggttttccttaactcttttgacttctattgggctttttataattaatttgagttttatttggcttttttttaagttagtaggctaatataatatcatttgggggcttaaaaaaccctagttttttcttttctttctgaggcgtatacctcaaccaatatttacgcctcactgcaattagcagtgcctcggtagcgtgaggcgtatgcctctgtcctcccagcaattgcgcaggccttagtgtgattttttccagcctcagtgtgaggcgtgcctcaaggcgcgc

SEQ ID NO: 123551 - DNA, 1938 bp, Cannabis sativa
actaatttagtgttaattcctaagaagaaacaaccaatggacatgggagacttaagacctattgccctttgtaatgttctttataagattgtttcaaaggtcattgctaattcgctcaaagttattatgccttcaattttatcggatactcaaagtgtgtttctccaatgttatctaatatcggataatattatgatttcttatgagataatgcattacttaaagaggaagagaagaggctgtgatggtgttatggcacttaagcttgacataagcaaggcttacgattgacttgaatggggatatcttcaggctatgcttgaatgaatgggcttcgatggtagatgaattaatttgattatgcattgtgtggacactgtctcgcacacgatctctcatgggggaaaggagttgggccctattgttgcacaaagggggctgcgccacgatcaccatatttgtttattctctgtgctgagtgtttctctagtttgttgcatagtggattaattacagggtgtaaaggtgctagaagagctcttgttatttcacatattctgtttgctgatgatagttacatctattgtaaagcaacataatgttaaagagctattgtatacatatgagattgcttctgaccaaaagatcaatttttcaaagtcgtcagtgttctacagtcacaatactagtacctctcaaagggatatacatcatttatgagctattaaatagttatgaggctggtgagaatgggtcgtatctgggacttccatatttggtgggaaagaataaaaatgttatccttggttttcttaaggacagaataaaaaagaaaattcaaggatgggaaaaaaggatattatctcgttttgggaaggaggtgttgctaaaatccgttgtacaatcaattcatagctatgcaatgagtgtttttctgttacctttggatacttgtaaggagttggagcgtctcatggctaagttttggtgggaaacggactctgttcatagaacgagtgttagttggatgagttgggatcgattgagtcgtcacaaacatgttggaggtttgggttttcgaagtctgcgggactttaatatggctctgttggggaaaaaatgctggaggttgttggttaatgatacgtccttggtgagtaaagtttttaaggctaaatactatgccaacggaactcttctttcagctgaattcgatgacaatctgagcttcgtatggaggactattttttgaagcaaaaggactgatacaggctggggtaatccgtacgataggcatagtgaacatacttcaattttatgtgatccttggcttccacataacacaaatggctatgttatttcttcacatcctgcacttgttaatcaaactgtaagtagctttttcaaaatgaattcacgagagtgggatgaaaagataattaaggatctctttgatgatagagatcaagagctgatcttttctatataattgagttctactgcaatatctgactattggagctggcggtttgaacgattggggcactactcggttaagagtgcctacaagttcttactagaagaaaaaaggagcttggactattaatggagctactggtttttggaaggatttatggagtttgaaagttccccctaaagtcagtaacttcttatggagggcgacttcaagcttgttaccaacttgtgtccaattggaaaaaagacatgttctagttaacccaacatgccccttatgtctcactactgttaaaactatttttcatgcgttagttgggtgtgttcatgctcgtgcttgctggaataggacaagtgtggatgttgggaacaatatggatgatgattttagtaattggctacttgtgctgcaatgccaaggaagagaaggcgagttggaggaggcggctatggtcagctggg

SEQ ID NO: 123552 - DNA, 834 bp, Cannabis sativa
tttcatccatgttagatttttttactaaaattggaaaaaaaaatctttaaattcaacaatctcaatagtttagggctatttttgacaacgttaaaagttcaagagatatgatttgttacatgtcaaagggcgaaaatcctaattagcctttattaaattaattaaaagatattttctctctcctctctttctctctaattgtagtttctttctctctctctctcactcatcttttcttcctctcattccctctaattatagtctctgtctcactcccacttatcttctcttatctaagtttgcaaaattttgaataccaccacaatccacagctacttattgactatatgaagagtaattgttggacacttttgtcatcatctacatatatcgttggctaatatgactgcttcttgatcggaatccaatagttaagcagaaaaatcttgaaaagatttgtaaaattttggagaaaaaaaaagtggttgatgatgatggtggtgtttataattgaggagattaaaaaaaaaatgatttatgtggtggtatccttctttccaaacaagtacaatgggaatacatacaattcaattcaaatgggtaggcttcttaaaaaaaactctaacaatggcagatatggttgttcacgagtttcaataatggcggatgcgatatacatatatttctgtttaagtggtttttatatatccttattaaaaaaatattcttctagtatagtataaataaataaaaaatataattgctaatttcattcataggctgactcagaatttaattggagggtgggcgtaaaaatttttcatatataaaaat

SEQ ID NO: 123553 - DNA, 593 bp, Cannabis sativa
atatatatcaaaatttatctttattttcccatatttttgtaaatagcccaaatttaaattagtaaaaataatttgagcatatcatgtttattaatatattaatcggaacaaagaagaggagaatatatataaaaatatatgtacaatatgtatcattgagattaacgttaataatacttaattgtcccatgtatagtcagacacagagaggtcattcattatattaattaaatatttgtacaatattcgattgttgcaagttggttttaaacaaccaagatgataatttatattaatttaacgtcggtggacatgatacatcaaaaaaacttaataataataatttattattaattattaattttttgtttcaaataatgatgctgttttcatgcacatgtttcatcgatttgattagaaaaagaccttaaacgttttcttaaacttttgctttttgaattaaaaataaataattatgtttttgtggaagccgcgtatagcgagcaaaattaatgtagtatacatatatatatatatatgtattagtaatctatatttttattattattattttttatatatatgttttggtg

SEQ ID NO: 123554 - DNA, 3034 bp, Cannabis sativa
ctctgataccaaaattgtaacaccttaatgattaggtacgctacagtgactttttaattatagtgcactactttgctaatcaaagagttttttcaaaaatcatgatcaattaaaacttttgattaactataaacttttataaacatttacatataaccataaaaaaaggtcaggattccgctttttaaatttttttacattatcaaaataaactttacaactttgttacgcatcgtctacaaaattagcccaagtcgtctcgagactcaactctccaagtcgtactatcttgacatgtacaatcatcctcgaactctagactcattgttgctcagccttagcctttcctctacttacacatgcaaacaatatttgtgagtcgacagactcagtaagaaaatcatataatatacaatctatcactgacttgtatctaggtgcccatacaactatccacaaggcttaacaaatgatttagaacattcataacgaaggtacgacctctgtaccacatgcactacgtactgctgctgtactagcattggtagggctgaattgtaccccgagtaccactgagtattttaccacatgcactacgtacctaaccataatagtgttggtaacactggattgtacctttaaacatcatatgacgttgtaccaatgcactaagtatcgctatcgtactagtgttggtagcatatgaatcacataaacaacatacatataatacacatacaaatatacatatatgtactctatgctagtcttacctcgactctgaattcaattttgtcgatcgacttaaatagaaaattatgcgctgaacggaggccctatgtcaaatcacgtaaaatgggtaaacaattttctaagacctttctagagatctaaactcaaaactagaagttttcctatcgataaatagcatggaaaaactctaaacattgaggaaacataagaaaaatgactaaacgagaaaacttcctaataaatggcagaccatttttataaaaacgacgagccatttttgtagttatgcactagtaaaaacggaagaacatttctgcaaaaacggcctgtcgtttttcactacagaaaaacaaagagcctccaaacatgctcaaaacaaccccaaactcaaaacaaccaaatagcatcaaaatgaaccaattctaagcaacaaaacctcaaaacatacaaaaatttaaaaatcaccattgttgagctaggtttgagttcttgaactcaaacttgctcaactccaaaatcaaacaacaaaattaacttaaaccaacataaaacaacattactaagctgcagaaacatcatcaatcaaaaccctaactaaatagaacttaactccaacaaaagcataataaacccaaaaagaagctttcaaacttaaagagatgatggactagggttataactttgatgtacttctagaattatgctagaacactttgaacaagatgaaaatgcctaggttctcccttagttttcggttaagccgaagcatgagagagagaacaagaattgggttttttctaattttgtctttttttttttgttattccttcatttttccttaattaaagataattagtatttaccttttactctttaagggctagctagcaaaagtggagttagccacttgtctcaccaagcaaaataccaaaattgcccttctaccttaaccttaaataattaaatggcttaggggcaaaatggtccaataccataactccgcttatccccgataatctaaatatcattttatgagtactccactaaatgaaagttctaaattcacccatgtgactctattgaccatccagcgtacttcccatcattaccaagcaaaaagtataaaaattatagatttcacatatgacataaataatacacttagagtttaataaaatctccaaaattgagaatttacaactctaatgcccaatttctaaaaactggttccataatatataaccatgcataagcataaaatatcaataattaatgctaattgtcctactaatccataaactaaacatacggtcattacaattatcccccgattaaaaggattttgtccttaacatctaacatgaacaactctggatattgagtccttatgccagactctagttccaaggtggcttcctccaccttactattcctccagagttctatgaccaaagctatggtcttgtttagaagaacattttccttcctattgagaattcgaactagttgttcctcataggatagatttgaatgtagttctaaggcttcgtaacttaagacatgagtcgggtctgatacatatttcttcgatatttaaatatataatacattatgtacagctgataacgctggtggtaaagctagctaatacgctacgtgcctaatcttctcgagtatctcaaatggccctatgaacctagggctcaacttgcccttcttcccaaagctccttatacctttcattagtgaaattcataggaaaacatgttctcccacctaaaaatttaatatctctgtgcttagggtcagaataacttttcttcttactttacgaagcaagcatccaagccttgatcttgtctatttaggggtattcatccaatccaattcgtactattttgctcatagtgtatccaatccacactaagtgcagattttattttttggatccaatccaatctgcacaatagatcaaatccaatccaatccaatccgtaaaagtacaaattggatcaattattttggattggttactttttaatcttaaattatttaatatttatgaaaaaaaaatcacataactagcaacaaaataaaacaaagtatagttattttatgtctccaacaacacattaaaataaataaaatagaaaataataatttcaaatgaagaaaaaaagttgtatgtataaataaatatttaattatatataagaatagaatatatatttgatctatttagttttgaaatataattgtattatatgtattagacttttaa

SEQ ID NO: 123555 - DNA, 1233 bp, Cannabis sativa
tatgcctagggccggccctgcctaggcatacaaacttaataattctccaccttgactagagttatgtacattacaaacttgagtcaattagtagctacattcataaatttgaggcaatgaaagaagtttgttgtaggtaaagccctagtgagttcttttgctgcattgtcatttgtggcaatctctgagagttgaacgaccttgccagatatatctctaatgaagtgtaacctgacatctatttccttggttctttcatgaaatatttggtttctgctgagatgtagtgaattttgagtgtcagagtatagtgacacatatttgattaattataagtttactagtggtgtttgagttgtctttatgatagtgaaccttggcttgatatagtttccaatcaattttattgtagcctatcacttgtctgcaaatcttatgttgagatcacaagtgtatcacctttctatcatatttatggattatgaaagacttggttggtcagtttcttgatgccattattacccacaatttctattttggatcaaagtaacaaattttgtatatttttgcgtaagattttttgaccttgtattggaagtttctatttgcatagaatctaagcacacttgtagtgtttctttgtccttgtatatttgtgcttcttctatttcaagatattgaggatttgtaattagtagttcgtcctaatcattaatttaatgtctctctattcgggttgttttctagttgcacaactatttcctcagccactagttttgcacataacgtcaatgtagtcgaatatagtttcaccatcttccagcattgagtgttgcattattttttgttgagtagtgcattgtctaccattgttgctattgtatttgtttgtgtcactaatgagctgctcatttccaagaagaatggattgttggttgttgttgtgttgttgaccacgttcacacatgatggattcgttgtgaagtcgggttctttcaattttagttatatgtagaagaataggctttgatcgtcatttatcctcaacggtaggtatccttctttcacttggtttttcagttgcatgtcagtattttttttgctgcattccaacacttctttcagcgtgtgtattaattcttcatatttacaatcaattgagattaattgtccactaaatttgcataatttattccatcatcaaacttgtaacgtccccgcttcaagcctcca

SEQ ID NO: 123556 - DNA, 607 bp, Cannabis sativa
tatcaaaattgcgcgtactgccccaaagatttctcacctcctctttgcagatgatagcattttattttgcaattccaatatccaggcgtgcaatgccattaaagaggcccttgatcagtacctaaaaatctctggcccgcaggttaacttccgaaaatcttctatgtttttctccccaaacacaagcctttcctatcagacccttactcaagactacctacagattcccacgacaaatcacttagacaaataccttggtttgcctcagtgctttggtaggtccaagaactcctctttcaactctcttaaagatcgaatttggtcttacttgtcaaaatggcaaggtaaacttctctcaaagggaggaaaagaggtccttctaaaggctgtggtccaagctattcccatctatgctgtgtcggtctttaagcttcctgactctttttgcagctttgtggaaaaagaaatggcaaatttttggtggggagcagcaaatggtcaacgtaaactttactggaagaattggaaatctttgtgtaattccaaaagtattgggggattaggctttagatctctcaagccttttaatcaagcgatgcttgccaag

SEQ ID NO: 123557 - DNA, 1016 bp, Cannabis sativa
atgtcatatgaattatatataaatatcgatattttagatggaactttttctattgagacaaataattgatgaaatataatgtactagtttattttggtatttctttttctttttgagaagattttggtcttaatgttattgaaacattttatgtgttaatgaaactttttgactttttgaatattagatctgttacacacattttcttacttgccgcccaatcttactttcgttgatcataccggcaacattgggtggaaagaatatggaaaagaagatatgttctttttaattatttttgagtaaatttattttgtttaattttctaatgttatttttttaggtaccaacgagggaaactaataattgtggatccttagttgtatctataacttatataaaagtgtcaatatttttgggctttttgatattgaattacacatatatccttttagaatatatattattttacaatacaaacaaattagatgaaaatgataatattttaaaaaagtgtggactttttagatatccaattacacatatacttttttagaatatatattactttacaataacctaaataaaagtgacaattttttgggctttttgatattgaattacacatatacctttttagaatatatattacggagatatctactgtacgtcctttagttttgaccccgtagtataaggtagtaaagtaaaccaatgagaagttaaatattgaaagtcttctttagttacagtgaactcttgtacattataattgaatttatttattattttatataactaaaattactttatatgaagaataggcatacttgagtgttttataagcgcgtgggaaaatggaaccagcctagatttgaattttttttatgcttttttccgtttttttagtttattattactaaaacttaatatttttttattttatctcaaatttttatattctaccatattaccatagatcaacttctttgaaatacaaattttattttattttt

SEQ ID NO: 123558 - DNA, 648 bp, Cannabis sativa
tttttaaaaaaaattattaattgagtttttaaataattaaactaactaagaatatttttttaataaaaacgaattataaccaaaaactccacataatcactttgagaaagaaaaaaatcccaaactaacctaaaaaattaaacactacaaaaaagaattgtattattattatctcaaaccccacacgtacttgaaagtaaaaccaaacatacattaaggaataaggaacaccattttttcaaagtaaattcataaatattattatatttttattatttatatatattatatcatatagaaattaaaatttgtttctattattctattaaaagaatattattattcactgttatattatcctattattaaaaacttaaagagaagtgaaatgatttttttttttctaagtaatgatgattgagagttaaaattaaaacaattaaaaattatatttgtaacaaataacaataattttcaaaaattaaattacaaaatgtaatataaaagatttatataccattaaattattgtttgggaatcatgattacaaattgcaataaaatacactatattcaaattctatagtttttaaattagaatgcttgaaattcgtgtttatataatgaattaataatcaagtgttagtta

SEQ ID NO: 123559 - DNA, 1223 bp, Cannabis sativa
  modified_base (51)..(70): a, c, t, g, unknown or other
  modified_base (181)..(182): a, c, t, g, unknown or other
gaaccatgcaacattaaatgttatttctgatctataagtaaatctgattannnnnnnnnnnnnnnnnnnnagggcataaaacccaacaagagctacaacgaaaggaatctttctccttgttcttgagttaatacaaataacgaggattaggctattaccgaactgctaggggctgaacctnntaaaattcttgtgtctttatattattttactatttatcaatcgttataaactacatgtcgcttactaaataagactcaccgtcgttggctaaaagcgaggtcaacagacataaagtttcaaatatgccataggccacatggaatgcaaagtgagtagtgttcctaagctaaaatgccacaagtcataaaaagccacaggctatgcagaacatgaaaacaaagtctatacaatataagcatgatgtggaatactaataaaaattccatctgcatgtgtgcaggggcagtaggacctcaatttgaagctgccaagtcgagatctacaaagtccaagctagccagcctggtgggtaacatcctggccggccacctcctccactaattggtcggccaacacttcatcacgggcacgtgatgatgactgctctcgataagcagcggtctggtccgttgccatttggttctcgaataatgccctcccacgggctagtgttctctctataaggccgaactacccatgtatgacaagtcaggtttagggttgcgcaggcaaaactcaaaagtaagttcgcaggaaaggtcgatgtaatattccttaatggcctactggccatcgagagcctcctgtatcttcttcttgtgttccttaagatcaatctacaacccagagatgagagctgcttggttggtgttctcggtgttcctggcactcagcataatctccaatccagtgagctcttcttatctgctagaaggacctcaatctcaaaattaactttgtcctttgcagcaagggatgcctccaagaccttcacacgctcctgaaaagcatctgaagatcccatagagtcgtcacgagccgaactcgttttcatcaaggcctgaaaacaaagcaaaataacatcactgtcaaacagtcaactctagtcagccagtcccttccttggaccgctatggctggctagacccctgtatggatgcccaaagttagccatgttggggtttttgccctaaataaaaatcatttcaatataatcagat

SEQ ID NO: 123560 - DNA, 1511 bp, Cannabis sativa
ccccccttttgttttaaattcgaacaactaacattcgtgaagtccttcttctcccaaaatacatcttcttcgtattccatgtttgcaataaaccagcaaaatatacattgcaataaaccagtgaataccacctatactccactattcacgactgaagaagtcttccatttattctcttagttttcttacaacaactcagtaaacacaagagccaatgtattaatttgtctctctcccatgaactttggtaattcggcacgaccacgccttcgtccatccaccagtgaccactttgtctcatctattgtcaccatagcttgttcgtcttctccgatcaaaaattcactgtcgtacctgatcaaaaatccactttcgtccccaatcaaaccatcctctgatcaatcagttgtgtgtgaatcgattcccatggaaaaccaccattataaacaaaaaacagcctctcctagcacaactatatagtccaaaaacactccacctgaaattccatacacgcacaaggatcgaattgcctaacctaaaggtagtgaaattggcagatctctaatttcccatgaagatattgttggaaagattattttactattcaagtatgttagattaattctaatctaacatcctaaacatggtacccgttgtatttgcttctcctgatggttggtcgggtaataaaaatgttgtatttttcagtacatcattatggattggattagtctttctggtaggtatccttaattctcttatctcttgaacctggtcgttctaggttataaaaataaaaaataaacaaataagagtttcagaaactttacaattatgcaacataaataatgacttatttcgtttaaattctctaactcttggtttttttttttttttctgtcgcatggtattatcaagaattcaaacctagatcttctccaaaatttgttgaaagacttcacattcttccacactatcctgagtaatcccttgattttggtgggaaaatctcaatacttcttagcacatgactttttgtgaagaacattaagtaaaaattgagtactatacaatatataagattatagctctcaaaactcacttatctgacatgaattattagaacactctaaactgcatacactatatgtataaatatatgtacaggcgtctatgactatagagtgttgacttcaaaaagtgataaattgacagtggggttgtatagatctgatgcttgccacgtgttacacgaatagaatagaaaagtaataaacacaaaaatttgctataaaggttcggtctccttagttagtgggtaatgacctactcctcttttagttgtattgatacataaagataatactatttagatcgttgtaggtgggatctaatataactctctataaggaacaaaatatgaatcagtaggttgatctctagtgaaagtgagattgccttagaggcgtgtgagagaagaagagagaagagagccctattgggcgtgtaca

SEQ ID NO: 123561 - DNA, 1870 bp, Cannabis sativa
  modified_base (447)..(450): a, c, t, g, unknown or other
  modified_base (1806)..(1811): a, c, t, g, unknown or other
tagaaccggttctataacagtattataatgaataaaaatcaataacatgaaataacccaaaaccgattataactaaaatataatctgttatataatataatgaatacaaacaagtaacacacaataattcaaaccgattacaattaaaaaataaagggaaaatcagctcctaaaatactgaaagttaaattaaaaataaaactagttctacaataaaatacctcataacacataatactacataaaaccggttataattttttttttaaaaaaaaaagtggtcatcaattgtctcatatataaataaaaatagaattggttctatgatataatgaataaaaataaataacacaaaataactcaaacctgttataattgaaatataaccggttctgtaacataattaataaaaataaataacacaaaataactcaaactagttataannnnaatagaaccggttctataacattgttataatatgaataaaaataaataacacgaaataactcaaatcggttataatagttatggttatataacataatgaatacaaacaagtaacacgcaataactcaaactgattataattaaaaaacaaagaggaaatcagttcttcaaacactgaaacataaattaaaaacaaaactagttccacaacaaaatacatcataacacacaatacctcataaaactggttatatatttttttttttaaaaaaaaaaaaaaagtggggatcaaatattgaggtataaatatgaaaagaatcggttccataacaaaataaataaatacaaataataacacacaataaactcaaatataataccggttatatttattaactagttaaaaatttgagacaacaaaattagttccgtaaagcaactaagataaaaactcacacaaaacatcatctaaataaaataaataaatcaaaaaccggtttctttaattacctaaataaaaaaccggttcccgaaataattaatttaaaagctaaattttgaaataaataattcaaaacttattttttgaaatgactaaatcaaaaactaagtgagacataaattaaaatagagccgattccacaacaaaatgaccaaaaacaaataacacacaataacacagaaaatcagttataatttttttaaaaaaaaaacaagagggaatcagttccaaaaatactaatacataaactaaaacagaaccagttccacaacaaaaggaataaaaacaaataacagaaactgattctaatttaaacaaaagagggaataagttctaaaaacaccgagacataaattaaataaaatcatttccacaacaaaatgagtaaaaacaaaaaataaacaataactaagaaccttgttctaattaaaaaaataaagagggaataggttccaacaacaccgacacataaattaaatagaaccagttttacaataaaataagtaaaaaattacaatacacaattactcaaaaacggattataattaaaaaaaaaaaaacataatatatattatgttgttctacacacaaagatacgttcaacacaattttgtcactccaataacactttcaaaattattacccttactcaatcatgagagaagaaaggtattaaatgatatggatgtattattttttttttttttacttgaaccagagctgtctccttcataattggggtaactttatcaatctaaagatggagaaatcttgttatcctttatcgtgtaatgtgaaagtagtctgtaacaccacacatcatgatctctagtgttaattccatttttggcatnnnnnnttgacaaaaatattttattatttcctattaatttcggctggtatgtgtttaatatggtt

SEQ ID NO: 123562 - DNA, 1398 bp, Cannabis sativa
ttgaaaaatattttcacttttccacttttaaaaacagaaatctgattaaaaaagtgttaccaaacgatacctaaactcgtatgtcatttataataacagagtaaaaaggtagaggtaaatcctccaactaagagtaagtttgatccatccctaaagcgaacttagctaaacaatgtgcaaccatgttggcttaacgtttagcatggacaacattcacttgaaggaaaaaggataaaagactagaaacatcaattaaaagatcataataggaagtaattgtagtagatcattttcacaaggcatttgttacaagaagcgcatcagtctccactattgcaatcggcaattgcagctgtataacctaattaagactataaaatattgccttggcttccatttcatgagatgtaaaattaccaataatttgtttcgccagtgcagcacgaacatgacctgctgaattatggacaacagcccctactctaataatatttcgattagcatcaatggtggcatccacattcaattttaggttcgtgccagtaggaggtttccatggagcattagcagttactggtgctagaaagtgagcatcgttgctggcagcattatggtacttgcacttggctgttcgtaaattagataaataattgacagcaaaggaagcaagtgctggtgctggttttgcagtagagctatgaacaactcgatttctttctttccaaattgaccaaagtgtgcaaataatttattccatctcttgttggttgtaaatagttgagaaatgtaccaaatagtctcccttgtacattgcagatgctttactccagtcgaaattcagatccatgttgcgccatacacctttggaatatttgcagccaaatagtgcatgcccaatagactcccaagctgatttacaaactgaacctgttgagtctgttatgatcttttgcctaactaaagatgtagcaactggtagagcattgtggataacccgccaagcaaagatcttgacttttgggggagttgtaaagaccaaaagaacttccaccaagaagcttgtgagttagaacttgagcaattattggcctccacatctgctatagatgttgcaagatggtatccggattatactgtgtaggtacccgagatgttgtagtgccatatgagagcatcaagactctgaaaaaaagctgagaggcagtgttaatatacgatcgacatcttatggagaaaaccattgttgaagaaggaggacattccaaactcgttcatctgtaattaaatgggcaaccattgcatctgcaggaccagtaaatcgaatgggagtgaaggattcttgaccaggtatcaatggatcaagtgcagcccgaatctgtcttcctgttgggttttatg

SEQ ID NO: 123563 - DNA, 632 bp, Cannabis sativa
tatccactcaactggaagtatatcgagatcatgatgtaattcggttacatcaatagccttccaatatcttgcaggttcaaattcagatccaaataatatgttttctcgtacctagatggaagaacaacataaaaattaacacacataatatagaacttaaaaggttgtaatatgtacaatacaagggccaactaaactcacagttgcattgaaaatccacgaaatttggggaacataagcaacacttcctctcaatacaatatgagcatttgacacagaaggtatttcgcttatcatagctgatatcagtgacgtttttccttctccagtcccaccaacaatagcaactaagctaccaactggtatatccaaattaatatttgataaggttggtttatctgcctgaaaatagggaaaaatttaccatcattgcaattggaatagcattagcattagcatagtttctacatcttgagaaattttctaaactagctatctgtaaatgagacttgtggcttgtagtaaatattcttgtaatgtatgttagctcaagaaaggttataaggaggtgttgacaaaggttaagaaagctgtaaggctcacattgaagaagtctactgagaaatattcct

SEQ ID NO: 123564 - DNA, 849 bp, Cannabis sativa
ggttaaattattttgtctttttataatttttcatttttcttttaagtgactcttctctttaaaaaaaattaatattaatatttgttttttaatgttgtgggttatggcttattttttttttcacttaatagattcatagactcttcttatcttttaaatatatattttaaattttaaatctcaataatttaatattttaaaaaaaaaacaataattacattttattttgttacaatttaaaaaaattaataatacattacattttagtcacattaaatttgtattttgctattgaattacattaaacaaaattaataaaataatattgcagaaaataatattacattaaagaaaatcaatgcttccatcagcattgtacttgattttgtatacccatttacaaccaatggcatgatgattagggggtaatgaaacaataatccaagtgtgattatcttctaaggctttgatcttagttgacatggcaccatcccaagcaggtatcccacgggcctgataaaaaatctaggctcatagtggctagtagctaacataagagcacgaaaattgtggagacagcctggtatagttgataattttagaaataacatggttggtgacaggtgaggggttttaatgttgaacattattagcagacaaaaggcagtgataatcttgaagataagatggccttttcttttgtttaccaaacctattaaaagaagaagacttagcatgatgctgagtgggcaagggtgaaacagcctcatgatgtgtaacagcaggatgcacaatatcagtattgagattagtatgtacaacataaggtgatgagtgaaactgaggtgt

SEQ ID NO: 123565 - DNA, 573 bp, Cannabis sativa
aagagggtaaaaagtaaaaataaaagatgacaatatgacaatatagaaagggtatagagtgtaatttcctctatataaaaataataaaatgtcaaaatacagtccctaaaaaaaaacatcgaggccagtgcaaatgcacattggcgcactggacatttcatttccgtggacgctttcgaagttgcagctatcaataaatcttgggccaatatccaaattttagaaggcccatcaatttgaaaagccctgaatgatttgaatacacagcacatgcttgtgttgtgatgtgatacatataactgaaaataaaatgattatagtctatagtttctctaaaatttatatgtatttttcttcctttttttttttcttacgaaaaaaaggatatgctgatctcttcctcaccacgtgcagcagaatcatagttgactttcataatgggtcataggtaatgtatcttcaaaattttcatatcattaagaatgacaccaataaaattaacctcttaaaagactaatcataattcctcccaataatgataattaagttgaaaaatgcctcttttattcatca

SEQ ID NO: 123566 - DNA, 523 bp, Cannabis sativa
tttttttttttgaagaaaagcttaaatatattacctactaaatctcaagggtttatagtcatcatcatgcgtgcataaataaagatacatgtacaaaaatatacacacacatccaccgacccagaaaagatttagtacatgtaacctaaaaataatatatatatttgaaaaacaaaagtaattattttttatacggctacaaatgaaagtaagccgaaaaaatacatataaaattatccacctataaaagatttagtagatgcaaactaaaagtgataatggtttgttaataatttttttttattttacaattatatacatataaattataaaatatataattacaaaatacattcaacaaaaatatcggtgccacattaccatatcaaattctaaaacaattactatcgaaataattctctttcttcacatttttctttgggatttttacactagatgtcaaatttggcatcttttttacatttttatttatgtttgatcttttaaacttttttataaaatc

SEQ ID NO: 123567 - DNA, 3100 bp, Cannabis sativa
  modified_base (191)..(192): a, c, t, g, unknown or other
  modified_base (2455)..(2458): a, c, t, g, unknown or other
tgcgagtataaatattaaaacactcactttggggtataacaataagatagagaatttatttagtaaattttagaactacttattgagaacttgattatataggccatggtccccacactagttgagataatattggcttgtagacttagttaattagttttaattaatcaattagaattctaaattagacnntgtcttatttgtgaattttcactaagcaagggcttagagaattttttttaaggtttgtttattaattaagagattttgataggtctaattaataaatagattaaatgataattttatgttaaatagataaaaataatatttacaaagttagagttaaaatatggtattttgagaaagaaatatatgttatttaataaagtatcaaaattgaaacacgtagggtccacaaggggttcagccacaaaagagtttaatttaaagccattttatctttttttttttaatttatatttaaatcctaacttaaccttaataggtatagtatatatagataattataggctcttatatgtagagccgctgataactagaaatcacattgtcagacaaataagagagctcctataatttttgaaagtctcttctcttctccttcttgaatttcaaacctatagtgaagagagtacatgcccacaaatatcaagtcaatactaatcatagtgtggaagattgtgaagaattctatcactaaaggaaatctaggttcatatcttgacaatactttgcgacaaaaaggaacaaagattagagatctgaatggaaggagccataatattctgttgccaccaatataaggctttcttcaactttatatatgtttatttcattgttttaggaagttcatgtttaggatgttagattatagaatataatcaaacatacatgttagtaaatctatattctagtaaaataatttttaacagctggtctttgagtcatgatattgatttatttttatgaaatatggatttaaaatgattaatgtatgatttgaagtgttcatgttgatctatgtgtttaattgatgattatttgtaaattgcaaaaattttatgaagaataatatcatttacgatttggaattattttatttagatagtttgggaaaaattaagaaaattttttatagaacttaattttgattaaaattgagagaattatgatttttgatatttatatataaattatttcatattaaatattagtaatttgatgcgtcaaaaaaaatattaataatttaacattcatgcatatatcaaaatgtttaactcttattaataattgaaaatgtctttacatgctttcagggcgtaaaacacacattctccattcgtactcctccaagactcattataccttagtgttaaaaacttgtcttgtaacgccctatttgcttaggcatgctacagtaattttttacttattgttcatgcctttgctattcaaagagtttttcgaaaattatgtcaaatttaaacttttaataaaacattaaaattatacatatatccgcacaaaaagttggaatctcatctttaaaatttataataatagccaaaatacattttataaacatgtcgctcaacgactacaaaataaaggcccaagtcaacctgagaccgaactcttcaggtctaacaatcttaatatgtacaatcatcctcgagctctggactcaatggtactcagcttttgccttttcttgacctacacatgcaaacatatctgtgagtcaatgaactcagtaagaaaagcacaaaacatataacataataccaacttgcatctaggcacccatacagctacttacaaggcttcagatgcattaagaacgttcttaatagaagtacaacctctgtaccacatgcactaagtacttgtcccatactagtgttggtagggctgaatcgtacgtcgagtaccacaaagtgttgtaccacatgcactatgtactcatctcgtactagtgttggtaacactgtattttaccctttgaacatcatataatgtaccaatgtacttcgtaccgctaccgtactagtgttggtaaaatcttaacggggacctaaacctaaaaatagaagttttcttatcgataaatagcatggtatagccctaaatattaaggaaacgtaaaaaagcaagactacaagaaatctacctgaaaaatggtaggccatttctataaaaacgacaagccattttttttggatccctgcagtagaaacggtagaccgttttcatagattagcctgccattttttgctgcagaaaaacaaagagtctccaaattaactcaaaacgaccccaaactttaaactaagctccatatcacctatacataccacaataaacaagttcgaagtggtagaacctcaaaatactcaaaaatacaaaaaccaccattgttgagccaagtttnnnntcttgaactcaaacttgctcaactcaacaaacaacccataaaataaccttaaacaagctttaaaaaccgtaaaataactctaaaaatcaacccaaattaaccccaggttcgagcaaaatcaaaacttcaaaaatgcacgcttgaactaaaaactaaacttccaaaaaccaaagaatagaagtgtctagggcataccatagattttggcttctaaactccttgaaaactagctgaaattactgagaatagaaggaaaaaacccctagtttctcttggtttcttgaggccatagaggtggagagacagagagttggataaagttttatttttagtttatgtttatctaatgatataacttaaaagaaaataaagctttatcccttaataaattcagaattaaaacttagggaaaaaaactcactaaaagacaaaactagaatcttaggtgaaatttccattttctcccttaaaacttaagcaattctaagaattaggggtaaaatagttcaaaactataatcctgacttatcccgatattcgaaatatcaacataaaaataccctactaaattaaaaatattgaatttcacatatagcatattagggctgtacatcgatcggtttaggcggtttatcctatata

SEQ ID NO: 123568 - DNA, 1743 bp, Cannabis sativa
  modified_base (46)..(70): a, c, t, g, unknown or other
aaacaagaacataaatgtgataagtgtttggatgaatttataaatnnnnnnnnnnnnnnnnnnnnnnnnngaaccaaatgacacacaaataagtgaaaaatattcctgtctctttattgatatttaaaggataaatattacattgaaagggcataaaacccaacagtgtcctccttcccacaaaatgccttacagcagtcatacaccacacaatgggaaatcttcataccaaccgacttttaaatcatcatgttgtagtatcaactcttgtggtgtgttgagtacgaaatcttaggtgggtgaagggtatgcccttacccacatgtgtgcttgtaaatacccttacttttcatgtacaaagggtgaacaattttcatacttaccgaacctctgctaaaattcttactagctttcttcttcttcaagagaaataataggactacaaagctagggtttatattgtaaaattcaaacactcgcctgccaggttaatacaatggactcgtgcactaggaattattaacgcatgaaccacataaaaattacttgtctattatttattgttttatatctttcttaagctataatttattggtttccaaaaatctcacaaatcacttatatagggcttaggttgtgaattactacaataggatacgacttacacagacaatgcacacaatttaattaataagtttgccattcaattacactcgtgcgatctgtattaggccaatcttaaattataaattagttttataattactttcttaatttttattagatttttaactagtttgtatttaatttttaaataaaaactaaaaactaaatatttaagtgtaataattttaaattaaggttttatatataataattttaaattataagattatatttgtaataatttcaaatttaaggtaatgtgttataatttctaattataaggagttttgttacaaatattttaataatttaagtaaaaaaaatgaattgctaaaagatctttgttaagtaacaaattgtaaaatattaattaataattataaataatttaattttaaaataaaattattcttaattaagactatataaggaaataaagtattaggttactatatggttacaagttatttattatttatttttatttaatttaactatttaataatgatgtaaaggctaaaaatataaaagtaacggttatagttatatatttgatgttactattaaaatttcctatatatgtttagagaggtttttaaagataggactttattagggtattaaatttgtgatgtattgttatatttaggtgttagttatttttaaaaaattttacaccaaaaatacaaaatacatactttattactaaaataccaccacacggttaagcctacatttttactcttcaactttattttattacaattttaccacttgcacacacattccatgcatcactacacgtcagtagtctatgacctctatcaatcaaccatccatcatttccctctctttttctcttctttttccttttattttctatttctttttaattttttttataaaaaaaatatcaacctccatagctgaactcttccccctccacgatcccaactccatttttcctcttctttttgttcttcaaattttttttcaactccattaaccgaaccccataactgttttccatccttttatttttctcttaatccatatataaatatagctgtaactcgt

SEQ ID NO: 123569 - DNA, 710 bp, Cannabis sativa
tcctttgtgatctttgtttatattcttagtgtaatggagttagggaaatgttatttattttgtttttttgcttgtacttaagtaagaaattgtgaattcatttctagcaccgtcactgaaaatattacaacttttttggtctttgtattctttcgagcacaacacctaaaagtggtgtcttaccaataacgatatgacatgttaagttagagggtgcttagcaccaccactggttcttattctttcttatctcttaagctaggctacctagattaaaaagtaattagtttttattgaaccgaaggttttgattagataaatatgtgtatgtatataaagggaaaaagaaagcaaaagtcagttgaaaagaaaaactatcgttatacatttatagtgccaagtgtcaattttacatgtttaagggaagaagaaagctagacaataataaaggaagacttttgaaattatattaatcaaagaaactataatcgattaactacatgaaaacgaccattataattttataaaattttattttgtggtatagttcttccaaataaaaatgtttttattattattcttggaaagttgttcatagaaagcagggtcggccttgaaacaaagtgggtcatagggggaaaaaaaaaattttggacccttatgttagaaaaaatgtggtatttttaaaaatcggtaaaaaaaaatgtata

SEQ ID NO: 123570 - DNA, 1929 bp, Cannabis sativa
gttgccccattccagctgactcctatctcctacaaaattctcgctagtttgaaggtcttgtataaaattttgaagtgggagtgccctacgccagtagagattgagtactcggttaaggttgttccagtaaggaagaatgccgcagggggcttttattatctcggtgatcactctagcgaacctaaaattattgtggacctgccaaacaaagtatctttcaaagacgacttcttgtggacaactggcctttccccgatcggtacaaccaccttccgcagaattcataagtgattgttttcctcatgctcagttgaacggatccttatcttttcatttttagttttctaaccaatgttttgtttgttttttttttacagccctctcaaaaatacctgtccctactcccgagatggtcagtcggcacaagcgcctgttgactcttccccacagccttaggtcatgcgacttcctcttgaacgaggccaatctgagatgtgggccttcttactgacaaggagtacacttgtgattataagtttcccaaatattcttcttggcagcaggttcccgttccaaaggaggataaggcctaggatcgtgtggctcgagcacaaaatctttaaaacactgtccctcgcgaagccggtgaaggagcatcctgaggtaatcaatatggttagtctcccacagtacttagggctgaacgtaacacattagtcaccttccgagacacccaccttaatttttatatttggaattcccttctcgttgaccgagttgctcataggttttacagctggtaccctagattctacatccagttttactatcacgagtcatattatggtatagctgagcaatatggcaccatgacagataaggcaagtcatgtagacgcgagctgggatctagaacaaatcaatccctttgatatattcaaaataataggctgtagggattttagtgggtattacggtcctcctaccccctcttctagtgatagctcgccttctagtggttttggtaaatcccttaggtggaaaattgtattccccttttttttttcttctaccgttttaataattgtaacacttcattttgtcttccaaacatgagttttgaagatattatggaccaaaaaaggaagaaaaggggaaccaacccaggggttcccacaaatgccaaggtggtgccctctaaaggacaaaagaaaaccactgcccataagaagaagacatttcccaagcccattaacctcgaggtctctgataccgagacccataaacagattccacctctagttgatctaaacatcaaagcacctcctcctaagatggctcatgcctctgcctcctcgagccaggccattgaaactttgtcagtcgcaggagaggaggctggttctaaattttcccaggcatttgggattgcctggtggcgcaaaattaacgctctccttccccgtgattgggatctaatcaatcttgggagtccagaagagtcgtttctgaggaacttggactataccctcatggtaagttggtcgtattattgttattattattattttgttcctcatattcatttgctcataattctccaagcttctttcctgtcttttacctccaatcaacgaatcttggagcagcttagatacctggagggcgaggtccaaaaatcagtagcccaatgcggggtggtgattaagcaacaggatgacgccctgcaggaaatcacccatcccaaacaggaggccgagaagctcactgagaaggatggcgaactcgcaaggaaggaagccaaaaccacataacaatgcaacaaggtcgacctttgtaccgtataccgagcctgggtggcgaatcccaacatggacacaagcttcttggaggaagagtgtaacgccctaatgctaaggcacgctacagt

SEQ ID NO: 123571 - DNA, 1557 bp, Cannabis sativa
cactcatatatatatatatattatgctaatcttaccttatttcctaattcaagcgtgtcggccgacatgaatgaaaaattttcgagatgaacggagatcctatgtcacatttacataaacgggtaaataacttggacaaactttctcgaaaacctaaaattataaccaagggtaaccttaaagataaacaacatagtactgccctaaatatcagggaaacaacaaactaggcattggaaataactcagactggaacactttagttttctaggggtcctgcctgtgaaccggtctaccggttctacaagtcctgtagaaccggtcgaccggttggcaccaagaatcccctaaaaatccaaaactttgccaaaaactttcgcaaattcaatcataccttccaaaacacctgcataaacaatctataccagtttctaaaccttaatagtaggaaaaacgtacaatatcgcaatatgccattattgaatcaagtttgagttctatgaactcaaacttgctcaacctcaaaataagccaattataatagttcaatccagcctaaaacataaattaaagtccacagaaaacaatctgaactaaaagtcaactaaactgaattaaagtccccaattgacaaccctaaactcaaagaaaccatccaacaacaaaacaaaactaaaatagagttagcgtaggatttttacctttagtaaactcttagatttccactaaataacctctaaaactgatgaaatctcccctaggttgctggttcttactcgccgaataaggaagaagaagaatatagggttttctctttatttcttcaattttctacttgaatattctataaaataatattttattttgtatactttaattaattataacaaagccagcttccactcaagaaaaagaaacacatattcccatggtttaaaatgcctaaactactcttgcctcattttctaatttatgatatggcctaggggtaaaatggtccaaagccactatcccgcctaaactcaaattccctatctcaatgtactataactttgaaaaataaaaggttccatgtttacccatgtgacttaaataaccctccgttgcatttttcctcgccactgagctagaatcacaagaataacatattttgcatttaacataaatatttacatataattattattaataataaaattattatttataaccctactgatccatatctaaatcatacggtcattacaattattccgctgtgaaaagaattttgtccttgaaatataacttgaataactctggatattgagtcctcatggcataacgcacactatatgtagcaggttacttttagaagaaaaatgaaagcttaaaattcaactgccacgttactttttcaaaatgataaaatttgttttttaaaaaatacagtcacaactcaacacactcaaccatatttaatgatacatgtataagatgacttaaaaactaatatgttactttatgcaaaaataaaatcaaaattaacaaactatacaaaaattataggtaaaagta

SEQ ID NO: 123572 - DNA, 1596 bp, Cannabis sativa
  modified_base (627)..(628): a, c, t, g, unknown or other
  modified_base (730)..(731): a, c, t, g, unknown or other
ttaaaagtaattaagcacaaataaaatagaatacatagaaattagggggaaaataaatcatattaaaaccattaacaatgttaaacaatatccatctaacattgattaaagtgtttagctacacatgttcattgaagcacaattacacatattaactgtaagaaaagagatgaaaatagagttttatatataataatttaatattataatgttatttagtcttaaaaagattttagagtgtcatattactatttcatatctctcccacatataaatatatagatatataaatatcaatattaatatataaatatatatatatatatagaatatatatacagtggtggacccataatttaattggagggtgggcgtaagtttttttatatataaaaatattccaaaaaaataagtaaatataataataaataaaaaaaaacacacacacacacaattcaatatttcaattcccaactaaaaagataataaatatcaaacactaaaagtcttctaatagaaaaaaaaaatagagagaaactaaaacaatgttcaaaatatataacatactcaatatcctaaaattttagcaaatatatcaatttttgagctcatatttttagagttgtnntcgacaagttttcatgttttgaaaacgatgaataataagctcgttgtcaatagcattgaatatatcatttttgacatactgtcaaactatcatttaactatnnatctcccattttgttgtgcatttgttgtgggcaattaaaataattaaaagattcttttttaattaaaaagtaaaagaaatattttttttttcagcatgggcttaagcccacactggtccttcattgggtccgccagtgaatatataaatgcatagatttcctatgtaacattgtaaaaaaatataataacattacctatcacttttttttttttttaactttggaggagaagagattaaaatttaggatctcatcaaaaaatgtcattagactatgcttataacgactattaaagtagcatttgattcggatgaatataaatatagaaataggaatgaaaatgagaatatgaatataaatggaataaaatttaaaacgcatacattgtaaaaaaaaaaattaaatgcataaaaaattgattaaaaaattattaattttttcactatagattggaatggtatttcttttcacttcaaaatgaaatagtcatttcactaaaatagtagaaaggatattattaaaatgacattttaatactttaatatgcgaccaaataaaaaaataaagtaaaaataattttttttctcattccattcaattttattatctctaactaaacgttacctaagtgttagtttttattgtggaaaaggaaaatttaaataaaaaagtaatattttattctttaaaaaatatttcatttaaatattccaaaaacaaattgcacccgtagatttatccaatataactcaaaatttaattgatgttataaatattattaattatgtggatgtccaaattttttatttattaccattaatgtaattaacattccctttttcttagtttccctttctcttagttt

SEQ ID NO: 123573 - DNA, 2069 bp, Cannabis sativa
atgagttatattttaatttttcaccacttatttacatctctattggagatgctctaagattaaaaaaaaaaaaaccttagagctggttctataggatatataatagctgtattatattaaataataaataatattatatttagataagataatgtattatattaattattattaatctactataaaaagttttattacagtgtaagttgtattatttaatacatagtagttcgtgttagcttgtattataatattcataaaagatctggaatcaatccaatctccgacccaaattcgggaacccggaccaaacctgacccaagacccagacttggacccaagactgaacttagacccggacccagccctaagactcgagatctaaacccagacccgagacccagatcaggatcaggatctggacccagacccagccctgagacccgagacccaaacccattaccgagactcagattaggattcgaattcagacccaagacgggatatggacctagaccccgattgtaacgccctacaagattaggcacgttacaaattttttaattattgtgcactcctttactaatcaaagggtttattaaaataggtgaatgattaaattttttgtaaattaacttaacctaaaacaaatatataatacatattttgggatcccgtttaaaaagttaccacaatttttcaaaatacttgtatacaaaagttgtcgcctagcgactatcaaaataaagcctaactgtcccaaagatcttaacacttcaggtttaactgtatcgatatgaacaatcttcatctagtgcgagaacactgctgctcaacctttactttatctttacctacacacataagaaaagcatacatataacataaacatttaataaatagattgaagtaaatatttacatttagatttatctaaattagtaattttaattaaataaatagattgaaatgaatatttaaaatgaaactataatttcttctaaaatattgagctttaattttaagaaattcaacctccattgttggtcttacatggttattattttcaaagggatctggagacgctagactttgtccccctaatggatggttatccattgaacctttaacatcgtaagatctcaaaagataagtactttgttattttttttctagtaaactcatccctacgatgactacatagaattaaatttataaatatgaaccaataatagaagctcattgttatcccatttttcgtcctcctaacgtggcatgcttacgaggacaaaatcagcaccacatggtcgtacaactcaccaataagaatgacaaattagcacctaagcaaacggagaccccgacactcaaacgggcatcaagtgacagaccaactccctcataggagctagccgaccacatcttgccggccctattgccaaccagccttggcactgcaccatggtcggccagcctgccctccacagtggcctgtacgactaggaggtattctgtagggtttcctgtgtacttctacacgtggataacatcctatgggctgcgaattgggccctaaaagcccaacaaatagctgaataatatctacattcaatgagattttggtcttttgtaattaactaataaactatgcaaatatttagagttttaagttgtaatctaggatttaggcctcctatataaaggccttgactctaacctagaaacctaagtttagactaagccttaaaccttcctcaaagctctaagcctaagtctgacaacttctctaatgacagctcagatcatgtggcctctaatataaggaaagatatgcacaaggattacatgatccaaatgtgttatgaaaaggcttggaggtgcaaggagaaggcactacacctagttcggggtacacctgaagattcatactcgaaaatacctggttacttacacatgctaaagttgagaaagccaagttccatccacagattttgtggtagaaggtggtcgcttcaagtattgtttcttctctctgggtccttgtatctgtgggtttaaatttttccgac

SEQ ID NO: 123574 - DNA, 892 bp, Cannabis sativa
aagaatttcagttatatagatacactttatataaaatagatatcgaatgacaattaatgataattattatataatatatgtaattcaaaatatataaataaaaataagatgatttattattataagttattcaaccttaaaagtataaaatctaactaataagtatgagcaatcaaattatcaaaatatatataatttaattaataacaaaaaaatttaagatcaactagtgcacatataccttagtttgttctcaatctcaactgcaattcgatatttgtgcaaactataaaagctaccaactaattaagtaaatgcatataaattttgagtaacttataatatactaattattaatgacagttatgtgaaatgtaaaaaaatatatttgtactttttttcttcactcaaataaaataaaaaagatgcatattgtagaaaagaataaaagactctatcttatgattggtgaagtaaatttatagtacaattgtataattggatacaattataaatattataaataataaaataattggatacagagcaaaaaaaaaatttaatctcacatgcgcctcatcaatcaccttatcaattttacaaataacaattaagatttaacatctcataagaatcaaagtgtaaatatatatatactaggtgaatgttacgtgtcaagtaacgtattgttagttttattgtaagtttcgtttttttattttttagatttcggtaactaaagtggtatgattatttgaactatttattttataaaagtaaattgtgtgcgagtatatttcgtaagttaaacaactataaacatatgatatgtacattgttattataataaaaagtatgttaatctcaatatatacatactcatagtagttat

SEQ ID NO: 123575 - DNA, 2189 bp, Cannabis sativa
aaataatatttacccttaaaaaatcatataaatatttattttttttttaaaaaataaaaaagtaactaaggatagtgaacagttgggatatttgataattcaaatggttttttttaagtgataattcaaatggttttactataagatttatatatatatatttacaaaaaaaaatcaggatataatattaaaaactcagataatttttttttttttcaaaacaacatacaatagtaactaattttagctagcagttgggattattgataattccactaaaaaaagaaaaaagaaaaaaggtagatggttatatctaatgtatatcctttaaaaattacattattgttatatagttaatggttaaaacgtaaatgattttgagcatttattttttaatttgagaaatacttttattatttttgttaaaccatcacattcacatggttgctattatatttttggtatcagtggttaataaatttttttgaattttcattaaaaaaatatgaaatggttagatgagaaatatttatttttattctatccatataaaataaaatctatataaaatgtggctatatatgaaatgttagatgaaaaatttattaagtaacttttttttaaagttttttattcaaatattctattgtttaatagaatattcttttttaattttataatcaatttttctactggatttttagtttctgtatatcatatttttggtcttgttaatgtttcttttggatcttttgttttcgaactcatattttgtgggtttttttttatattagaggacgatgaaagggtggagtggtgaagttgaataaaaagcttttggtaaggaattaatggtaattcagctattaagatgttgtgtaaacttttcttctcattgccaattccaatttatgtgcatataaatttgatagtcagttttgtggaaataaataacaaattcgttaatttatttcaggtcgtaacgctcatatcagggaagatcctattatagtgaaaaatattccatactaaaaagccacgaagacacttaagaagtaatgaatttcatacctctataaaagctgaaaaattatgaggtaagcagtctgtattcgttagtttttataaattttacaaaacacatatatccctttgaatttttcagaaataaataataaatgttaaagtcatatattgtgacttattataaattattttcacattaaggataactatattataattatgtaaatattgcgattaacatacttttattattaatattaatctacttttaaataaaatagaaaatacatagcataaaatttagtatacatcggatctaactttttactaatttgtgtaaatggaatgataactggtggttatccttaagatcttgttatattaaaaaactaattaaataccattaagaaaaactaattaaatattcatattttttttttcttgcaaattaatgaagaaaaaagaaattattgaataggtcaaacttcaaacttcttattagaagccaaccttttcggctagtgatataaacttgtctatatttatcatagtatagtataataggaagagtaggatttagagaagtgacaccacttatttatttattttcaaattattagtattagtattcacttttaatttcatattaaattaatgattatagatctctttattaaaaataaataaataaatctcaagttgctatgctatcctatctctttattcatctacttggcattttcttttcttttgttcacactttttttttggttggggttcttcttttcacacttattgatatttttttaatatatatttttttaatatacattccttgtctcttgggaatttaaattattttgttttttattcactcaattattatggatagatacttttggatttctttttaaagttgtaaagaatataggactccacgtaagtttcttattttctattttaaaaaaattcatttgtataaaaaaaaaatggttgggagaggcatatcatactattataaaagtgtcttaatgaagtgatagttttattgacatataaaccctttgattgatgatgtgctatttacataatgacatgtatatcctattcatatacctttagtttgatgatgtactatttacataatgatatatatatatata

SEQ ID NO: 123576 - DNA, 698 bp, Cannabis sativa
atgaaagttaataccatttatagctttacataaaaatattgtataaaatacaattaaatataatattatacaacataatacggtttaatacgatgtaccaaacgaaccctatatgtaataatctatacacacatgatacagaggatgattttttttgaaaacactaaaattaaaagttcatactgatttttattcactattttttctttaaaaaagtatgtacttaaaagttttacactgtattaaatttattctttattttcatcaaaaaggaaaaaaaaactgtatatttaaaagtttcacattgtattaaatttattaaacacaaaataaataaatatatataaatattttgactctacaatttgaaacaaggttagtaaagaatagaagagaataaatgacatatattttgatctttgtcaatacatgttattggtttaatttgtatagaataaatttgaaataaacttatacaatataatacaacacaatccaacacaatataatacaatgcaatacaatacagcgtaccaaacgaggtctaaatgtattatatatgataaatgtggaaatttataatcttttcaatttttttctcagtaaaggtggaaatgtgacagtttgaccattaaagtcacatgggtttagttagggaaattatagtctatgaccccaaatcataggattatgttagt

SEQ ID NO: 123577 - DNA, 1292 bp, Cannabis sativa
caaaagcaagaacatgaaagcctcaaggccgaatatgaataaaaaactagttcaaatgcataaggccaaggccacacaagaaccgtgtggttcaaaatgcataaggctgaggctccgcaagaactgcataactagagaagagctggacagagttcctataagaacgatgtaccgggctaaatctcaaaggcaaggcagagttcctggaaggttccaagacaaaaggtagagttccttacaggttccaagccatagataaaactctgggcaaccgtatccaaggggatttgccaaataatgtcattgtacaagggtgggtatcagcaaagtacgagtctcaaatgtaaaaacatggacacatgttgagtcttaagttgagcattcgactataatagactcaccattaagttttatacaaagtttctaagggagccacatatgagactaaggttgtaaatgcgtacaaggccatgaaaggagtcttgccacctgcttggaaccaaggcttaggccggcaagggttcccaagccttggaaggtcggagggtcccatgactcagccaaaaattagccagggtcaccagacccagacatgaatcggctagctttgtagggtgaaaccctagagcttgacaactcccatgattgaatcttagggccggccaggtctcaaacaagaaccctaaggctagtatccaaggttaattctgaattgaaatgtgagtttttttcaaagctcgaatgtgtgcctcgtgttctttatgactcaaagagtcaagaataaaattaaaggccaaaatcaaatcttttccattaggaaatcacagattatactctaaaactgtcatgtggatcaacataccaaaaagcttacaatctaacatgagaagaaaaagatttctaaaagcttaaaaagcttgaaacttatcaatggcaggttcaaagaagagatgttaaagaagagaagatgaggcatatatagagagaacattaaagatctaaaagcatgccatgcaaaaagccaataattggttagaaaggctactacaagcaatacgagagctggaaagtccctatctaaccagatatttgaacaggaacttggggggtaaatattatcctaaattttgtccacctaacgtggcatgtgcacataggccaagaccaagtacacatggaatacaacttttccatatagcaaggcaaagtctccttacaaggtatggcaaaaccgtcaaggagtaagtaaaaggagttaagcaagccgtcaaggagttgtaccaccatgtctg

SEQ ID NO: 123578 - DNA, 1917 bp, Cannabis sativa
atgtgaaccatgcaacattaaagtgatttctgatcttacattaattagtaaatatgattatattgaaatatgttttatttagggtataaaacccaatggacatccagtacacccaataatatttcacgctcgaaaagcgatgcacatacatctcctgagcttcgggaagctttaggggttgtatgcacgcgccccaagatctcctagcagtctgtttcctctggtttagtgcagggcatctaatggcttctgaagcgaaagctcggactcccagtaagaaaagtagtggaccggtagggaattcttgaatggtttataatgtctcaagttactttctctggtgtaactctggggttgtagtcacatcaggcgacaaatacctcctgagcaaagtgtgcctaaaatggcccgcttccaccaacaatgacataaccaggccttactggtggcccagaagatctcgatggtactgatggtctcctctcagccactgccattacaggatcaatttttgaacaactttgccacctagcacaaaggtaggggaagcagttctcggtcaataaatttggcccttgcattagcaccagcgtcagagtctcaagatggatagggttcttacacctgacgacccctcctgagttagttgtcataactgcattgggtcgcagcttctttgtctggacccaacacctctttcacctcatcgtctctacgtggttacgccttagtgacttgtaagaaacacgggtctgaagatagcggtggccggtgacccttacatggagttggctagcttgatctaagctttgagggacggatatcggtacaataggtgttttaagatcacatgcatttgtctttgctatttttctcatgtggatgaagacatcgggtacttttttgggcaactcctccaatctgcacatactggcccttggctggactcaataagagattaggaggtcttccttcttttctcgcacgagttctcttttcaacgggctcgcattcgtaactgtcgtgcatatctttttcatcagctctcaatgaaagtaccaaaatatttaccaagttttccagcaactaaatatttttgagcttaagaaggtaataatggagtaaatagaaagataacaaagaagatattttttacgtggttcaagcgttaactatccttagtccacgagtccattttattaggctcattggccggtaactatttacacaagtagagatacaatggactaaaactcctttccaccgtgtttcatagtagggttacagtaatgtgtttgatcaagaaggagtcttctctctcccaaaaaaaagggtccttttgccttgtacttttgctggggtatttataggtcagcttctttgcatgggctgtcttggatggatcaccgttgggctgaaatcccaccgttggattggtaggtattatttttcccatatggcatttaagggtgttcaattgtactggttgtacaagctgggcctcgaacgcgtgtcacctcaaggctgctcctatttgaatttaccttatccatagttgttggatcattcaacccgatacataatgacacgcatgctctgtacgaaagtatgtcgtgggagacaacctctgacatcgtacatgaaaaagcctagtcactaggtccgtagcctgacacacgtgggtagagcctccacgggctaaaggcattccctagactgatgtattctcgaagtgttttggcctttttgggaaaatccatatttgtaaagactggttaattttaaatttggaattagcagataattagggcttaataatgaaactagattattaattatattttatgattttatggagatttatttaaattcagggtgtattatttatgtcatatatgaaattttacatttttgcat

SEQ ID NO: 123579 - DNA, 1786 bp, Cannabis sativa
tatgggtaatctaacaccatcccgcggtcttcgccaaggttgtcctttatctccttacttgtttttgatttgttctgaaggcttctctcgattactacaacatgagcaggacatcggtaacttaatgggttttaagctgacacgccatgctccaccaatcactcacttgttttttgccgacgacagcctacttttctgtcaagcaactgagagatcttgtcttgctattaagagtgtcttgaatacctatcacaaagcttctggtcaggagcttaacttaagcaaatcggttatgtctttttctccgaatactactcttgccgctcaagtgttttttcatcaacaacttgctatgcctatatgtgaatgtcatgagaagtatttaggactaccatcttactcgggacgggataaaaaagaaatgtttagccacattaaagagaagatatggaaactgatgaacacttggcatgagaaatttttttcagcaggaggtaaagaggtactcttaaaagcagtagttcaatccataccaacatatgctatgagttgtttcagattaccagtctatttttgcaagcaagtggaatctatgatggccaatttctggtggggcttgactgaaaatggatcaaaaatccattggcgctcttggaaccttctttgtaagtcaaaatcagagggcggtatgggttttcgttctttcattcatttcaaccaggcacttcttgcaaagcaagcatggcgaatctatgacaatcctgactcactcctaagccgagtcctcaagagcaggtattttccaaataactcttttttggaagcttctttgggtcactcaccatctctcacttggcaaggaattcattgggctagagagcttcttatcaagggtttacgctggaaagttggtaacggaatgcatatacagtcgggttatgacccttggattcctgggcatagtactttcttgccttttctctacaagggtccatcaaatggtgttgttgctaaccttatttctgatgaacggcagtggaatgttcctgtattacatcagtttttttcacctgcggatgtggacagaatcctaactatccctttgagttatttcagcagtcatgatactcttatttggcaccaccatagcacaggtatgtacacagtgagttcgggctatcatcttgcttctgatcttgatgccgtggatctaagttcttgttctcgtgttcactcttcttggtggaaattcttttggtcattgcaactcccgccgaaagttaaaatttttgcttggaaagctgtccataatgctcttcctgttgcaactttgctggtcaaaaggaaagtaattactgactctacatgctcggtctgtaaacaagcttgggaatcggttggacatgccctttttcattgccggtatgctcgagctgtttggcgtaactcgaatctgagttttgactggcgtcttgctgctacaatgcagaaaggtgactttatttttcacctttcatcaatactttcaaaggctgaaatggagcaacttttctgtactctttggaccatatggaatgagcgcaaccgtgttgttcatggtcaaaaagcacggccagcatctggtttagcttcctttgctgcaacttaccttttgaattatcgaaatgctcaacagaggcacggtacagctgcaacacctgctgcaactgcacatcagcagccacaccagaccacagctacagcagcatcgcctcctagctcgaatcctcggccctctttgcaggct

SEQ ID NO: 123580 - DNA, 1859 bp, Cannabis sativa
cattcctttaagtaaacatgtcataaagagtgtctaccatagacgtctcctatagtatatatagtcaaagtattcttatttattaaaatagagtctaaatattataataataataataataataataataataaattagtttagaaaaatatcctaacttaaacttactatatttaaacaacctttgtttaaataattaattaaataataaaataaaaaatcaaacagcagataccttatcaattatacaccgtatacgcctatgcacgaatggtaaaatttttctaagggtttttttcttattaagtattttaggttcaaattttacatatttaccttggtaaggaaattaaacaaaaataagaaatttaaaagttttttttttcaaaaatacaaataacttcacctcctgaatcacatgaatctcttcaaggatgatttattaaataaataagacactactttttaattgtagactgaactgggcctatatacatatatccctgtatattttattttatttcatagctataaaaagagaatgaatcagatcaaccatatctaacagtatgtcatatctaacactatgttagcacgtgaactcatgcttgtttaattatactatatattgttctctctctcatttatattggcctttaaaacaactcaaaatgcacatatgagtacatttatataaatacacattggaggaatttgtaagtattcaaagttttgttctagaaattttttatttgctttcaattataatttgtataaaaattgagttctctaaaaaaatcgaaggagaaagttttttttaattataagattttttcaatattatttttttatctctcaacattgcataattttgtgtgattaatttattaaatcgattttttttctttctttaatttgccaatattcttttattatactgtaagatgtttatttaatttttattagtgttctgtatgggattactattttatttaaatacttctcactgtatatataaatatacatatatacacacacattaatatatatatatatattttgctaatttacacatcaatattattgagagcaacatcacaactactctagactctaaatcaaagatgacaaaagtttactattttacataaagttattaacaaagaaaattgatttcacacgatatccattgtgtgtgaacacattcaactacacagtaacaacaaaataacaatccttatagtagccacccaggcaattgtgtgcaacaatataacagtggctagaagtaaaaatatttcatgacactcaactgtgcagtaacttgacaacaacaccacaacaataactaaacaactctaatctgctccaaggaggagatcaatttcaaaagatgttattttcgttgatactaacactttgaaaacagaatcaaccgcaaacaacaagaaaaaaactaaaagtaaacactcaaagaagctgaatattgaagaatatacaattatttgttcatcaattatttttatgtttttatatcattgttatagttgttaacagttaaaaaaaaatatattaacaactattgtctttatgtttttatatcgttattctactataatttttttcttcaaatgaatgaactacaaacagagaacgattcaaaaaagacaaatcaaaaaaacaagttataaaccttggtaatattttctttagaaggttcaacttttaaacaccatcagaggtgttatcacgcacttaaaaatattaagatgacaaaattaataaaataatgaaccattaaaatacgattaatagttaaacataattgtaagtatatcatgtattgaacaacataaaaa

SEQ ID NO: 123581 - DNA, 950 bp, Cannabis sativa
aaaaccctaaaaatgtaaaaaaaaaaaaaaaaatctttaaatataaatttgtaatttttttacaaaaaatagtgcattatgtaattatcccattctcttatcctttctatttctggcccgatagtcttctgtctttccatttccttcttccttattagtttatagattattagtatctaagaacactcacaacaagtgagttataatattaatagctaaaagataaaaaaaaaaaaatagctaagatcttaaaattaaaattgagttccaacaaatactttaaacccttaactattatactttatctcaaacttaaataaatttttcttaacatttagctcataaatagtgaagaggtaaaacataatttatattctctctctctctctcattccattaattatttttattattctttttgcttattttcacatttttctttgttttagttaataaaatatataaaagatataatatttaaatgatataaagaaaaatataaaaaagataatgtatggtgtaatgtaaatatgtgaggtaaaatagaaaaaattaaattttaataaagtattttaaagaataaagtagaaaaattattgttagtactctaatttagagttcaatgtaaatttttgttccttttttttcaataagtgcacaaagtattttgactcttgtccacattatataattattaaggaaatttacaagtccttgaaaagttcgtgttgatgcagattagtccctaacttttaaaaatagcagcaataatcattaatgtccactttttttgtaagtccattaattctaaacttcactaatttgttaatttattcaaaattgctacatcttaaaatattattggtccaaataataatttaattaaaaataattttaaattaaaaaatatatatattttaaaatcattttttttttcataccttcagcta

SEQ ID NO: 123582 - DNA, 1091 bp, Cannabis sativa
gcaattgtgattaactccaatagatccaaaacatttgggcttgagcatgtaagagttgtaagagaattcctggaggagtttcccgaggagttactgggattaccaccacaatgggaaatagatttaatcattgacttggcaccgggagtagagcctgtctcaaaggcaccgtattggatggctctggcagaactcacggagttaaaaatacaacttcaagggatgctggatctagggtttacccgacccagtgcgtcgccctggggaaatccaattttatttgtgaaaaagaaggatggatcctttcgggtgtgtattgattatcaggggttgaataagctgatgatcaagaacaagtatcaattacctagaatttacgatttgttcgatcagcttcagggtaagactattttctccaagattaatttatgctcaggttatcatcagttaagaatttgagaagaagacattttgaagactacatttcggacaaggtatggccattatgagtttctagtgatgccttttgggttggcgaatgcttcagcagcctttgtggatctcatgaatagggtgttcaaggatttcctcaataactgtgtcatagtatttatcgatgacatcctcgtatactctcagacagaagcgaagcatgaacaacatctccgaatggttttgcaatgactcagagatcataggttgtatgcaaagtttgaaaagtgcaagttttggttatcacaagtgtccttcctacggcatattgttggaaaagaagaaataatggttgatttaaggaaaattgaatcagttaagaattggccaaggccaagaacagttactgaggttcaaagctttcttggattggcaagatattgccaaaattttgttgaaggattttctaagatttctatgccgttagtagaattaaccaagaagaatcaaaaaattgtgtggtcggataagtgtgaaacaagctttcaagagttaaagcagcggctgattacaacgctcgtgttagcattgtcctctgtaaagaaaagttcatggtatattgtgatgcatccaaacagggtttggggtgcgttttgatg

SEQ ID NO: 123583 - DNA, 729 bp, Cannabis sativa
attttctcaaataagcataatcttctacacgaggacacacttcaaatgaagcaaccattgcaaatggtaggttcttaatagatttggtttgaaaatagtacttctcaagaggcttggagcataataagactccttaaatagaaagacaccatcgaaagccaagcccattgatggccaaagtactccatctttttttaacgtggttcatgctctattaggaagaggtggtcgccattcaaattgtttcaaataagttttaaaggattttagctcgaagttgaaagaacgtatttaagtggggaccccttatcttgctcattaaccccatttaggaatgttaatagggcgggtcggatctgatccggttatgatccgacctgatccagatcatgtaagataaggggttaatgagcaagataaggtttatggacagtatcattttagttcattgtttataggattttgtactatatatctcacgtctcatttatttaattttttaaattaagggaatgggatttatcgaaataattattttgtaattgatgcaacaattttttcttaattgttcagactgtttctacatttccatccaaaatggaaagaatttgtgaaaactcaccgacagatcaattactccaaatagtgatatttgattttattttggaaatttggattaactgaaaatataattatattgtgttatgttagtaagtattgtaaatatta

SEQ ID NO: 123584 - DNA, 2163 bp, Cannabis sativa
  modified_base (1828)..(1830): a, c, t, g, unknown or other
aatgattccatgctttcattaacgacatgtcgtttaacttaactgagaggacaacaatgtagtgaattatgttcaaggaaatggtagtgtaatatatgcagcaaacttggtctttgctactcatgatgctatgaatttttctaataatattgtacgtacctttttattcaaggcttattttttcttgaaataataatgattaatattgacttgaattcaaggctccaatttagagtaatcactatagtattattgcattattattaaagcattgatatttgagagcttacgacactttacgattggttagcgatattctctaaaagctattttcttaagttatataagatataatacttaattacatcaatatcagtatgacaccaaaaaaaaatactaagcatgagtgacatttctcttatttttattatactacaatagttattcatattgacttaaattcaaggctctacggagagtgttaaaccggctccgatcgaggatgatattagtaatcaatcaaatcctctgcatatatatatgcaaaggatttcaagttaagtcagtctcataggtttagatgagtaaaagacctttggagttaatagggaccttgacattcacatggggattaagtatgatgctatggagaattttgtgagatgctttgcctacaaaggcgagactgattgccttttctgatcaatagtgaagaatggtgttaactaagattttcggaaaaatagagttttaagctgactctgaactttggtaaagcaaaagtgtgtttcgtcatactttgtttggttgttgttgaagcggaactccttgcttttaaaattggcctttagagtgcgcgagggagaagatttaagacaattatattacatgggcacatgcaattaagctgtccttaaaagctcactgaaattttgtgtttgttaatgacataatcaccaaactaatggagaagaagaaacaatttgattagaacacttttaaatctatgattaggcatacccttgatccaaaatatggagaataatcaaagtttactttctagtttttcaaaggtattaatttatatctattttacaaatattaatttaatttagagtttgttaacgaatttattattatatattaaataagtatagataatgtgtattaaaataattggtggaataaaaagggcacactaatttaaaaacagtaaattttttttctacaaagaaataccttcatacatactcaaaaataacaaaacaagttacattttttcaacttttttatgaattttaattttttttacaaaaatatgaataattatttttaccttaatttttcaaaaaatataactatcttttttaaataaaattgtaaaataatgtgaaaaaagaagtatcatttcaatactttgtgtaaaaatactcaaaaaaaaaaaaaaaaaaagagaataatttataatataaatatttaagattgattctgattataaataaatacttaaatttaattttaggtaaattataatcttgaaagacattttgctgttaagtgaaataaattaccacgtgacaatctctaattggtctaagttattaaatttttattttttatctaaaagtttatttaaatataccaataaaataataacttaagtataacttaactattattactgtaattacgcgtaaaatattcaaaaataataaataaagttaagaaaaataatgaaattgtttgactatggtaatacaaaaaataaacaaataaaattaagcaaaaaaaaaaaacttttttaattttacactttaaaatagttttnnntttcttttttttttttatattttacgaaatttcacgtaaaaaacttctgtagcaactaacggaacaacttaaattgcaaccaaaatctgtatattaacccacatagaaataacagagcaacccaaaccgtaaatttgaaaaaaataaaataaaaaataatatatgaaataatttttcaaaaataaataaatattagtgtcaaaaattcaacttaagtatttactacacaaattactctaaaataaagataaatttaaaaaactatccataaaacactctaaaattattttcctaaatctatatctattaaaattgcccatatatgactacatt

SEQ ID NO: 123585 - DNA, 1559 bp, Cannabis sativa
  modified_base (66)..(76): a, c, t, g, unknown or other
ggataagttcaaaatacaaaaatttcattatttgttacaaattcgaatcaaagcatacaaacactnnnnnnnnnnnattatgaataatacattgttctatgaacactaaaaatatcaagaacacaaagaacacaatggtggaggaaaggttataaacactgaccaacaagagagaccttttagctcttcaccacctaaagcttccctccacaccacttgaaaatgagaagaagacaagtgacaaataaaaaaaaaagatgggcctacttatatatttatatagtacaataatgccatggaagaaggaaaatctaataacaaaaacacaataaatatctcacagccaacccatcatattgcttgtgctaatatatcaccaatgatgctaactaagttataaataaaagtcaaaatacaaaggtacatgatatacatgcttttggtgctatctacacaaaataaatagacaactcaaagctacatgaaatatatgaggtatatgtactattaaatcaaacaagcattatgttttcacaagaagacaaaattccataaactacatcactcccacgtgacatctatcccaaaacaccaacgaattctactagtatttggtaatggggtgatttgacacaatgcattaacttgtagtatactctaagtacccatctcatacatgcttccttccattcaaacataaagggacactcatcccaactaaacacatgtatatgattctcaaaaagtgacaagagaaaggtctatgaataggaaaaaaagtctatgatagcagattactatttgacacatatatatatatgtgaaatacctctttgactacaatacactacaaccaactttctataatcaatctattatattattcattacatcaagtttaaaacatgaagtgacaacacatacttatttcatttatataaactctactatgtgttgtactttttacttctcacactacacactaagaaaagacaataatattttatatatcttatgtcatgagaagtggtcatagatcacaaaagtttgtgtctataagttggtctatacaaaaaagatattttgtggaaactacccatggtcatccaataagtctacatacatataaatattatataatattttcatagtcaacctctcttgaagcagataaaccactgccagttaaatagttatagctattgctagtacatggacgtaaacacaataaacattaaatcatataatccatatgaaactatgtccatgtacacagctcaatcttcatttgtggcatatctatacataggaattgatactttacacaaagatgaatatatatatatttgtagaccaaaagccaactaagcttcacatacttaatccgttacaaaatgagacccacaccaacggtcaagcttcaataaagttaatcataagaatgcttgactatactccttatatatacttgtccactcatatacctagcttgcacttaacttgtatcaaccatacataaggcatcgaacaggagtttttaatgttttgctcattgaaaa

SEQ ID NO: 123586 - DNA, 1564 bp, Cannabis sativa
  modified_base (70)..(70): a, c, t, g, unknown or other
acctattaacatcgttaaatttaacagaatattcttttatttttaaggtatattctgttaaaccaagaantgtcattagataggcacttttaatatataaagatatattatatacttagggtcggccaccatggccaccatcgggccaggggttctacggagtcaccacgaccacggtggtcctggaaggccactaataaagcagccgaatgcggatcatgcaagtcaaaacctgtttgagtcttcttctcacgcaaaacaggtcaaagactctagacccgatcaggtccaatacgtgtgcacgaccagggcatcaattgaatggacgtctaacgtccttagcatgctttgcatgcaatgtgaggatcggatgtcgaaggtcctaaaattgatggtgattggaccatgaatggtccttgtgaatatagaacgaaatgggattgtgaagtccatggttccatcgtcttcgacgtcagatagggtagggaccgtgaggtccttttcatctcatgcttacttccattgtatggtgaaaccagttggacccaaagggtccaggtttcattcgattgttcacgacgacaatggagatgacaggtaatgaatttaaatttcgagactgacccgtcaatttccgtatacgatcaagatcgttggagagggcacgaaacgcaaggcggtggctggttgacttcgtgcatggtcagggtccatgggctcaagctcgcatgcgtggtgatgtacaaccaggattcaaagcgaatccgtgctctgtatcatgagcattacaacgtaaaacttttacgtaaaattattttcgtaaaataaattacaaaaatcctatgcccctttatggcgtgcataattttttagaaaatttaaagtaaaacctaaacccaatattaccatataattaacaattcatcatctcatagacattcacaatattataagtatccattcacatacatatcttatatatatatgcataaaactcacacaatatttaacatatatacataatagaatcagctctagtaatatttattggtattgtggtactaaattaggtactcagtgaaagtatttatttagactatcattgtaccacactccaagaatctttatatgtacatatattaaacctaaaataaaaaatgaaaggatttatttatctcttgtagcgaatcaggaaatccttgaatcttttcgtaagttgtatccatgagatgctgatgtcgaactcacacattgatcttttagatcaaccaccacacacatagattagtgtgggctaagaggatataactatatttgtgttcttgagtttacctcaacacataagtaagaacttttccttcactgagtgaataatgatgcgattaactttttttaggcttcttaaattatatgtgcatatagatttaagatataccaatatattaatttaaactaataaaataataataacaattttatctaataagatatttattatttcaaatgttaaaataataatattcaaaataaacatcctttcctctagctttgaccgacactaact

SEQ ID NO: 123587 - DNA, 827 bp, Cannabis sativa
aaaaaaaaaaaaaaattataaagggtaacacgttaggttagttattttttaagttttgtctttagtttttatttcgcttttttttttctttcgagaaagtatatatattattttatttgtagatggtcaatttgccatttagtataatttattttttggtatttattttgtggtggtttttagtgttacaagttaaaagctctagctcttctatattatttcagaaacaattttcttccatgtaactctcttatttttgtagctcataatttatcaaaacatgtcctttaattaaataacaagttattctggtttaaaaaaattcctacgcgaattataaatgtcaacgtaaaatctttagtaattttaatcattataatatatatatatatataaatagttatttctaaaattaaatagcaataaataaaaaaagttggtggtagtggtgacaaatgtcatttgtttattgaatttgaacgaagtagatctaaacaaacatactattgttattgtattattggtgctcaatacccattatattttatagatggtggcttatgattagttattgatgttctttaagtatgattttattaagttatatgagatctaatattttattatacgaataacaatataacaccaaagaaaatagaaaaatttacaaaaatattgaaatttgggttaatttttataaaaatactgtcacagagaattatttctaaaaatattgtgtttttataaaataacaatggaacacaaaacagaaccagtgacggacccagaatttttattttgtgggggcttatttatcattaaaaaat

SEQ ID NO: 123588 - DNA, 957 bp, Cannabis sativa
ggccagggatcatgttgatctctaggactggaaccaggataaattcttgtgttgttctttgattgatttctggttttgattcattgtgttgttaattggttcatgttcattattgctatccaaattgtgagtttattgcaggttttatgattgaatccttgatgttattgttgctggaattacaacatttactaatattaaagatccacatttttttaccgtatgttacgaatttttattatccttacccaattttcatattattttttttgataaattttcattccaacttggttattttttaaaatattttatttttctaattttatttaattttaaaataaattttaaaaataatttttaaataataatattaagtgtactaatataaatatgtcatgtgtataagagtgtacacataatcagtataatgacagtttaccagatgacaatttaaatttactatgagttcaataatttagagagttttaccgccaaaatttaaatttaaaaaattaaatacaagtaaaacgataattaaaaagatttaaccatgcaaaactctatatttattttaggataatcttataatatttcataacatttttatttgatatataattaaactcatcgtgattatgttcttcaaggcaattatgatctcataattatcatatgcgaaagtatattttctttataactaacaagtgatttacacttttagcactatcagttactttactttgttgtttaaaatacaccttactaaaacttttttttttaattcatacatttacataacatcctacatcaacttctttatatttttactttatatcatttaaataatatatttataattaaaatattgtatatattatatttattttattttatataaaatatgactatataacataattcttaatttaacgaaggtttttttttttttttttt

SEQ ID NO: 123589 - DNA, 1398 bp, Cannabis sativa
ttccgatggcacagagagggatagagaaggcggtgaagtcggcggagccgccatagcacgctgagctgccactaaggattcacgacccatcagcgaaaaaaagacaagctttggattctgacaaccaaataatggatttggctggttagggtttctgagtttgagagagaaatgaaaacaaaatcagtaatattaaggcagaaaaatgagtttgaagctttgattgatgttgaagaaactgcaggtaccttaaattgcaagaaacccttctgagaagagaaagaggagtgataaaacgaaaagggtgtctctctctctctctcctctctctaagttattaagcttatgtatgtatatctctctgtgttttggtttatcatttttttatcattattttattttttttttatattgaataattgataagaaaatgacagtttcattgtagtgacaaaaatcatttctacaccatctttagttgaaaataaaacatacctgcattatgtaattacacatatggaaaaactattattattgtgaataaataattttagtgtataataataactataataataataataaaaaaaattgggtgacgttgtggtgccacctggaaaagggtttgtgcttttaaccatttgtgttaagactgttcttagttactcctcctcagtatatgggtttacttgtgctctgttcatttcacctactttgtttttctgatataatgtggcataaactaagtaatacatttaatgcttttaaattttcctaaataataaaaagagtagtttataaaaaataaatatataaataaatgtagtaatgacatgacgagtttgcataaaatcaaaaaaatacaatattggtgtcgatttgttttttttttctccatttaatttaataagagcatatatacacttgaaagaaaagataaggtaacattgttagtggtcatatacatattattaatatttaaaattataataaattaatcttttttatataaattttaatggtaacatttatttaattacacaaactttatcagtggattatacaagttttttttttgttgataattttttatcacagctagcatttatccactaaatttaacttaaaatgaacaaatgttatacataataagtgataatgtgtatagataaagagtagtgataagtgtccttgccaaactcaataatcaatataattttaatgtccattcaaaaaatatgtgtatcgattttaattattatttttattgatctcacttactaaattaaaatatgcatatatatatacttttttttttttgttaattaggatttttacctttggatttttgtctaattttatttaattttattatttcaatgattatttatgtactaa

SEQ ID NO: 123590 - DNA, 1081 bp, Cannabis sativa
  modified_base (57)..(60): a, c, t, g, unknown or other
ttttaaaaacaaaattttaaaaatacaaattttacttttgttttttgtttttaaaannnnaaaacaaaagtgttaccaaacacccccataatacttcacacagagttctttttttttttggtaaatcactaagaattgttttaatcacccaaacaattacaaacaagaatatgtttttttttagaaaacaagaatatgttaattacaagctttacttcataaagagttataaaaaaaatatggagtaaatattattttggattctgtgttttgcaaaaattatcaattagacttttgcttttgttaaataataaaatggaccctgtattttccaaaatggtacaaatagaaccctgaactaatttttgtcaaaataaaatttaataataatctgatctaaaggtgttatgataaaactgtttacattttctgtatctgttagtgttaggaattgtattcaagttggttatattaaaaaaaaaaaaagtttgtcgaaaattaagtttagggtcatattttaactatttttgaatatataaggtctattttatcatttaacaaaataaaaatcaaatcggtaacttttataaaatacacgatcttatttaccaaaaaaaaaaaaatgtgtatatattttagtaccgattgtatgtgtatgtttattgataaacattgtttgtaagaaaaaaattaaaaaagacgtaaaagtctaacaaattactctcaataatttctctataccctatcatttaaaatacgtcaataaatcccaattttttctattatttttcctcaaaaaaaaataatattataccatacatcaacttttttaaaatacatcaccaattttttttttttttttaatttttttaatatattttatttattttgaatttataataataagtaattctattattcacctcacaacaatgggtgtacggtgtaccgattcaaacccttcctgttttctatattttagaattttttttttttttaatattaccagtatgtatagtagttatttaaggcatattatgttagacttttatttgggcttacattaaattttattggtttt

SEQ ID NO: 123591 - DNA, 1319 bp, Cannabis sativa
ttgacatgtagcaaatcatgcctcttgtacttttatctatattagacttttcataccaaaattaaacaaaagtgcttaaatctaacaatctgttcaatgagatttttaaaagccttaaaagttcaagaagcataatttagtatatgtgaaagttggggggacaaaaatcttaatggaaaaaataaataaattaaagactaataatgtaccccatgaaatttagaaattttctattacacgtgagattatttgattggttataggcatatgatcctagtttctttttgactaccataggatacccaaatcaggcatattccgaaacaagctggtgcatatctggaaactcgtaatattgaaaaggaaaaaaaaaaaaagagagaatcaaagaagaagagaaattcagaatctcatcccccaaatacagctttctttttctttctacactgatttattggagttttattgcttattaaacattgtaaacagtcacgacagcaacgaggttgaaccgaaaaacaaggatacaattacaaggtaactttgttttagtaactattactcctcaaagcccaaaatattttctcaagaaagagaccttcaacccaactgattccaaatcttcttctcttggtttccattggtaattgcttgctctcaaagttttctcttgtctctcacccttttcttcaacatagagaaccaacttgtcactagagctcttctatcccaaacgtcatctttttggatatattattttcaagtcaagattttcaaccgaaaaaccagctgaaaagagtttctttttcgaaatttggacgatatcagagttgcagatataaaatttgacgaccctttgacctgaattgcagacccagatagattatttctttgaaaaagacatatctttgatgacccaattcaagggttagcaaggggtggagtttccaattacagaaatttaaagcttggcgaaataagatgtcttgcccatcaaacagcatcgttttcaatggtagccagtgcagctgcccggtggggaatctactgaaccggacggccaaccgctgtgaactcttttcagctacttccaccatcaccaccgaccatggagttgactactacgccatgacctttccggagaccatcttcgagtttgactccataaagaagttcacgcagtctcaggcgttgttcttggaagccaccctcttcttgcttctgtcctggctcgcgttctgcctttttctcaggtttatgaagccgggcaatgatggaaatagcatttggtttaagctcagatggtgggttagcagatt

SEQ ID NO: 123592 - DNA, 1249 bp, Cannabis sativa
  modified_base (1221)..(1224): a, c, t, g, unknown or other
cctctacttttaaaggttaaacctcatagcgatacttgtccacagagtacaaatggcccctaattgtccagctgcagcacgcacgagcacaattatttccaaaggacccaatagttagctctcttttgcatgtaatttaccccattattaggctttgagaaaaaccctaggcgggtcatgggcatgtccataccaactacttaccctatacatacccttctatttccatacgaaggaggattagaaccttatatagctaacactctactaatattactctccgtgctcttcttcttcaagagaaacaaagggtgcagagctagggtttcttacaaaaatactgcaaacacatcaaatacgcccttagaggctaatatactggctcatggacagaaattaattaatacccaagccacgtaaaaaatttccatctctttactttctacattttattatttttttagttcttaaatatttggtttttgaaaatctcagtaaccatgaacatatatattttctttgattttgtaatatttttatttgtattgtaattgatagtttttatatggtgttatgccgttattcattaaatttagtatgcaagtatatgcaatcgaatcaagtaatataatgatgaagtagagtattgttcccacaatgattgattatcaattaccaattaattaattatttgtttctattttatttaaaaaaaaaaaattgttggagaaaagtaaataaaacaaaacaataattaaaatttagaaaaaataacaataataaagacaagaattattatgatccacaactatcctttattttacttattaatgcagttaccccaatgtatcttcttcctatttaattgataagttgaattaagtagtttataatctgattaagacttacaaagccaatctatgtaaaaactccttttattctatggtaaagtttaatcacaaagaaacattaagcaaagtaactcataaaatcatacaaataatctagatactttcatcctaaatcaatttgcatccataattattagagcatattcaaatttcacttttcagaattttgattcgaattcatagataacaattatagatggtcagtaaataattgtaaaattaaaacaaattgtatggaattgaattaaaggaagaagacgaaattgaacaattacattaatccataaaataaattcaagtggttcacatnnnnatccttaaaagaaaattagctacta

SEQ ID NO: 123593 - DNA, 1189 bp, Cannabis sativa
  modified_base (1144)..(1145): a, c, t, g, unknown or other
ctaataaaattatgtgttcatttttcagataatattatgttgtgttgttgtttaagaaatgtttacatcactttttagcaatatttgtgttacctttaaacttatttaagagactaatatgttacaacaatacaaaataacttgcataaattattagcgagatttgtgaaatatctaagttatccattgttatttcaaaaataaatttaaattgttaacttaaaaataataacataatagtaactaatgagtatatataattgatattataagtaatttaatagtttctttgatttaaaagataaaaaataataaaatatgtttcttatatattaaaatatttacatttaaaaataaattatgttggtttttttttttaagtttaatcgagcaataatgtgctcaagaatgattttttaagttaaaaagaagagagaaaaatataaaaaagagagatatagaagctctgaaaggaaaaaaaaaataaaaaaataaagcagttacagtatatggttttttttgcttcactatatagtatacatatatattggccgaacgagtaattattatttttttttgagagaaacctataaaacaattataattggaacaaaaacaaaagcatcactaaaatttattacacaggttacatagaaaaagtcaaaatggtattatattacattagatgatcaaccgttagttttgaaataaagataaaaaaagggtgactaatgtaaatttccctaaaaataaatgatatttttaaaaattattaaaaaaatatgtattttttgaaagataattttttatttgggtccccaaaatgagtgggccctaggcgcgggcctaacctgcctatgcctagggcctgctctgaccatacctcaaacttaaactactattctatattttttctttctttcattcttcatataccatcccatataaaaataatatattataatatattttgtctttcattcttcatatactatcccacataaaaataatataccacattattaaagtaatatacttaaatatgaatatattgtaatataatgtcttttgtttttcatataccaccctacatagaaacaaggaaaacttacaaaaatactagaatttgggttaacttttacannaatactgtcacacggaaatcttttaaaaaatactgtgtttttat

SEQ ID NO: 123594 - DNA, 1449 bp, Cannabis sativa
agaatttggattgagcaacaaagagatttccttgagaagtattgggaaaccttctatatatttataattgactcaaatggaagtcttttgggagagatttcactaaggtaaagcaaaagtttgtcattcttgaattcctactaattatgcattatcttgtaaattttctcattatattattaagaaatatggaggattacaattaaatacataacatacaaataaaataatttatcaagattatatgggaagagaaagaaaagattacatgcaataatgatacataacaatatatgaatataaacaatagaaaaaagatctctcaaaggcttaaataaggttaagaatctttatcttaagagttattttctccctcacataaatatttagaaaaattctaaaaatacttttaaagatttattaagccttatgtgctcattgtagagtctaagaatgatcatatcttcacaagtatctaactacaacaaaagcgatatcaatcaagagtatcacaagtaaacaatatgatttctatttatagagttttcactctcatataaacaggaatgaccattataaaattttttgatgttaccaattataaattaagcatttatggtattaatagagtattttggaggagttttgagctattagaaaaactcacacacattgaaaaacggatgtaattgtatgctgaaaaacgcatactagttttatttttttagttttggtcaattcttcttcaaagtgtttcaaaccaatcccacttgattttgaaccatttttaaacatatttataattttacgacctaaaatttttatttataaaaattaaattataaagttttaaaattataaaaatataattttttctgtaaaaagtaagaaaactaaaaaacaataagaagtcaatctgatacctataaatcaactattgaacaactaaaaataactttatgacaactatcatacaattataaataaactataaaacaactaaaaaaatagtttattatttttactaaaaaagtatttttataaataaaaaagttcgaagcgtaaaataaaaaaatttatgtattgatgtgtttttctaaatttttagtctactatgtaaaattttcttaatttttcgtatgaaaagtactatatatttttattttggtccttataatatatatcttttcaattttgtcatcacatgttttttatttttgtccaaatagatttatatttccatttatatcttcatatatttttatatttattaccataaatctttattttacattattatatttatcatcacatatttactttttttgccctataaagtttatttttcatgttcactttgttattttcaaaaatatgggaaaaattattaaggttatgataaatatggcataaaaagtaaataccactaaatatggcattatctaacca

SEQ ID NO: 123595 - DNA, 3591 bp, Cannabis sativa
tgctaccccctcagtaatggaataaaaagacttgttcagccatggaagtggtccggtcggcaagagtggttcttgaccaatttattaatgctcaatcccaaaagacgggtgcattgttaatggatgatgttaacgatgttagtgagcattggaagaaactagcgttacatacggttaagattaatgttgatggtgctattttccaagatcagaacaagtttggatttgggtgtgtggcccgtgacacaaatggagttcttcttgaagcaatctctgcatctcggtctagggcggttaggctagaaattgctgagataaatatgatcaaggaggctttgagttggatagagaaaaagcaatggtctaatgtgctaatcgaaactgatgctttggttgtggttcaagctataaataactcattttcaatgccttctcagtttggtttgcttgttggtgattgtaggactttaatctcgtctttgaataatgtgtctttaaagtttgttaacgatttgcaaataagattgcttattgtcttgctagagggtcttattttttgtcagattgtatttttagtgagtatatgatgctcctgctgctttacgttctatggctgaaagtgtttgaataaaatttcacactttaattcaaaaaaaaaagagtactatataacataaaattgtaaaattttctatattttgctcgtgctatattttgtttaaaagttggtacactttttacaatactattgaaacttttctttttaaatgtgataaaatataacaatacacaccccttttacttatggccctccccattattggacatggtctaattaagtcataaaactattatattagatgaatcattacacaaaattattatatttgatatttgattcaaactagttcgtgtaccaaaaaatacctttcttaggagatttattatctggctcaacatagacacactcctttacttctctccacaaagccttaattatcggagtctcatcaacacaatagtattctctcagtattggtttcacagctttagtagcctccattgcattgtaatgtggtattgtagagaataaatggtgcaccacatgcgtgtcagcaatgttatggaaaaccctattgaaaaccccatagtctcgatcgaccgttgacaaagctccccttaaccaatcccactcagtcgagtcatagtgcggcaatgcaggatgagtgtgatgcaagtaagtgacaataataagaaggccatttactactagtaatggcatcccatacacgaatacaacccaactcaatcctttagttaaccaagttggtataaaacaagtgtggtgatgaaaacaccaatatctgacaacaaaacttgaagcctttcgcttttggagtatattggcgagtatggatcgtaatgacaagcgaaacggtcatatggtctacctgataaattaaaagctaagtataggggccaaccaatggttaataatgcaacaagccttatgaccctccctggtggattgttcaagtatttagagtaccatgacatttgagattttggcattgggacataagtttcatcatagtctatggaagcgatattggaatggtggcgacggtgactgtacttccacgagaagtatgggacgagaagagcagagtggaagatgaagccaacaatgtcatcaacccattggtagtcactgaaagcatggtgaccacactcatgagctataacccaaatagcaaaacaaacgcagccttggaagatccagtaaagtggccaagctaagtagagggcgagtgggtgattagggagaaggtggaagtaagaggtggctacatagtagaatagcgatgctagaaaaaggtcgtgaaagagataagagaaggagcgaagaagagagcgtttgaagcaatgaggggggatagctttcttgatttggcttagggtgaatggtggtttggtgtgtggtgctcgcttaaccatgttgtttttgttgggcacatgtatttggtcgccaagtcccatttttttgtccttaagaagaagaaaaagaaaagaaaacaattgaagtcaagaaaagtaaatttctatattaaaaactttatttaagaatatatatgggataattacataatgcatcattttttataaaaaaaaaattacatttctacatttaaagaatttgtttttttacatttttacgggtttccatagaaacaacacaaaatcaacaagaaaactacataaaagtaacatgaaaataatatctaaataacatcaaaataactacaaaaaataagatacaaataataaaaaatcaacaataaattaacaatagtacaatataaaaagatcgtattttctataaataaaataaaaaaatcataaaaatatttagaatttcgtgaaactgtatttttgtaattttttttgagtgtattttgttattttgttaaaacaatgttgtacatggactatagttgcttactttgtacaaattctaaattaagtaaatcaataatatgtaaaataattttgtatatagaatgatcaaataataatattataattatcatatgaagttgatacttttggatgttagaaatgtttttgtaccaatacctctttattagaatatacaattaattaatttggtgtcaaaacagatttcataatgcaaaaaaaaaaaaaaaaaaaaaaatgaaaacctcactaaattcttaataatatatataaagaaaaaaaatttaccttaatttgaagagctattaaagatgaagaggaacaagaatggaagaagtgtgctctctatgatatattatgtatacattgtttttgtttgttgtgacaaagggagtgaattaagtagtggtatttaaagatggggagatgcatggagatggagatggtgtacataaaagagaaagctagctatatacttagggcagtttgtggagaaaatcaattgtagctgtgctgctgtagggaaaaacaactatagctgtagaaaaaagttgagttaaatgtttggtaaattataaattttaaagtgatgcgaattgttaagattttattacactaatgacaatattttaatctaatttattataatcacaaatatatatataaaatatattatattaaattattattttttatatattttttaattattttttttcacagtataaatttatatgcatttgataaaaataattttaaatatttttaaattatatgtttatcacttgttaaagaaaaaattctagtttataagaaacttattaggttgatattgtttcttaagaataaaactacaaatatataatatttttgaacaaaataaaaagttagaaatttaaatattatttattttaaatattttttggtaatatataataaataattaaataaatttttagttaaaaaaaaattattatagtcttttaattaaaatatttatttttttaaaagttggattgtaccagctttatcttttaactgaaatttttattagaatatttctaattaaggaaataaaataatattattgattctgataaatgaatattttat

SEQ ID NO: 123596 - DNA, 1713 bp, Cannabis sativa
tttgtcgagttatgtcggtttgtattttttatcggttttgtcggttcggtttgggcgggttattcgggttggacagtttacgaaaatttttgtacagcgctagtaaatgcaaccactgtccaagatccactcatcataatctttctgttgcaggctagtgcagacatctccatatgtctgacttgcacaacagtcattcatcacagcgaaaagatcaccatctgagctatatgtgtcatttactactgcattcgagtcattaaatttttcttcttcatctttgtgcttcttcttcttatttttgatctcccaatagttcttgattagatgtcccacttcaccacaatgatgacattttctagtttctttaggcttagattttgatcttgaatgtcctctgaatcttgagttgctacttcttggatttcttcctcgagaaaatagaccttcatcttgtcttgattcttgtctggtagccttttgccaattcaattctacatctcttgacctgagggtactcataacatcttctagagttagagtctctcgactgtacatgattacaatcctcatttctttgaattgatcaggaagaccatttaacaaaatcacagcttgatcttcttccttgatagactcacccatattagtaagagataaaacaattttatttaattcatcaagattttgttttaaagaattaactgcattcattttaaagccatagaacttccctttcaagaaaatcttggttgcagtagacttggccatgtaaagacgatttagcttcatccaggttccaagagctattttctctccaatgacttgtctcagtacattgtcagccaagttcatgatgattgctgatcttacttactttattatagtttcagcatcttccttcttggaaccatcagtctcccttttctggtttctcagttttctcacccttctctaattgatcttcaagagctgaatccaatttttggtagatcaatattgccatcattttctctttccacaaaataaagtctccagtaccatcgaacatctcaagatcgaatctagttgatgatgaagccattgttgtctgtttcttgatttcttgaacctttgatgttcttcaattgtcaaattagaggcgtattcttcttcctgtaaaaccaaagctctgataccactgttataaattaacaacacacaattcgacaaaacattaaaccaataatcaacaaaaaattaaaaacaaaaagcttgaaaaattgaagaacacagtttttatccaggttcggccaaagaaacaaatgcctacttcctgctacccccttaggtattccttgtattcaattcataatcatggttacaaaaacacaataatgagcattacaagagaatttcaactctcttactcgagtactccaagaacacaccttggacagtactacctcactttctttcactctgtttcttctctccccaatcaaactaatctttcagttttttcttgtaacaaaatgagagcctacatgtctttatatgtccaggcttcatgaaaggaaaaacaaaaattgtaacaacttaactacccaagctcaagagtaagtgaacataactgaaaatattatctgtccaagatagttggaaccggtttttaactaactgtttctttatttagattaccaaaaaaactatatatataattgagctataaaa

SEQ ID NO: 123597 - DNA, 834 bp, Cannabis sativa
  modified_base (783)..(799): a, c, t, g, unknown or other
aaccctctggtaactgaggaggagaatgctaggttgaaaaaagttcccacgaatgaagaaatttggagtgtggtggcggcaatgcatcctctcaaagccccgggacccgatgggatgccgggatatattttttcgaaggtattgggatatagtgggtatcgaggtaatcagcatggtgcaaaaatttttcacttcgggaaacatggaaggccagctgaatcacacattcatttgcctaatcccaaaagaagagaatgcttgctcggtggacaaatccagacctattagcttgtgtaattttgcgtacaagattctttcgaaaattcttgctaccaggctaagagaggtcattaacaagttaatttgtccgttccaattggcttttgtgctggggagatggatagcggaatcatccattctgacttaggagctagttaataccataaaaaggaagaaaggcaaaggaggtcttatggccttaaagttagacatgctaaaggcctacgatagaattgagtggaattttctgagagaagttctcaaaggtaatgggtttgataaccaggtgataaagctaatgatggagtgtgtttcttctgtttctttctcggtccttattaatggtgtgccccaaaaaaagttcttgcgaggagaggtcttaggcagggcgacccattatcgcctttcttgttcctgctttgtcatgatatcctctataagttgataatgaagaagcaatctgctggccgattacatgagatttctgttgggttttatgccctnnnnnnnnnnnnnnnnnatataatcagatttatttattaataaagatcagaa

SEQ ID NO: 123598 - DNA, 1689 bp, Cannabis sativa
aatataaaaattgaaattttaaaacatgcggtgcggtgaggtttgaaccgcggtttaataattcaaagccgaaaaacgcaccgcaccctgcggcttgggaagaatttcaaaccgcattttttttgcggtatggtgcggtgcgggcggtttgagcggtttaatgtacacccctagtcgtgccaataggttcgtgcctaaaacaagcaacaggcacaacaaatatcgacatgccaattgactgatctaatggcacaactaatgcggtgccaagttaattagaaacgtaaactttattataaatacatgtaggcactacaaagtcgtgccaattagattttatgtaaagaaaaaaaaaaaattcaaaacaaatatatatataaatttaaatataaattatgaaattaataaaattaattaataaaagtattttctacttcataaattaaaatccacacttcaataaaagtattaaaataacaataactaaaataaacattcaaataaacaatacttataacgtcatattcataccattacaaattataatactataatctcaattgtgtagactcctcatagtcattatcatcattctctctagactgttgatctggaatattcggtatttggggatagtaaggctgctgtgatacttctggtatttgcggatagtatggttgctgtatgtgagacatttgctgcatcggtgacaatggttgcatctgagacgttggtgccatatgctgcatcaaaggcatcaaaagcgtatgtggtgtttgatgcatagaaggcatttgctgcaaatgtgacatatgatgcatatgtgtcatctgctgcatctactgcatctactgcacatgttgtgtgtgttgcatggaagatggttgcatatgtggtgtctacatggaaggttgttggatctatggtgtttgctgcatcgatgacatatgttgcatggaagcctgctgcatctgtggagtctgctgcatcgatgccatctgttgcatggaaggctgctgcatttatgatgtttgctgcatcgatggcctttgctgcatttgtagtggatgctgctacatttgtgatgtatgctgcatcgatggaatctgctgcatttgtagtggatattgttgcatctgttgtgtttgcggtgtctgctgcatgttcatcacttgcatttgcgacattggtgatgacatccaaggaaaaagggacagttgcgaaggtgatgacaaaggatacataaaaggaggcgactgctaggcttggtgatattgtgaagtccaaggctgtgaagatgagcagaccctcctccagaaatttgaggcattgccattccaaacagctcctcatcagtaggtagacggacatcaggtcccaacctttgagacatccataacattagtctggtcaatttttcaaatttttgctccactcttggatcaacaaacgtatcttgagtcggagtaggttttgtattccgcgacgaagattgctcctttaattttttccccactccacgattatgaccacacctttcaccaagtacctactaagtacactcattttaatgtcatcagcaggtccagcgttaggagtattggcttgtttttcgtacgctgaaacgagctcgccctattttaagaatataagttagaaaacattaaacatacataaaatagtatttta

SEQ ID NO: 123599 - DNA, 798 bp, Cannabis sativa
taaccacataaatatacattaattcaaaaagtaaagatttggctgttacataattaataatgtaatttgtgtgtatgttttttcttgaataaaatatagaaacctcaaaaaagagaaaaatagaaaattaaaaaaaaaaatagttccctcaaaaaaaaaataataataatagaatgcaacataaatttgatgaatcccataaaaatccgtaatcccgctaccaaactcttgctatctttaaagagagagtcaatttggctgttacaaaaaaaaatcttaaaaatattaaccctcttacaaaatataaaatatcactcaagaatttgagggagtgcaatttaagaaaaaaccgacaataaaaattgattgattgatattgatattttcatttaccttattaagagattctttaatatagtgcaataaaatgcaattaataagaattagtctcactaaacagacaaaaaaaaaagccctattttaactcaattgatatattgttggtaatattttgagagaaaatgaaggatctggaatctatatttatgctgtatatatttatttaatttaagaaattttttaaagcatgtataagtaacgtcataaagcaataaaacaccaaaatttttccttcaaagtaggaccagatcagatcaatggctccctttggaaagttcaaacaattataaaaagaaaaataaaataataaagccttattttgatagtaccaaagtaaatttagagggagaatgagataaaaaaaacttgtatttcgagaaaaggcaaaaaaaaaaaaaa

SEQ ID NO: 123600 - DNA, 1452 bp, Cannabis sativa
ttttcgggttatttcggtttgtaatttttatcggttttttcggttcggtttgggcgggttattcggtttaggcggtttacaaatttttttgtacagccctaggtagcactacttcatacttttagaagtataaccaactataataccacatatacttagtactctgcgtactagtgttggtagaattggttcatacttttcaaatttcccaacacatatattcacgatatcaagatgcaatcatatatacaccaactatcgttctaactgatatgtcatacatttgacaactataaacatgtacatatgtatttatgttatactagtcttaccttaattttgatttcaagtgttctaattaacctgagtggaaatacatacgtcacaattccaaaaaaaaaaatcaataagtgttgccttaatacttttggtgacttaaattcaaaactaaaagttttcatatcgatagacagcatagaaataccctacatatcgagaaaacactcaatcgacgttccggtataagactcaaaacgaacggtccattttaaaaacagaccctcccattccagcataaattggacggtttgaaactccactgttcaattttagaacttcgataactcattcaattctaagccaaacctcaccaaattttacagggtacctaaaaatatcatactgaacattttttatgaaggaacctcaccccgattctcaatagaaatcaaattaaacaaccattaagttttacaattatgcattaaagcataatactaaaaattaattcaaatatatcacaaattatttttttttctctaaatataatacaatttttacacatcccattaaaatatgctcttacaaacttatatataatattaataaaaaattaaaattataatagaatttaataaatatatgtactaataacgaaaatattaaaacacattatacaaaaagaaccacaaaaagtaacatattgttattagtgcatagtaatattaatttccacaaattttaatttaatatgatttaaaaaaataataactaaatattgtgaatcaatatagtattaagcaccttaaagtaccacgtaacaaaaataatacaaaaatcatttataaaaaaattagtacaaaaataattcataaaaaaaacagaaaagacaaaaaaaaaattaataactaattattaaataccacattagtaacaccttataatttttcattatagtttttctttttaaatatttatattattgctgtttatcctaaaattttataaattcttatacaattctatttccttttttttttttgtgcttaaatacaattctatttattcattaattacataaagtaccattttttttgtaaaataattatttgtacgttcaaaaaataattttttttacatttttacggttttccaaaaaataacacgaaaaca

SEQ ID NO: 123601 - DNA, 1220 bp, Cannabis sativa
  modified_base (347)..(352): a, c, t, g, unknown or other
tcgatttcgataaaaattgagaaagttatgaagttttgaaaattcgggatgcacatgctcaatcgcacgtacaggagcactcagacaaggtgctcgtgcgcgcgtggataagggacaaactctgtctgaagccgtggctcgcctaggattcagacatgatgcaccctgtgcatctgcatgccaaaccctgcatctcgccgagaaatcccgctcatgcaccctaccagcacttgttttgtgggcagcaggtgcatcttgcaccaaaatccaatttttgtgggatttttccacaaattttgaatttttccaattttcaaaccattatttcaaaataaaatattattttnnnnnnatttaaacttaaatatcaatttttaaattaataatatttaattttaatagattattattaattgcggtagctggtgagatggattggaaaagccaagttgtccaagtttaggaaaaaagtattttcagccacactagcatgtttgatttataacatttgcaggtcaagaaatgatcacatatgtaacatgaagatggttagattacaagagattatgtagaaaattaaggagactctcaagacaagagtgacagtgctttggccgaaaaagatcagtagggaagacaatgattggttttcgaatttgtaagatatagaggaaagtgattgtatagtgagatgtatgtaattgtctacatattattacacatatttctataggtcctatgttatgaggatgctatttgtttgtacaaaacaatttagtgagaaatgcaaacacttgattcataaaaaaaaaatgatttatggtgagattttaaaaatttgttaatttgttggtatttaattattatttaattataaaattagatattttaatattgaatatattttaaattaaaagatagccttatcttttaatttgaaatattatattaaaattattctataagatgatttaaataattaataaatttaaaattaaccttgatatttttatagatattctaaccataatatttttacttatcagacgtttataaatagtatttttgttaaatatttaattgtttataaattataagttagaaaaatgagattttacatcattttacttatcaaacgtttataaatagtattttaaatatttaataacctagatatttttttagaaatttgaaaaaattaatttgagatattttgacat

SEQ ID NO: 123602 - DNA, 650 bp, Cannabis sativa
aagaaataatgcttaaaaaggtaattaattaatttatacagcctctcttatatatttagctaaataatatatatatatatatacaatgtataatgggattaattaattatatacatattgcatagctgtaaattattatttgacaaagcacacatagctgtaaattaatattaggtcttaatataattttgactatactagatagaattgtatttaatgtattaaaaaatgaggatgtaccaataatattaaattaaatggaataattttaaatataatatggaaattgatattcaactgaaaaataatttttacaaactttataaaagggaattagttaagctagtcaagtgaggttagataggttcagagaatctagtaatataagtgagcttattcttatatgcaatttaattttatttggctaaatttaatttttaaatttgaatttcagattgcatttttgacttctctgtattttgatctctttgtcacaataaaaataaaaaaggtatgaaaatttaatgccattgatcatatacattttcaattataatatataatattttcttttgatatatatatttatagggatatgattttgtcctgttattgtactttcacggattgtaaaccgttatgtacggcag

SEQ ID NO: 123603 - DNA, 1547 bp, Cannabis sativa
tgtccacttagtgaaatagtcgacatactaccgcatattgcactcctcccttgcccttaggtaattgaccgatcaagttaattccctatatggcaaaaggccatggactctgcatttgtgttacctcgttgggtagagcccttggtatttttgaaaacttttgacgtttttcacaccttcatacatactccatgcaatcttctatcatggttggccagaagaatccttatcgtagtatcttcttagataagcttttgccctagcatgattatcgtagaaaccttcatggacttcttccattagtctttaggcttggtcttgatgtacacatcgtagtaagggcattgagaacccttgcctatacatgaaaccatcaatgcgagcggcctttcttctcatcttctttgctttgtttttgttggtaggcagtgtaccttgttctaagtaagctgctatgggagtcatccgtgattgagtcgtatcaagtagttgtacttattctttggtgttcatgcttggttcagataggtattatattggcacgaggttagccttatctaccctttcacttgttgccaatcttgccaaggcatcagcggtagcgttctcttctcttggtattttttgaatggtgtacccctctatttgggccaccaaatcttatatcttgctgaggtaagccatcatctctttctcctttggctgtgtactaacatggtttacaaccagttgggaatcgatgtaaatgtctaagtgtttggccttcacttcttttgctagtctcggaccagtgattaatgctgcgtattccgcttcattgtttgaaatgaggaagccgaagtgaatggccgtatggatttgttgtccttcagaggttattaggtgatcctcactcccgatgactaatctgtggaagagccatcaacttgtagtttccaagtttcacttgcttgatcttgcttttcattcttctctgcttggaaacatgtggttcaggtgaaccacccgtatcaggtctttgggtggctctggttgttgttggttggtcatcttcttatacccttgtctcaatttcaacatcttgaaccccggtatattcagctacaaagttggtcagggcctaccctttgatagccgaccttggctgataggttatgtcatactgccccaactctattgcccatttaaggaggcgtcccaatgcatcgagtttttgtagaacttgccgtaatgattggtcagtgagtaccgtgatggggtgtgcttgaaagtagggtcaaagcttgcgagatgctaagagtaagtagtaggtcaatttttctatgagggggtatctacactctgcctcgatcaacatttttcttacatagtagactaggtgttgtaccttaactttctcccttactaagaccgcgctgaccgcatgttctgttacagccaattatatgcttaacccttcactgtttagggtttttgaaaggagcgaaggctgggatcattgtggctttaaagcttggaaggcattctcgcattcttcagtccattca

SEQ ID NO: 123604 - DNA, 1272 bp, Cannabis sativa
  modified_base (40)..(53): a, c, t, g, unknown or other
catgcaacataaaatgtgaattctgatctttattaattannnnnnnnnnnnnnattgaaatgtgttttatttaggacataaaacccaacacattgagactattgagtgaagaatgagttattgttatattttttgttagatattaaaattatagaaaatagtacatgaatatttttttttataaacatatagtatgaagtttttaaattataggaataaaaataatgaattaatatttataaatagaacaaaaaaaaattacaaaaatgatagaattaagaagaaaatagattaaaatatttaaaacaattttagattaatcaccctcatttttattaatatttataaataaaaataataatgaataaaagtagtatgacgtttttaaattataggaataaaaataatgaattaatatttataaatagaacaaaaaaaaaattataaaaatgagagaattaagatgaaaaatagattgaaatatttaaaacaattttagattaatcacccttatttttgttaatttaattcctgatcttataaatgcttgtagtcacattatattaatttgcataaaatagaatacctaactaataatttttgccaatttagctaaaataatatttttactcctaaataatttgtacgttatttttttttaaaaaaaaaaaaaactaattaaacatgaatagtaaatataattgatttttttttattgaattagaaattttgggtaagttaagtaaatggaaatgaatattaaaataactatacatacaatatatatgattatttaattttattataccttaattaatttatataaaaatataatttctgtgattttaaatagatcaaagttataaatataatatccaaaatatatatacacaccttaattataaatgattaattaaataataaaaattaattttggaaaaaaatatcttgtcgtaaaattttcattaaactaaataaatattgttatttgattataaaaataaaagtaataaatattaataacataaaactaaataaaaatattaattggcaacaaatcaaatttaatattaaaaaaaacttgactgaaatggtagtcgtatgtcttctttgtattttttctaattcaacaaccacgaaaggccatcacattcaaatttataaaaagtaatctataactatataaaaatgagaagggaaatttgaatttctatacttacataacctaaaaatttgtcccctaaatgcaaagttattaaaattggtaatata

SEQ ID NO: 123605 - DNA, 1574 bp, Cannabis sativa
  modified_base (40)..(43): a, c, t, g, unknown or other
gttctcagtgcagatgaagcttgtaaatcgttgtgtgatnnnntgcttgattattgattcatgtctataattcatatcttgaaatcaatcaatctaaagataaccaacttagtaatttggatcattaaaatcaacaagctgtactttcaaggagaatacactatcacttgcagaagaaattaatcacttagcagacatggtaaaatctctatgttataatttaagggtgtagaatttgaaatattttaaggacaataactcaattaatgaaagttatgagagttgtttgaatgatgtagaagcaccattagttgtatacgcggaagacattgagcctataactaaagagcaaaacccctttgaaatggttttaattgaaaatttgagtacattggatgcttactcgacaagtgataattttgatttggtgattgaagcaacacccatccttagtgaaaaagttattgaagatcaaatcatagtcaaagttgttgatagtcatgagaaaagtaagaaaatgtgtaattggaggttgaatcacttgttgttgttaatttgagttggtcaatgctattatattatgcaccaccaatggattcttattttccattaatgccacctgtaccatattacatcgtctatgagctaccaaatatttctccccaagcatatcatccaaagtctagtgttgttggtgatgcttttggttcaaactcatcgcatgccaagcttgaaggtattttcaaaaataaatttcaagttttcctgcatgacacttattatgggtgtcaaccgcttgttgatgcggcatggtctaaggtaagtcctctcttctcattgggttatttgtcacattgggacaatgtgaattttagtttggggagagtggcttattttattttattttacttgctggtttcctttgttttgttttgtgtctttgttctttgtttagtgtgttattaattaattcgatgatatagttgttcgattatgctgttgttgttatttgtgggatggattaaaaatgtgaactgtgtgcttgattctttgactcttaagtttaatttagatgcttgttgaaaattttgtattgatgtaaattgtcaatagttggattgtatcataattattctacatttgttggcaaaataattacttgaatgggatagaatttgcttgatttattctcttgaggtaaaattctttgcaatgtttgattggaatatggtttagggaatttttttttttgggtcatcatttaagcctttcaagcctacctttatgttattatccttagtttaccaaggttgagcctaagcctgttttaaaattttgccactagattaaacatataatgtatccattcactacttttatttcaggtgcaccttaaattatgccataagcttataaataagtttgggggagtgaaatgttgagagtgaaattaatgtttgaaaactaggtgaaatttatcgtgactaaatgtgtttttactcagaatacttgttgtgactaaaactaaattactgacaagttgtagctacatactatgttttagtcacaaataa

SEQ ID NO: 123606 - DNA, 1551 bp, Cannabis sativa
gaattttaaaaacagcaaaatgttgttttctgttttaaaaaccaattcccttttggtcaatattgtttttaaaaaatactaaccaaacatgagttgtgttttaaaaacattaaaaactattttattttttattctcattttttttaaaaaaaaaaaaaaaaataaaaaattgaaaacaataccaaacatgctcttagtttactcaaattcaagttttgagaccctaagaacaaattctaacacgtccagcaagttcaatattaacttgaactattaggtggaacatatctcattgattactctactaattttaataatttaacctaagtatttaacaaattccaacacctcctatttgttttgctatttagtagtcttttagttaattattttcatgatcgtatatattgtagttatttaagacatctctgtaaattttttaaaaatctagaatagtgtagtgctaaaaataatgttctaaataattaccatgcctataaaaaaaaatagccatcgtgagttcaacaaaatatttaaactatatttacggcacgacaaattattaaatataaattacaaatatacaattaatcttaaatacttacatcgaataaaattacgaaaaagatttggactaaataaattttcttaaatgtcaaaacaaataacaagtttactgaaatacccctagatatggtacaaatttttcttattatttatgaaattcaatacttagtagactaataaatattataaattagtcctagcctaaattacaatgccctatagcaatataaaatattcaaaggggcacaaaacaatattttacatgatttattggtgtaatatttattaatataattttgctaactatcggtgtacgtatatctattattggttcacacattttaatttaaaatgaaacatgtgaaaaaagtttaatatttaattgttgcagtaatcgaattatatagtactgtctaccctagcattattcatggttagactgatgacatgcaaaagaaaccaaataaataataaataataaactttgtcaaaaagaaagagaatatatattttcatttttttttttctttgagttttattttaaccatagtggaggagtaaagtgtgaaagacatatgggtggataattacttaccctggcaagttgatgcattggtttgtactagggtcaccacagaaacccctggtaggtgcgaccccaccatttcactttcactcacgtgctagttatgtccaatagtataggaccccaccttccatggcccataactctaatactaccccaccccaccccaccccaccctggctccactctaatttaccttcatcaatacttaaccctgcctttatatctatagctatgtcccacaccctatcaccagcacggacacaggtgtattaacgtgggctataattttactaacaaaaatattatcttttaaaaaattaaatataattttttaaatttgataattatagatcaaaatggtaaaaaaatcacctataaaattaaataaatctagt

SEQ ID NO: 123607 - DNA, 1075 bp, Cannabis sativa
aaaaaaatttaaaattgaagcataagctgaattgaagcattgtttacaaccataaaactcatgtttaaatgcttcccataaggcttgtataggaaattagaaggaaacctatactgaaggcctcttgccatgtcctccgaatcctgtcttgtaaaaccttcaactttacaatgatcaaaatactctcagaaccctccctcatatcttttatttccaaatggggaaaaccatgtacctccatgtttaagcttaattgtgaattcaccctcttcattccctgggagaataagaacaagctatagtgaaattaaaatacaaagccgcaactaaaactagaagttaagttgaacaagataggcaaaaccccccaaacaaataacccattcacaaaaagacaaaaaaacaaaacccaccccacatgtgcaaactaactcattttggtcaactttaaaccatgtgaaatatcaaaagcatatacccttgacaatgagaaatgattcttcttttcctcagaagtttagttttttttactcaataatcaaacccactttaatattcatctaactatttgacctaaccccttaatcccaacccattataaaaagtcattttccctgttctatcccacttgaaccagaaacactcaaatcaacactaaccaaaaccctagaaatgtaaaagtttaaaaatcttaccaagtgggggatcgtgttaactgcgcctttgatattcattgtcattgctttgcttccttacaccgttgagtactcaacagaaggtcaaatcgtcgcctgaaggggttagttcatctgggtttgcattctcaagtttacagaagtgaatggggggagagacgatggggtttttttgtgttagggtttcggatgtttaagtcctactgttttcttctcttttgttttgattttatttttcaattttcttttaattaaattttgtatatctttatgtttttcatttaattgagtgattttgatttattttattttattttatttttagaattaaatttaggtttttttttaagagagaggggtttatatggggattaatgcca

SEQ ID NO: 123608 - DNA, 1739 bp, Cannabis sativa
cctaacatgtaatccacgcctcgagctcgtcatccctcattatatgtgtttgaataaggattatactgctgccttggttgacctgggaacccccaatagcattaatatcttctaatggcccttcaaataaagtaggacaagtatcagtagtatgtcccacaacttaaaatattccacatggttacaccgattgacctaaggtgagttgttgtaccacagaggttaattgagctatttgctgaccaagttggttctcaatgggagtgctcacttaatcaactttcttcggtgccataacgtcttagtagatgctaaattgttgtgagttggtagccatatttgaaatcaagcttctagctcttgtaggagtcttatcaactaatgctcctctactggctgcatctatcatactcctatcaaatcataagagaccttcataaaagtactggattatgtttttttcactgatctggtgaactagcacagaacctcttgaaatgctcccaatattcatacaaggactcccctaaaacttgtctgatgccacatatttcttttcggatacttcaaactttagatgctggaaagtaatgctccaagaatacagttttcatgtcattccatgttttaattgtaccaagtgggagatagtccagccactctttagctttatccttcaatgagaaagggaaggcccacaacttaatttgttcttcaataattgaaggaggtttcatacaacaacaaacgatatgaaactcctttagatacttgttgggatcttcatcgggcaacccatggaaagagggaaataagtggatgaggcctaattttagttcaaagttgacatccaagggtggataatggatgcatagtggttgttggtcaagatttggtgcggccaactccttcaatgtccgatttttagccatcctgtgagaattaattgagtcgttagaattagactcaggatttgttaatagtcgctctttgacaggaccaagaggttaaaagaatatgttgtcggtgatagtcttcgtcgatcaagaagcaaacgatgactcaagatattattttacccttgatagtctctcttgattatcttctgcactagacatgtacacctgagattgtcaaagtaaaaacaagttagtaaaataaaaattaaatatgaataataaaataaaataatagtcctcggcaacggtgccaaaaatttgatgcatgtcgtatgccttatcaaatttattattattttgattccaatactttcaattattttagtataaatgtaagtaagagtcgatcccacgaggactacgtttatttaatttttttaaattagtgacaagaattagaaaaaggagattttgaagattagaataaaataacataaaaaaaacaaattaagtgatactacgatatgagataaatagttaaaggttattctccaccatcaacaatcattcttaacttttaatgaatataattttagtttttcaatcaaactattaatcctgcagataaatcagaagcaatcaaattatcacaatctccctattacatgtaatcaaagcgaagtgctcaataattaactctttacctaagcagtaaatctacgaaggatgcgatttatttaaattagataaagctttaagatttatggagatagactaatctatgcaacaaattaataaagcatataattcatttaatctaggttctattcttcatcacaa

SEQ ID NO: 123609 - DNA, 1793 bp, Cannabis sativa
gataactagtaactaattgtaaattgttactagttatagaagttgtaattaactaactagtttcttacgactagtaactaactatttgtgttatgcgtaatacgtttcctttaatatttatgcatttttagtaaaatttatcctaattttataaaaaatttgccagcataacgattgtaattagacgttcacaaaaattttaaacataccaaaattaacaaacaaagcaaataaaataacattacaaacaaacaaaataatattaacaatacaaaaattatccatctatcctactgcagtacatgtattcgcagaacctacttcactacggttaaatatttaagatgtttaaactcaactaaatccatattatttttcccatccgaccgcagtataatatatcgcagaacctacttcactacagatgaatatttaagatattcaaactccactaagcattgattatcaattaataataaaagttagtgagcgtatatacctattcctagctaaattcagatcaacaccaaattattcagaaccttaaaaattagctcacaatcagaccggagcccggacccaggatcgggacccagacctaggaccgggactcagactcgagatcgcgaccgggacatgagcctaggactgggacccaaatccatgacagggaccaagatccagaactcggacccaaacttaggactgagacccggaccgaacttgggaccaggacctggacttgggaccaagaccttgacttgggactgggacccgaacttgggagcgagacccagtttaggacccggaccccagttcaaacctgaacccaaacccggatgggggacctgaaccaagacccaaactcaggacccgaacctggacccaggaccaaaacacgaacctggacccaagactcgaacgggacccgcgacccggatttggacccgaacccagacctagacccgagaactgagaccctaacctggacctagaccccaaacctgagaacgggaccgagacccgggaccccatactacaaatgggtatggcaaggtcatcattctcaactcggttggtggtacgcgaggtatatgtgaaaacttttggcatttatcgtatttcttaacaaattcatgtgtgtctttgttaatcgttggccagtaatatcattgacggataatcttcttcgatagactctgccaacctgcatgatccccacagaatccttcataggtttctttgattatttcatttgcttctggtggtagcacacattgtaagagaggaatggaataaccccttctgtataatttcccctcgatcattgtatggcgaggtattgattataagagtttgcgcgcctcaattttgtctgtaggaaattctccattaactagatacttgacaattggtgatatccatgttggtgaagtatctatcatctcgatttcttcctcttcacatatactcgagtcgtctaagacttccactggtaccaaattcaacttatcgagaacaaattgggatgctagctttgctagcgcatctgcattatagttttgttccattagaattcgttcaattttaaaataatcaaacttttccaacttctttcaaactttctctaaatattttgccatctttaggcctttttcttggtattctcccaagacttggtttaggattagttgtgagttgttatacccaaaatttggctaccatctcaatggaggacacgtgtcaagataaagggaatgtgaatcgatgcaattgcttcttatggaataact

SEQ ID NO: 123610 - DNA, 1050 bp, Cannabis sativa
gctttaattgatcaatggagaaaagctcaatcgagtgagaattacccttcgttgaatcctgaatttttcaataaaggggatgagctttggactaaacctgtgactaatgggatcaagcttaatgtctgcaatatttgacagctacagccggtttgggatcgggttcgtggtgagggattgtaaggcaaagctattgatggtagtggggttgtctcggccgaggaaacaagatcttgctgatgccgaagcaatggggacacaggaggctttgagctggttgaaggacaagccgtttcatcaagtgtgtgtggagagtgatagcttagtctctctgcaagctattaatagttcggtggtgatgtatttggcatttggtttaattgttcaagattgtaagtctttgttagactctatgaataatgtttcgttaagattttgttaaacgttctgctaatcgagctacacatgtggttgcacatcagtctcgattatttgctgatcgtatgttcacgaaggatgatatcccttcggaacttaaagttgtacttttgagcgtctgctcttgagttaatgaagtttatttttattcaaaaaaaatcgtgtttttacaaatgacaatatattaattaaaatgacaactgttacgatctacagtaactgaatcgatacttgttgctgcaaaatacagattttcaataacaaaacaaaattaatagtgcaaaatataaaaacttgacacaagagaattatacgtggtacaaatacaatatatactcaaattcctcaaaaacttaccctcagaagcaacacattcagctttcaagtgagggacacaaatgatggagcgagtagggttggggtttcggacctcgttagagttggggacggggagcgaggaagagagagatctgaggtttgggtttcgaacttaggcgacgctgaagacatggatgatggagtgagggacctcagcgtcgctatggatagggacaaggatgaacgtgtaagaattatttgagatctagaattttattttgagagagagagaga

SEQ ID NO: 123611 - DNA, 738 bp, Cannabis sativa
ttattttaatttaattttttaaattagtgtttagttttccgtcctgtatcactgttaactatcatcgggcttgtgttgttgctgcatttgaaaggttagtatttttttccatattagaaatttcatagtttatgttattatttaatatgtttatgcatgttatagtagagtttgaatatcttaaatattcatctgtagtgaagtaggttttgtgattaactcaattgtggtcagatgggtgaattatttattttattttattttttgtgcatatactgttctggaatgtttgtttaatttttttgtaagttttaaaaattttgagtttatgatttttaagtctttatgttgctgaaattttaataaaaataatgtaataagaaaaaaaaattaaaatgttataacacacaaaaaaaatgtattatttattaaacagtaatgtatcattaataaattgctaaaaaatttaattacttttcatgattaataagataaattaatttaatcttaaatgaatattacattattttaaattataaattttaacatagcatattaatagtttaaatataataaaattaataataaattaaaataagaaatgagataaaaaaaaatatattgttttcaatttaaataataagtgatattataaatcttaaaaaataagtaatttttaatttaaataataaatgaaataaattaaaaattaatatcaatatgtaatatgtaatttaa

SEQ ID NO: 123612 - DNA, 1752 bp, Cannabis sativa
  modified_base (1720)..(1727): a, c, t, g, unknown or other
actcattttttaagatttacctccaattatgaataatccattgaagatggtcttcatctattttatttccttgtatagttcaatggatggtttataaaatgtgtttgcatttattattattagaactgaggatattaaaattgtgaaaattaaggttttttttcgttaatattttgcaaaaatatggcctttttaaaataaacttgtttcatagttttattctttagaatctttaactttataccacttttagcattactttaaattatttccaataatttgctcatatgtaaaacccataacttttaaaattccccattttaattggagaggatatgttgttgggctgggtgtggatggtgacccaaagcccaatccagtaaataatgggccttactattatagtatcgtgaagatgaaaagagtgaaagcatggacaaacaaggaggaaatgaaattacatagtatatctattttattttatttgtattaacttttatttttatttttatattctttaaaatatgtccacttttattattcatgttcctattatactccttagactaatataaattatgtactacacttaagtgataataaaagtatattggacaacctacttacaaaagtaaatactttagtaaaatataatataaagatatttttttattaataaataaaaaaaaatatttctcaacttatctcaaaatatttcgatattttaaggatggccatcaattttacttcaccggctctcaagaaactaattaaagctagctatgtccattaagccgcctcctcatgactcctcatatatatatttatccctttcaaaaaatgaaaaaaaaaattacaaaaataccaatttatagttttataaaaatagagacagttgttttcaatactatgttgctttttggttgttttatatttgtattatgttgtttttatgaagttcttttaaaatgtaattaaagaataaaaatcctaaaaaaataataataatttaggtattttctataaaattttattttttattttaggtatagacctataagcttagttgctattgtaattagggtcagccttcaggtgagacgaaagaggtggccaccttagtccccaaccgctcaagcatccatttcgaaaaaaataattaaaatataattagtaataaaataaataataatacttgtattgtagcttagtgataatttgattagttattaagaggtttagagtttaaatctcaacaaccttactttttaatggcccaaattagcataagacgttttttatgggatttttataaaaatattgaatttttggcaaaaatttataattttactgttacacaatattttttactaaaatactgtcttttataaaacaaccataaaacaacaaaacagaacaattaaaacaataatggaacaactaaaaaataatcgtagaataatagtgaaaacttaacacagtacacaatataaaacttacacagcatttttgaaaaaaattctgcctcatagtaaaaatataaaaataattaaaaaaattattatgtggtgtaaaaaccctaatatttatttatttatttttgatatatgaaaaaaaaatgactttttttttaatatgaaatagtaagtacatattttgtgaatttttaaaaaaatcttaataatttattattgttataaaataatataaagtagatgannnnnnnnaagaagaagatgaagagagaaagag

SEQ ID NO: 123613 - DNA, 1318 bp, Cannabis sativa
tcaaaagaaacccacttttatttttctttgtgaaactttaagtttgaaacctcggttggagttaatttcttctcaacttgggtatgatggtatgttctcggtggatgggcaaggtaggggtggtggtctagctatgttgtggaaagaacaaactgacgctcaggtgagaggcttttcccagaatcatattgatttgattgttcatcataataatttatttgattggcggctcacgggtttttatggtgaaccaaaccaggctcttcgaagaaatacttggaaccgtttgagaactttgaaagaagagtcggctcttccttggagtgttattggtgatttgaacaatgtgttaagtcaagtggacaaacgtggtggaaatccctatccaaattggcttcttaaaggttttccacaagcagttgccgattgtgatttagtggatttggagttggttggtcatcagttcacttgggagaagggtagggattcagaaaattttattgaggttcgtttggataaagctcttgctaactcagattggatggatttatttccgagttctcggttacttaatctcatgttcaccacttctgatcattgtcctttgcttcttgatccttcttctcggcttcaaactggctctactaaaggttttcgctttgagaatgcttggctccatgaagagacttgtttctaatattcaggagcaatggggaggttgcgcttctaacaacattgttgacaagattgtggctgttcaggagcctctcgcatcttggggaaaggatttgacgggcaactttaaggagaggattcaaagctgcaaaataagaattggtgctcttaagaatcgctctgatggtgcctctgtttctgaatatcgtgaagcaaaaaagaaacttgctgagatttatcatcgaaaagaaattttttggcgtcaactatctaagcagttttggttaaaagaaggggacagaaacacgaagtactgtcacgctgctgctagttcttgacgaaaaaacaatttcattcatcagctgaagaatgaggcacgcgattgggtgaaatgggagattggttcacctcaggtcatggttaattattttactgatattttccattccttggggactcatggtcatgatatcctggataagattcagcctacgataagtattgatgataatgttgctttgcttcaaccagttatggaagaagaagttcgttcggcggtgtttcaaatgcatccagatgagtctccgggtcctgatgggatgacacttgcgttctatcagaagtagggctgaacattttgagc

SEQ ID NO: 123614 - DNA, 1701 bp, Cannabis sativa
agagagagagagagagagtggcgtgcaagagatggagaatgaaggagtgaaattcaattcttaatttctcttaacttgttaatgtatatctcaggttaagttgtcttatttgtttattataatttatatcttatatatctaatttgattgaatttaaaattaaaattcaaatataaatatctaataactgattaataaatatcagttacaacttttattttattattatctttttaaataaatatattatccaataatacatttaattcaataattcaaagataattattaatttaatttgaattattttaactaatgaaataatcaaacaaaattaacatggacctttatatgttaccctacacgtgtgggttaggcctacacatgtaggccatattttaaggtccgaaattgatttctcaattttgtcacaaataaaatttattatttattctgccaataaataataattgattaattctcattaatttcttatttcacaagaactaaaataaatattattttctctaaaataatatatttctctctttaatattatttaagaataatatttatttagctaattaatatagttttatcttatataaaactaaatagttaaatactattaattacaattcataagtgtctatttattcaaaacaataatttcacaaattacttatttgtccttaagaatttatttcccatagaaattaattctcactcgaaacttactcatcaaataaaactttcacatgtacaatgttgtatagaggtgactcggagaccatggacctatatttgaagctccaatatatacttaatttttctatcattttgatgaaatgactatttcattttgaaatggaaggaatgagcaatccaatgcaagaaaaattttaataattgttttgatcaattttttatgcattttaaatttgattccattctattcttattcttattctcattttatttttgtattttcatttttttcaaccaaacctattttagagaaaatgaattcaaactttacctatagtttataatttctacccaaataaataaataaataaaaataataattaatccttacaaataaataaataatatttagtaataaattttttaaaggttaaaacaacttgggtgcgttatcaacggtccaaaatcattgtttgctccagccaccagtctccattaaatttgtaacctaatattaaggtctgacaaataagaaaaaaagagataattaaaaaaattactatatttttgtaaaaattttacacttttaccttttaggattttttttaatttagggtgttctataaaaagaacattagcgcaataaaaaaatgacataaaagtgtaacaaaatagtaatatttaaataacatcaaaataataacaaaaaataacataaataataaaaaacatcaataaaaaattaacaagagtacaactaaaaatatattaaaagaccgtattaaaaatataaaaatcgtaaaaatatttaaaattccgtacaaccgtatttttgtaatttttattgttcttgtgtatttgtgaaataaaccccccaaaaaaatctaagcctatttaaatggcaattttgattgggaaacttacaaaaatattggaatttgggttaacatttacaaaaatactgccacacgaaatttttttcaaaaatactgt

SEQ ID NO: 123615 - DNA, 1081 bp, Cannabis sativa
  modified_base (184)..(184): a, c, t, g, unknown or other
ttttaatagaatggacattttgttaatttttgattaaaatggacatttattaacttaattgttagatttagggccattttgcatcttggcccttatttaaatcagtattatccttcacttacttgtccctatccaacaatttatttttaggggaattaatttatatactgtttttttaactttnttttttttttcaaattaacggtttgggtttctaaagtgatttcttcaatgatttctatatgggttgctatacgattttttgttgcgatttaagttgcaacgctagttgcaatatgagtttctatgtagaattctgtaaaagtgcaaaaaaattattttgaagtgtaaaaatgaaaaaaccccttatttttacgcataatatatgtatatgaataatgcttttggtagaatattttgtttaatatgtatcattattttattttatatttatatttaatattattttatttaatatgtgttattattttatgtctatatttaatattattttttattttatttttattataattatttgtcaaaaatattatcattcttctcgtcatttctcttttcttcctctcatttctctctttaaaagttcttaaaaatggtattagaattagtttcacattgctaatatgtagaaataaattgtcatatagaggatgaatggagtactcccataaccaattggttttaaaataaaaccctatgcaatcttatcttaaattctaatatgatataagaactgcatgtgatctgttgtgagtccaaagtgctatcggtctaaataagcgagccataaaaaaactatttataatctattgttgtgagctatttattaaagtcttttacctgtttcaaaatttatatcattaaatatggacatatatatatagataaaaaaaaaaatcaatgacatatcttaaaaaaataactctatataacatcattcttaataattataatacctatatataaatatagggatatgattttgtcccgtgatgtactttcacggaatgtatttcatagtacattagatgggtctcagggtacattaaatgagtgtcag

SEQ ID NO: 123616 - DNA, 1794 bp, Cannabis sativa
  modified_base (1759)..(1766): a, c, t, g, unknown or other
cccttttaagggggtgcattgtaaaatcaccctaaaatatttatgaaaatacccttcaacatttaaatgctaagataatttagtatgtgtgtacccgaaatacactattttttttgttaaccagtaagagccagacatggagactctctcattctcttattatttctttaaactattactcaattctttaataacatcaactatctaatttacttttttgcttttttctttcagtgaaatgagattcagatattttttttactttttttatttcttttttctaaaacttgataaaaaaatttataatttcatcggtaattatttgagcttaaggattatactgttatgatctactttttaaaataattattttaatatgaaagaaatatatattttttgccattatcagtaaagatgaccgaaataaaaataatttagtagttttttttttcttttcttatttagtgacaaaagtttataatcaacaaaaatagatacgtcaattaattttagtaggtcactaaaatatattttgttatttatatttaaaaaatttcatatagtatgttaaataacttgattacttgatcttaataaaaaattacattttagttcctcttctattcaagaaaaaaaaaatcaaatttttaacatgaaataaatttaatatactaacgaatcaaagtattttatagttttttaatgtatattttgttaaaaacaaaagaggtagctcataacttaaaaaaaattcaatatgtgaactaattttgtaaattactaaaaaatatatttttaattcacatttaaacattaccctatggtatgcactttataaaagcttatttatagagttatttccaatacatttctaaaacaatttatagaaaccaaatgttatcttaaatatcatacaatgattatattaccgaaaaaaataaaaactatactcctattattgctactaagctatttggtcattttttgtattttattgtagctcattatatttgaaggtaacataaaagttctcattaaaaaagaaaagcaacttttaatgtatcttgatcaacaatattatataacttgaaaataaaactataattttaaatgttaaacaacttaaatagataacaaatatatatatatgaaataatattatttcaaaatagagcatatcaaaataaaaccaactagtatcttttttatagtgttatatataacgtctactaaattttaaatattaaatttttgttaacaaaatataaaataaactaaaaaatttcttttgatttaaaatactttatgtactatttttaaaaatccaaataattaataatgtagttgcaattcatttctaaaagcataataaaagtaaaaaaaaaaaattgttgttgacacaaataaacaaaataaaagaaaacaaattcaaaaaaataataataataaaagaaaataaaaacaaaagaaagaaaaaggcagctaaaagtggcactgaataaaaaaaaaatagcaggaagtggccctgggagagtgtgtagcttaaaaataatagaccccctccccttttattattttagaagctccgtataaaatatgcgcattttgatgattaaaattacgattgttatttttataaataattttcaaatcacgtatatatttaaaaaaaaaaaaaaaaaaactcttttttaattggacaaaaggtggatggtgggcttttggagggttcgggtcagaacatatgaatttgttaatnnnnnnnntgttgtcagcacagtggaatatcatctt

SEQ ID NO: 123617 - DNA, 821 bp, Cannabis sativa
taagaacaagtacaaatataagaagataacaaactaattacagcccaattattttctattaatattcggcccaggcccaagcgcaagcccaaatatcttagggcagcagcagcatcttcttcacccgctacaagctacgcccctgtttcttcatcttctcttctctcttttattttttttttttgaatgcttggaagcaactgacgacatgatctccttcaattctgcctaggtctctcttcattttgatggttggaaataacactatatatgtatatatattacctttataacaatgagtaaggaaatatatatagatatatttctgcaattgataggagatataaggtcatcatctctactccgatggccttctccaattcggcgcgaccaagcctcccgtcgtccgccagcaaccactttgtccagccgatcatcgtcaaagtttgtttgtcctcctcaatcaaaaaaccaagttagcaaagagcccgactcgattgcaatctcgccggaggaaaggtcaatcatatgttgtttgtggttggaggacgaaaggccaaacaaaagcgcttgttggattgtcgttggaagcataatgccttcgacatccttgatcttctcagatctgcaaacatcgccaatttggattttcccttgatgtcgttgctcttgtaatggcgagacctgcaaattcatttgtcctggtaacctcagcattgaatcagattgagtctccactccactcaattgcatgtcactgatgtcgcccaattagttacactgcggtcgcagtagtaaacgggctatatgtcgtatccaca

SEQ ID NO: 123618 - DNA, 1500 bp, Cannabis sativa
tatatatatattatagagagataaaacaagggaacaaaaggtggtggtggtactagtgctgcccctcattatgcaaacaaagaagcaaaataataataaggataattaataataataataataataataataatagttatccactaaaaaaatttatggtgatgatgatgatgatatatatttgatctactattcaacttatgaaaaacaaaacattagtaatgtgtattagaattactgttcatagctttttgtgaggccattgatgttgcagttctttttcagatattttaagcagagaatttgaaatcttaagaaattaagggatgcaaacatctcatatataaatgggctcctttatagcctaattattagtataaaaatacttcaaagatacaaaacacaaactttcaattactaagtaaataaagacactacctttcagtcaattagtaaaactacaaactttcaattagtaaatgattaaagacacaaattttgattcaaaaagtaaaatgcaaactttgaattactaacaagaaatgcaaactttgaattactaagttaaaatgcaaattttaaattactaagtacgaaaatacaaactttaaattactaaggccctctggggtaaataaatatataaatatatataaggcagaattaaatgaatatatatactatataattgtaggattaaaatacttctaaccattgattctttgagcttcaatcccacataagttttgattgtaaagaaaattaatttatgtgggtaattgagcttccaagctctctctactctttttagatatatttattgtttttacggaatgagtgatgagctcgggaccgagactctatatttaggtgagaccttccatcaagatctctaccggagaaatgagttaggaataggatcatggccaatctgtttcccatctaagctggcaatttgctagttaagctaattcttctaactgactccacttgttgatatatagatgactatgaactttgattgcttcttttacttgtatctaatttaactattctgttaaactatagatataactaaatcgtatttattcaaaatttaagaaagtatttaacaaaaattagttatgttaactaagaggatgatgattaatttattcattccataataaagacacaaaagtagagattggttaactaagagcatttctaatagaaatgtaaataaatagtgaaaaactaaaatatatagctcatttagcaaaaagtgtgtcaatgatttgccaaaaagtgatataaatttagcacatagcaaattttgtacaaaatttagcacgacatttgctatgatgtaaaatttacaccacaataaaggtactactttttcatttacacttatgttatttgtattagtttattagtatatttaactatgacattaaattatgaaatatttatattatttttttttattgtcttacatattaaaataatgataaaatt

SEQ ID NO: 123619 - DNA, 2529 bp, Cannabis sativa
tgaatactcgcacttgtcattacccataaaattctctttgatattaacaaaataatataatttggtgttgcgaaattcactcgacaacagtactagcctatcaaatataaaaataaaataaagtgaaagattaaaaatattttgatattgctgagatatttggttatcattataaaaagtttgtgaagtagggggtgttcaggggaccatatatagtatttttaagtctatctagatccaatctaataatatattggatgttaaattttaccatccaatctgatctaattaatttcagtcattcaatcgatctaacatatattggatgttagattggaacagttttatccattggatgtatttcatgtataattattagtttaattcgagtttatctaatatttcagacctattatttttttggatcagatcagattcattcaatattttagaatccaatattaataagattggattgaacttcaattcaaaaaacatgagtaagtaaaattttatatatacatatatattttacgtataacaacataaaatttaattactcatctaaattttaaaaaaatacttataagttcgaatggatgttggatgtaattgaatttttagacatcacatccaacgtctgatccaatttaattaaatatccaatatttaatggtcggttgtagcttgatcaattggttcttttctagttggaatgatttatcgtcttccctactttgaaggtgtaataccataatagtgatcaccacgtataatcaactgaattttttatttttactagctaatgtggtgactgtaacatcttaattctaaacagcacatctaaaaagtaaacataacttaagtatattattattaaataaacataatataaaaaggcaaacgtaacttaagttgattgttataaaataaaaaataagaatatatggaatgatatttattttaaaaattaattaataatataatctagttatcttttattgtagaagttaaagttagttttgtaaataaaagtgtatttttttttttttaataatgtaggttgaaaatggataaaatatttagggaaattacttcttatactatattttaactatattttaacttttttttttttttcaaatttaccgtttgagttgctccggtggtttctatgtgcgttgctatacagattttagttccaatttaggttgctctgagtttttgtgtagaattccgtaaaaatataaaataaaaactattttaaaatgtaaaaatgaaaaaaaattctaaatatttatttataattaatagaaaaataatataatattattaaaataatgataattaaaattaaaataatacctttttgtatactttgttaaatattattgaaaaatatttatattattaaaaatgtaaatatgtttttttttttttgaaatgaaaatgtaaatatgttagtaagtataagtataaaaaaagtaataaacataattttttttttataattgtaataaacataatataataaaggttatttaggatttttgtagcctaaattacttatgcattattgtattccttgagcccgcaataaatagtttttaaactattcacaatattataaattgatccttctgtcaagttttatcacacgtgacaaataaaatgatgacatgactgcttagctaattggcacatattgacacatcaatgccacatgtgtaatttaacattaaaaaaaagtaaaaattatgcatttttagagaatcattaaactaaaaattaattaattattagaaaaattagtaaaagtaaattaaaaaaaattaatttttttaaaattaattacatatgtacgtagcgctagcattgacatgacactaacgtgacaactgacaaagtagtcatggcatcatattgttgtcgtgtgtgacaaaaattgatagaaagactaatttacaacactctgaatagttcaggaaaaaaattcaacgacacaataatacatatatcatagttcggaggacgaaaattctaaataacctataataaatatataaatatggacttttaaaccaactattaaaaaaaacataacaaattaaataccgagaaagataaaaaaaaaatgtcgtgaaactattaaaacaaacaacaaaaatttatcatatttatcaaaattaacttaaaatctcatattagtacaatttcttcaattaatgttttttttttgatagatttcaatgacacacgtgtcatatcatatgataaatttttgttattttatcacattacatactatatatcttacttctatccaggatccactatgggataatttcaaaaaattattaaacaaaatttttaataattttttcattttatttatctaaaatataatttttttttatatatttttatattgtactcttgttattttgttgttgaattttttatttgtatattattttttatgttgttttgttgttgttttcttgatatttttatgtggttttttttttt

SEQ ID NO: 123620 - DNA, 1809 bp, Cannabis sativa
atcttgaagtgtaaaaaagaaaaaatctcatttttttaatttaaaattattacacacataactttacttaataaaaatagtaagaatgacctctaattagaggtaattctacattcaatcttattttcaatacgttattcatggataaaataacctttctgacgtggacatcaatatatgacatgtgtcaagaaaaaaaaatatcccagggttgagtagttccgagtcatatagcagtcgacctaggaggggtccttagccctgcgcctaggttgactccgagaacttcaaaatgagtgttttgatcccatcaagttgtttccaactcaccatattttagtattttaaataaagaagacaagaagaatcaagtccaaggcatggaaattgaaagagacgaaacgacaccccaaaaatcaaaccgggcgcctagagctttaacctaggacccaggttgacttcccaactagagtttcaattttggagttcatcttagtgcaaatggtccaaaatttgtactttgacatgaatacgacctgtcttacaaatatttgaggcatcgaaatcagaattggaacactttcatttttgagcacctaaagcactaggcacctaatcacgatattgaagaagtatctcaagaattttatttgtctccatcaagtgcttttaggaaagaaattgatcgacctagaggccagaacagggacctagcgccttgggccttagggtttaaggttgaaattttgtcaacttgggtcatttccatcagcaattcagaagaagttttttgagcatatcctctatttcatgaaggattaagatttggatattttcgaggaagaaacaaagtcatcaaggatctagaactaggactcaccgcccatgttgacctaggtgttgggcctagcgcctaggttgatattttgtcaacctagactattttcaatcaatttcttagagaagtcttccgggaatattctctattttattaataactaagatacaagtatttccgagaattaaatggaatcaaccagtggcaaaaagctggacccagcgccaggttgaaattttgtcaacttgggctatttctagtcattttttcctgaaatgtgttacatgcatcttttttgtcttcagaaataatgaatatacaagtgatcttggggaacaaacaagattttctaaggattaaaagaggaacccaatgcccaggttgacatcagcactggaccttgcacacaggttgacatgcaacctggttcccatgattctgctcctcaagtgcaaaaactgctttgggtattcttcttgtttgggtaaaaaaaaaatggggtaggagacctcgctcgcaatcttgaatgccttagaagtaccaaaacgagcctcgagaaatcacttgggaagcacccagcgcctaagttgacgtgtgacctggtgcgatagaatctacttatcagaatttgattctgtcttgaccatccgactactttttgtagtaaacgacagctacaatttgtgataggataaattcacactttgatattttaccctttcaggaaggtggaatatcaacaaattaacaatgcaataatattaatgttacttttcttctaataaattatttgtttaattataaggtctaatctctctaataaaaatagtaaaacacattagttggttatatttaagactagaaggattcgtttagtacgacatattatattgtattgtattatattaaattgaattctatatcatatttgttatattatactatgttaaattttattttatactagaata

SEQ ID NO: 123621 - DNA, 1305 bp, Cannabis sativa
gacatttgcaaaaacacggtttttcactactatctttaatattgtcacaaaatcacaattttttaaaaatattttgaaaataaaaaactatgtttataatttcaaagtaattgttactttgtttataatacacatatcaaaatgttatattacaaattatatcgttcaatcagtaaaaaaaaatttaaaatatcagaagattacgaaaattgggttgaagcttagttctcttgttatttaataatataaaattaatacgttttatttactaattttagatttaaattattaagttaaatgcaaaaattttaaatttatgcctaaaaatagtttaaatatccaaatatttaataaaaataataaaatattgagttttattaaattttgaaaataaagaaaaaatcggttcacttttattatttttttaattaaaaaataattatgttttagttattttttaaaaagaattatacaattaaagccatgaagtgaaaaattagagtttctcgttcctaaatttataattacaggagattatcttttttctccgaccaagcccgcctaccttccctgtgcataggtgaggcttggtgggggttgtgtttgctattgtgattcgacttttgctactgcaattagtcttatcttcatgacatggttttaaatattttagttttgtctttgtgacatggttttattttgttttgtttcgttgttagttcttctttgttctttgatggctcaccatcaaatcgcttttagtgggtgagaataacaagatctctaaagggttgttagtaatacagttacttgagtgttcaagctataaggttaaatgaacctgatgcaatagtttttactatgttgtgtcttctagacggtagatgaaactgaatgtaagtattcttaaagttaattatgatgcaacaatctttttattttatattatttttagttgttttgtcgaacgatttaaaaattaaacaactgattatttgacttatttttttaattctattgaatgtaattctaacataaagatatctcaattggattgctaactattattttaattgattgttattaataaaattaggtaatttattaaaatataataataaaaaatggcatgcgctgtgatttttgggcactacatgaatagaaagtcactctcaatcaataatgccatttgggcactacttataatgcaggggtaagttgaaaaatgcctcttttattcatcaattaatcaaatttacctctaattttatgtttatttgaaacatacctctttttatatgtatt

SEQ ID NO: 123622 - DNA, 1606 bp, Cannabis sativa
gcttgttagattacattacaatagcggtatcagtatatttagtattatattggatatcgataaatgtatgttagattttatactactcgatagtatcacatcggtacgactagcatgccgagtatagactaatattatagtcgatagtattgtactacttgaccgtatcacatcggtacgactagagtacgactagcgtaccgagtataggctgatattatggtcactagtactgtcgtttaaacactcttgactcagtaccgtgttggacgaggggaagggttacgattaggggtatgggcgcctaatcttaatactgtttacatttatattatgattattcttttcttactaagtctgtcgactcacagttactatgtgtatctgcaagtatgagctagaattgaaccattgaagattctaaagctaaggatgaaggttgtacatatcatgacggttagacctggagtgttcagagtctttgggacaatgctggctcacttttgttggtcgctagacgacaacttttgaaatataaatagtttttaaacttatgtaacttttaaaatgggatcccgaattgcgtaaaatattatgttcaaatattaaagtaaagttatacaataaagtttttaatcattcacatttttattaaatcttttgattagcaaaggtgtgcacaatatctaaaaaatactgtaacacacttaatctactaggattttacacaaaaatatatatttgaatttaatttttaaaaatactttacgaattaagtattttatgtacacctctacacttttttttgaaagaaattttttattcatagaacaaagaactataacttgaatttatcgaattctcaacaattaaacataaaatccatacaaataaacatattatctaatgaaattaattgtattataccaatatctgtgacttctagataaatttttatatttatttcataaagataatagtatattaagatgcttttatcatcaatattattttgtagtttttctatggtccatccctaaaataattgtgtaatgacggcttagttatttttgagaattagtagataattagggtttaaatttactagtagacttttaattattattttttatgattttggagatatattcaaattttaggtgtgctattcgtattatatatgaattttatgcttttttatatttttatgcctggtaatagtggaacgcgacgtataacctatagcgtcaattctgtatggtttggtatttttagaatagcggggcgacctagttagacatttggaatgtcgagaatattcgaggtattagatttgactaaaatgcccctaggtagcaatattactttttagttaagttaaaggcaaaatagtattttgccatattatttctttggtcctttagtggattttactaagatagattaagctgaagtattgaataaatattaagtattatcttatgaagaacactaaaggtttcgaattagagaatagaaaagaaaaagaagtctcaaactctctagttgtctgacaagaagaaaactaggtcaagagtcattagttggattttgagaccattctttt

SEQ ID NO: 123623 - DNA, 1951 bp, Cannabis sativa
  modified_base (52)..(58): a, c, t, g, unknown or other
ttagagaattcatatttaggatattaattcaacatacttattagtaaatctnnnnnnnggtaaaatattcccaacaacaatttagtacaatgaatgtcatcaatatataaacaacattcattgaaccaaacttgaaaaacataggccaaacctctcaacctataaaaactattttttctctattatcacctttcttaattttaataagattatttgcaatcgcacctctaactgaatcaagtaataaagaataagactatttgccctaagtatattcattgaacctcccattaacaataatattcaactctaacttagaaactttcttagtgtctgaatcacttaacacaaaatactgaacaaagtagagaataacaactttcaattcaagctcatcatcatcgccaaaccttttcccaacaaaagctttctccacatccttcttgtttatttgtttaaaaccagcaaaactcttctccttcaacaaatttttttcttgtttatacctcaacttgtcacattgactagaacaatcaagccctaaaaccaaagcaaatttctcaatgctaaatcttagcatctgaccagcaacattaaatcacatcttactatcatttggctggaccacctcccttaacaataaactgtggatcagttggtgttgcgcaacataagaaggaagtcttaataagaatccaaatgtagtttatccaaatattttcttctgttcagtggacaaaatagaattgagagtctcaataattgtataacgacatctagaagtaactcgggaagtatgaaaatcttccttactaaatttcttattctataactgaaaaaacaaaacagtatcatcaataaaacagtaaaacaacaagaactataaaatatatatatataaaaaaaaaaacaatacataaacaaaaataacaagaacaaaaaataaataaaatataaacttaaaaaaatcataaatagcaaaaaatatacaaataactaaaaaaaacagaatatatacaaatatatgtgtaaaattaaaaatgaaactcacaacatcttatcaacaaagaataaccaaacaataaactaaaaactctaaacatcaaaaaagcgaataaacaaaaaatcaacagagaataacatagttaagtgtaaaaaaaaaaattacattgttgcacaaattgacaaaaactctaaatagaaaaaaaaaataagaaaaatataaaaataacatattatataaaaattatttgttaaaaaatagaccaaacccgcaatatcaaataaataaaaaatcaacaaaaaaataaaagaaaaacaacaaaatataaaacagaacctgagattgtattgttataaactaaaatttaaataaacaacaatatcaggaacaaaaataaagaaaatataaacttaaaaaaaaaccataaataacaaaaaatatgcaaataaaaaaaataaataaaacagagaatatacgaatatatttgtaaaataaagattgaaaccaacagcatcaaatcaacaaagaataataaaaaataaattaaaaacctaaaacaccaaaaaataatcaaataaacaaaaaataaacagagaataacacatttatatgaaaaaataaataaagatatacaaaatatcatctcaataaaaaataaacagaaaaaccaaaaatacctttcaaggtcgcccagttgctaaatcatcatcattatcacttctcttcctcttagtcttcctagcatcaccagaaatagtagcaagaagcttagatgatggctcaccaacatcaacaacttttgatttcttatttgggggattgaaattttttgaacaaatttgtggttcaatggtttaataagctttttttgggtttcttaggagaattagacaagaagctcaaacgagaacgagtaatagccattactcaaaaacaaaaaaaaaaaaa

SEQ ID NO: 123624 - DNA, 1226 bp, Cannabis sativa
ttgagaaaaccattatcttgatagacaaaatttgcttctattttctcatttcctttcacagatgcttgataaagatcaacaaggtattttgctgtacgacagtcacgtgcccagtgtccttttattccacatctgaaacataaatttccaagctttagattctattttctccaatattatggatgggtgaaaaccctaggcacccgggttaacttttggggtatgttgtttcgtctcttttcaatttccaagctttagacttagattcttctagtctttttggttcaaaatactgaaagatattgagttggaaacaacttggtgggatccaaacacttattctgatgttcccagattcaacttgggggcaggactagggacccctcctaggttgactattatgattcaagactactcaactcagggatactttctttcttaccacatgtcaaactttgatgttcacgtcaccagagtcaattttcgagtaaacatcttttttttttttaaccttttgtaaaattttttacctttttttctcttgtgtttttttaatgaattttacttgtttatttttttagtttttcttgctatttatatattagtaaatatataatagtataaaatattatacaatagacatatgatattaatattttatgtgttgttatttttttaaataaatttttattagttattattttatttttattctaaactttacttattaataaacaataacagagaaaattagatgaacttacatttagataagacaattggtaatcataaacgaacatataccacattgtctttgttgaaacataattttttttaaaataattatttaaatttaattgataaaagtaaaaaatataattataatttacagttacgtacttcttgcatgttctcttagatataaatagatcgatagatagttgactaaattcaaatctaggaaccatttttttaactgattttttgaaattatgatcttaattttcatgaaacacgtgatttgtattgacccaaaaaagtaaattaattattattgacttataggtcttttattattttgatactgatcagtcaaccaataattttgcatatttaattataattttaaattgagatttttacacctcatgtcaaaattgacacattttttacatttttatccttacacggttttttaaacatttttaacttttacatttttcaat

SEQ ID NO: 123625 - DNA, 882 bp, Cannabis sativa
ggtctcctttggatctgtccatcatctggtcttcctctgtcggtcggaggtgataagctttaaaccctcatttactttcttccaaatttccgtcggtatttgtacgtcttcctaattttttcttattattacttcttcggggaatggtccttattttatcttcctcgcttttgtcgtttgtactttttatttatttttgtcctctgggtttccaactaggccatctagtgttgggcctttcttattttcgttaattatttgggttttgaactttcgggcatctactttatttgagcctttgcactttttatgttttattgggccttcatttttatctgttcataatttttccccccaaacactactcccctagttctatttatgcttatgcataacttgaaactgccaagaactgtctctctttatatatatatatgtatttatttattattatttgtcatgtctatgacggttttgtaagttttcatgtcaattttttttgtctacttgtaatttcaaattcaaaattttgtgagaaatggcagtttgcatgatttgatcatcgtgtattgggaatcgttccttcttataaatgttcctctaatcttttaacctcctccaaaattttggtggcgcactcttgagtataagatccccaatttcgaaatctaatacgtgatccttctttgatgctcgtttcaacttccttgtattaaatctcactgcttccaggtatatatatatatataaaaatttctttttgtttcttaatttaattatttttcctgtcttttactctctcttttttctttttctttttctcttctcttgtttatttttctgcgactctcttctttccttctctctcttttttttttcttt

SEQ ID NO: 123626 - DNA, 897 bp, Cannabis sativa
aaaaaaaaaaaaaactaactcaaataatagatagtactaatattagtagagtttgtaaataaggagttaaaattaatttatatattttttcaaaactaacaatatataatatgaatgatcagtttccctatgattaattgggatttttttgcatcaatatttattatttggtagtttgatatatattttgggattgagttgttttagagtaataataataatgatgaaaaattcctaataataataacaataataataataataataataataattaataggcacatggtgaaattgaagctgatgggagtaatggcacatctgaatttaatgtaatgaaaagtggaaacgcaatttggagatttgtaaggccatatgcagccaagggagtattgtttaactctgcgtaagaacttctttataaattaatatattaaacttggcaattatattcatatattaataattaatctctaattggtttttgtatatatatatgatgtagtgctatatttgcaaaagagttggtggggaacctaaatctatttagttggcctttgatgtttaagatactctcttttacattggttattttatgcatttttgtaagtacaagtggcatcaatcaaatttatgatctcgacatcgacaggtgcgtataactaattataccaaatacactttattaatttataattactttgtattttcacattcaaaatattgtgtaataaggatgcacatttctcaggcggggacatttttttaatgagacgggaatttcccgtctaaatagagaataaagtagggacggggattactttttgtccccaaatattaaacagggcggggatggggatcacactccttaacccgtttagtattttatcttatatt

SEQ ID NO: 123627 - DNA, 1393 bp, Cannabis sativa
  modified_base (98)..(118): a, c, t, g, unknown or other
atattccgctgcacccaatgtaagatttctcatacttttatgtgtttaattttctatcgtttagaagttcatatttatgttgttaaatcaacatactnnnnnnnnnnnnnnnnnnnnnggtaaaataattccaacatataagcgccactgggcataactctacgttctaactactgtcttacctggtgtcccacaaacatggagatttcaaatccccgggtgctcctgatcaagtgccggtaatcctagtcaccaattctgggatttacacatataaggttaatccctaattccacatttataaaatatatacttggcattcaaaatacagataatcaaatagagctcggaacgagctttccaacaaaatatagaactctcgaatcagagtccggatcacaaagtatcaatattcgaagattgcattctaatctgccagaaaaacaagagggcgggccgcggcactccccccacatggggtcgcgacaactgggaccgaatcctaggctaccaactagaggcgggccccggcccctaggttccaaacccaggaaaaacacaaaccagcaacgaaaaacatggccatttcacatgcaattcactccaaaccttaaccaaaacttaaaaccaatcatcaatacataacctatctcaaattcatgtatcaatatccaacaatataaccctcaaaatttggattaaaccacataaaattcaaagctctaacttgagcataatttcatataatcctacctccaacacttacattatcaagccaagaactcatgcctcaaataattaatttcagagctcaataacagaataaaaacactagtaaaatccttttatgttcagtccaaacctaacccaacataaactcaaaagatccaagtacaaacatgctcatatcaacaagaaaacaacaacatgcatctcaagatcatctcaacctatttcatgcttctcaacaatagaaatctcagcaagaattcgaataaaattagcaagaagattaccacaaattaaagcaaaaagcaagcctcactccaacacaaatcttcaagcaattcaccaccaaaatcaaaagttgaaaaagagagttcgagagagagagaggggagtcggtttggggttaagggaaatgcagaaataaaaaccttattttccttcaaatttcctttcttttgttgtatataaaacaaaggtcaaaataaccaatttgtcgctagggccataaagcatacacataaaaattcaagggcattaagatcattccatacaaaaataaattcaaataattttcagattatccacacataaataaaatgccaataattcaatccaaaattgtatttcgggcccaaacccggttcggtccaaaatacccggttgt

SEQ ID NO: 123628 - DNA, 1041 bp, Cannabis sativa
tatgaatgcacaacaatcttaccataaaaggaaaaattattttgtcaacttacttgccaaaaaaaagactttacacatatataaagactttacacatatatatatatatatatatataaattcatatataacgaaaattgttgtttttagctctactgtggcgctccttgtatttacttgggcaagtttcaatgtgcataaaatggagctagaatcttgcatcaagaaaaagattaagaggagcaagcacttaaagtttttaaaagaggtttatcttcttgcaattattattagttttatgtataatatttggaaaactaatactgtgtgtactattaatatcattgtacaaaaaattaaaagaagcattcctaatagattttctaccttttagaatgagaaaacaagtcatgctacactacaaaaaatttaacttttaatcacaacaaaaattatagctaatagtgaaaaatatcatgattaaaagttttagtcacaattttttttatgatgatgttgtgactattaattttattaagaataaataaaataaaatatcctaactttaaaaatttatagtttgaaaatcctaaaatatctatttaaactaaaaattaaccaactatccaaaaattttatgttattttgacaaatatataaattttgattaagataaatatcttaacaagataagatgtcaaataactaacatttatctttttgacctcaaaaagtggccaaccgacactgatgattgccacgtgttacacaattagaactataaagtaaaagaacacaaggaattttatagacgtttggcccccttagttagtaggtaaaggcctactctctttttagttgtattgataccgagagataatactattcagatcactataggtgggatctgatatagctctctttaaggttaaaatggatgaattagtaggtagatctctaacgagatagataacgccttggaggcgtgtgagaaagagagaggtagagagccctttgggcgtgtataagagagagagagag

SEQ ID NO: 123629 - DNA, 2006 bp, Cannabis sativa
  modified_base (323)..(324): a, c, t, g, unknown or other
ttttttttaaaaaaaaaataattggtttacgttagatattttttatagaaaatttattaaaataatactaaaaatgagagaattaagaagaaaagtgaaaagtaatttttttatagatgatcaataacgataattcaaagtttttcaataataataattgtttaaagttaaaataatcataataatatatatattttttaattatttgttaagtttgttaaattatgggatagttgtaacgtccccgcttcaagcctctattgggcccttacacccacgaaatgaatagctcttatatacgaatatgtcactctggctgcttnntggactgatgactgaccctacagcccaacacgagtgtttccagcatgctttgtcctcactcgcacgcttcttggaaaaacttcccaggaggtcacccatcctgaaattgttacaggccaagcacgcttaactgtggagttctttcatgatgggaaaacaaagaaaatgataggaaactcatataagatgtcatctcattctctttatatttttctttattagatgaaaagtaagaactcatcgggtaagatattaatcaatcacccataaatgattaatattttttagacaaagaaaagtaatatagtaagaatattatttataacatacatagataaaacctaaacaatttttaaacaatgtaggacttttaatttatatgtgtggtttggttttcaaaaaaaataagaattttttttcgagagaacaaaccagtctattaaagaaggtaagtgagaatcactataggggacccctccctatgaacaaaataggaaattgtgttagaaaattggaaaaataagaggaaaaaattataaaatgacttgtaaactctttttgtgatttcctttatatctatatattaattttaaatattttgcaaagattgaaaaatgtaaaaatatatttaaataaataatatctatcactccctttttttatgagacacaatggtttttaaaccatgtgagactttatcaaatgactctacctaaaccatttttaaacactgtaggacttttaatttatatgtgtggtttggttttcaaacaaaataaacaaaccagtctattaaataaggtttcataggggacccctccctatgaacaaaataggaaatttagttagaaaataggaaaaataagaaggaaaaagttataaaatgacacgtaaactctttttgtgctttgatttatatctatatattaattttaaatattttgcaaagattgaaaaatgtcaaaatatgtttaaataaatgacactcacatttttgatgagacacaatggtttctaaatcatatgagacttttttaaatgactctcatattacttttttttttcgacaatgatccttctgcaggctcacatgcggaaaccttattacgacttctccttcctctaaatgataaggttcaatggacttctcctctaaatgactctcatattactaaaagcataaaaaaatattaaaaaaaatgaggaaacaaagaaaatgagagaaaactcatataagatgtcatctcattcttttttgtatttttctttattagatgaaaaataaaaactcattaggtaaaatattaatcaatcacctacataaaaaaaaaaaaaaaattatgtagtaagaatattatttataacctacatagataaaacttaaatagtttttaaacaatgtgggacttttagtttgtatgtgtggtttggttttcaaacaaaataggaaattgtgttagaaaataggaaaaataagaagaaaaaattataaaatgacacataaactctttttgctttcctttatataaatatatatatatatatatattgatgatatgtaacatcaatattaaaatttaattaacattattgggtgattctacaattaaagcatcccttataaaaggagatgtattgatgcaccctctacttgtttcgacatctagaagaattttttagtc

SEQ ID NO: 123630 - DNA, 1231 bp, Cannabis sativa
tgtttctagtactcatgttatcaagctcaaaacagaagctgtaagaatcatcatttctaagaaactttaacgagtgaatcaaaaaatcaatgaacacaaatatgaatccatgtatactcaagattcaaactaatctactaatggttatcgttgtgatatgaataactctttcatgataaacgatatgttaatgaaagatgttattacatatcggtccagtcatgtataattaaattatacgacatttactacatgtctatctacaataatgtgatccgaatcaaaatcacactcactagagtatagtgcataataaacagtacttggtaattccatattaaaaattctatacttttatacactactgacttagtttattcatattgtatgatcttaattttcttgtattactttacaagatcataccatttctatgaaaatttcaaatatttattagttatatttttataattaatatatttatttatcttataattatattttacatattttaaaatatattatacattaaatatttaattttaaagcatacacccaaacaagaaaagtagaggagaaacaaaaaatctcttaaaagaataacaataagttgtggattggataaatgaggtgttgcatttcattggagtgggagcaggtaggcaaaatcccaaaaagaatcctactttctttccttttcatttttttttaaggttaaaatccaagaaaaaagaaagaaaaagaaaaacctactatcctttaatatttaatttaaggaaaaggtagcaataatggagattatctcttcaattagagacactgcatatatttatacatgcatgatttatttccaatcatacactaaaaattacactattgtgaaattttgtctacatgcccaacattttttattatataattaatatttatatatatttttattattgtatttataaatttaagaatttatttttaaaaaattttacaatacatatttttaaaagtgatatacgaatctactactatttgtttcagcactccatagacttttttattctatttttttatatagtcgtgtatattataattatctaaaatattttgcaaaattttaaaaaaatttaacaacgccaaaaacaatacacttttttaaaagtgacacactgatatactcctacttattttggcattcgagagacttgtttagtttttttttttcatggttgtgtac

SEQ ID NO: 123631 - DNA, 794 bp, Cannabis sativa
ttccgcatttaattaatcacttaattaaatagttaaactgggaatattaaaatacggaatttcaacctcttctcagtaagtcttcagtactggcagaggctcttggcaataccattggtcaattcattgaagtctatgaagactccacaaatgaaggatggggacactttctgcgtgcccgtgttaagctttctgttcttaaaaagattcttcgtggatagataatacgattgctgaaaatcaaagatgaattttgggtagagtaccgctatgaaaggcttctttaaatttgttttgaatgtggttgtcttgaccatccttttgaacaatgtgttgtttttatggagcctattcatactggtaatgatagtgaaccttatgtgtatatgtatatattaatattatatatatttaaaatgtatatatttattaattttttagtttaaaaatattttttttatatgcgggtatgtgtatatattaatattatatatttaaaatgtataaaatacattttttaaaaaataaaatataaagaaaggaataaagaagcatacggatagtgtaatgtaaaagttgttgtaaaatagataaatattctgatgatcattttaaaagatagagtaaaaaagttgttggaagtgctctaactctatcattcaaaatacatcaccaaaattcaattttttttggctaattagcaattttccccctcgaattttgacatgtaccaaattatgcctcctaaacttttttggccgttaaaaatcgcccctgaactattaagattgtta

SEQ ID NO: 123632 - DNA, 1238 bp, Cannabis sativa
tttggggaaactcaaagtcgccgaagctacccatattggaatgagtaatggatatgtataattacttgtttgaataagaactatatatataactagagatacagttgatgagttttctttctttttaaaactttggttgaagtgagagagagagtcagagagagagagcaatattggaatgagtaatagtggttgtggtctggtggtttggatgcaagaaatgaattgtgatgtgagtatatttatacttggaggataggcatatgggcatgggatgggatcatcgtatgggtatgggaggaagtttccttcacttttcgatggagagagagagtttattagagtagagttggtgaggtagtagtggagatttgaccaagacgtactgggtgactgttgaaacttctctaccactgaagaaaatacttgcttattaaagtgttaatttgtgaaaagaaatgtacaaaagctgacttggactgttacttttaatattgacccctccctccatctccatgtatatattaataagtggtttggtttggagcaatataataatgctaccaaaataaccaatcatatacgcatatgttgcacatgtgaactgaaattattctttttcttttaataaattaagaagagggagatcagaaattagtgtttaatatataatacgtcttatgttcaattaattagtacctatttctattaaaacatgtgctgtaagtgagtaatcatttatataaatattatgctaattaagggaaagagtatgtgttaaacatacgttttggtttggttgaaagaaattatgaattctatatttttattcattttatttatttggctacataattaattttaaagcattcataaaatgttattttgtttcttaattttagcctaaaatgcagaatttcaaagttaactataagttaacgtgaatcattataaagtttcacatgaattagtcaataggggtgtgaccacacggtgccgtgcgctgcacgcgcgcatgggtcgggcttggggaaaaggcgcaattgctcctggtgtcatttgggcatttgtctcttgctgttattggatctcaaaaataccaatttttataatttttgggccacatttttgacaattttttattctttttcatttacaaatgatattcttctcaataaaactcaaaaaaaattaaattcaaataaaatatttccaactgtaacgttcccgcttcaagc

SEQ ID NO: 123633 - DNA, 2002 bp, Cannabis sativa
gacagtaaaaatgtaaagtttaccgtgtcccagtatttttgaaaatatttggtaaaaaaacagtatttttgtaagtttccctaaaataactacaattataagttagattaaaattcctcaaatgccaaaaacataaacacgcatattattaattgttatggatattccaacatgcaagtatacatatcatttataaataatagactcacaagagtgaggtcgatcccacaaaaaatgtaataattaccaaataattaaatttttaattctatttagggacaacaaaagtaagaaaatatgtttgataagaaaaacaaagaaaacacataattaatatgaaattgaacaatgattaaaggttaagaggattaacttcgattgcatctactttatatagtttaatataatttaaatctcaacttctgaattttatgtgatagtggatttattaaagaaacttatattcgaactaagacatataaatcttaacctatatgcaaattttttactcttgttataaatttaacaaataggagacactaagcataaaagtcttaaatgctacacaaactatataggtactctcgtcctatatttaaatttgtgtctttttcactacagcataatcaatactcacttcttaaattttatattgaattcattaaacagttaattggtgatcagacaattaaaagaaattaaatacgaatgaaatagatacacaaagaaaattagggaatatttaattaattttaacactttaataaaaagtctagctactcataatcatcgaaaatatctgataacaattaagaacataagaaaaaatagagaaaaaggaagaactcttcaaaaaataaatgttgaaagtcttcggatccgtttctcacttctaattctcgtactcccaaagtcatctcttgaaaagtgttgaaaaaagacatttatataggtaataaaaaatagataaaaaaaaaacataattttttctcaatttaaaattggtgagtcatgacactaccttgtagtgtcgcgacgcttgaagctcgattttttggcagcaaacttcttggtgctacgattgataatgttttggtcataactttttcaacattattcagaattagataattctagatgttttggaaagataaaagagagatctagaacttttattcacagcattttctcttaaattgaacgcacatcatagtttaaaattttcttgatgtttcaaacttaattttcgatcacaaatggagtgtgttgggcatcgaaaacttacaattttttaccacttatatcctaagaactctaaatttcatgataatctatcatattcgatctcatttaacatgtttcttttcatttttaattcacattacgaattttaccatttaaacctgaaacaagtagaaaacaagcataattctacacaaaatgaatataatcaattgaaacacacctctaaaatatttcatgtacctaaaactaacctatcaattataagcatatctcgtcatataaattactatgtgtaaatatatatttttatataaattcatataaaactacattcaacatatatatttatataaaatgataattctcaaaacttaaacaataaaatattaatattatcaaaaaataaaataacacgtagtttcgcatgatacatataggtagcgtttggtaacacttttttaatcacttttttttaaaaaaaattgaaaaagtaaaaatatttttcaaaaatgcgttctataaaactgttttcacttttgaattttttaattagaaatcaaaattttaaaaacaaaaaaaaaaatcactttcaatattttttaaacagtttttttttttatcaatattttagactctgaccaaacctggacccaaatcacctccccaaggccctggcgctaaacccgtcttctgatccgaacccgaatctgaactcggacctagacccgacttaaataaaatcaaaaaataaaaatga

SEQ ID NO: 123634 - DNA, 1788 bp, Cannabis sativa
  modified_base (1365)..(1366): a, c, t, g, unknown or other
  modified_base (1444)..(1445): a, c, t, g, unknown or other
aatttcactgataccgtgatacttaataaataagctaatgaaagtaatcatacactacttaataaataagttagtgtcactaaacatatttaaaaaattaagccaacaaaatatcattatcattaagcaaatcaacttaaaagacaataatcacaatagtatatgaagtacatactttcaattcaattattctcgagaatataaaaaaacataactgaaagcataaacatccaataattaaaaattattggcccataaaataaattaagtagttcataacatcaataagaaaattatatataaatataatctcaaataatagaataagaaactctcactaacctaaaggagcgaaagattataagattctcatatcaacatgtttattaaacagcatggcactgaatcctttggttagaggatctgctaatatcgacttggtcttgagatattctatttcaatatctcttttcctgaccaagtctctaatagtgaaatactttatttccatatctacggaagcactactattctttttattctttgaaaagaaaacaacaatattattacaatagattagtatagaagaggaaatagaatcaaccacctgtatctctaaaatcaaattctttaaccacgaagcttgtaaagatatctcataacatgggaaaaactcagtatacatagtagatgatgtgattaaagtttgtttaacacttttccaagaaatagcggcaccaaccaatgtgaaaagatagctagaagttgactttaaatcatctacacaactaccaaaatttaaatatgactaaccaacaacatggagattgtcgacatgcttataaacaagcataaaattctctgttcttgaaaatatctcatgactttcttgactgtaacccaatgatcatgtccaggatcagataaatatctcttaagaacattgactatgaaagcaatgttaggtcaagtacaaaactaagcatacatcaaactccctgctacacttgcatatgggatgttcttcactgcttctctttccaagtcgtttttatgacattgttacttagtaaacttgtccactttcagaataggaacagaaccagccttacataaattcatgtttaaccttttgagcacacgattaatgtaagcttcttgagataagccaagaacttttcaattcctatcacgatgaatgtcaatccccaaaataaaaaatgtctctccaagatgcttcataccaaagttggtaacagaaaaattttagtctcatttagttttgacgaatcacagctggcaagtaaaattttatctacataaaaaacaagaaaaatataatgactcccactgatcttcatatanntacactggtcaaacttgttctcgatgaaaccaaacaatatcacaaaccttatcaaacttcaagtaccactggcgaganncctgtttgagaccataaatggttcgtttcaatttgcaaaccaaattttattttgtattctcccttgtggccttcaggttgagacacatagacttcatcaattaattctccattcagaatagtagttttaacatccatttgatgcagctctaaatcaaaatccgcaattaatgtcataataattatgaataaatctttagtagaaacgtgtaagaaagtgttagtataagctataccttctctttgagtaaagcattttgttgctaaacatgcttttatgcctttaaatttgtcgctttttatcctttttgagttattaaaatccacttacaacctattggttt

SEQ ID NO: 123635 - DNA, 1736 bp, Cannabis sativa
tagaattcatattaggatgttaacgaaacatacatggtagtaaatctaaatcctggtaaaatatttccaacataatgtactccggaattcgaaggaagtgaccaaaaacaatttgcgaaaagattttcaattgggttggggttagaatagttttaatatcgttaatgactggataataaccagaagttattactttagaatgataatgttgggatcgtctatatttacatgtgcaatcctggattaataatatgcatattcatttcaaaacaactgaaaaacaacacgaaaacaactagaaaaataaaaaaaaaaattgaaaattaagaaaaaaaagtccacaaacctcaacaacaatatcagtagaaggcttcaaacccagattcagaagggatattcacaataggggtattcttttttccctaaagaaaaacataaagaaaaaaaggagaagaatacaactgttatagaacgtataaatcaactcaaaagaacaaaacatacaaaatataaatttaaaaaagaacactattatattacaaataaaaaaatcaaaacacaacaacatgcaaattataaaaaaagaacacataaatcctaaaaaaatataaaaacaaacgactcaccttgacaactttagctaattgaatgaactcatcgtcaagttcaaaattagaattagactcctcctcaatagttcgatgacatttagaaactctcttagaaggagaatgaacatctaacttgcgtttggaaggagtaggggaagaacgacttggaggattgtctttcaatttcagcttccacattgtagattggggtaacttagatttacgggtgttttgggttttcttaactacagggaggatgaagacttagaccgtgtgacaatcatggaaaagaaaactgaaacggaaatttataggagaaaatgcacaacgatcagtagggaaaaaattagaggaaaaatgggtttcaaataaaaaatgaaaactgatcaaaactctactactaagaaaattgctcaaaaccaaccacactcatacatatttaaatttcaaaaactaaaaaaaaggaaaaatgaatgaagaagaaaaagggtacaacaatggcggttatttataatatgaaaagtttttttttttattttatttgttatttttcttttaaaaaggagatctgccataaattgaccatcaacatcaaatgagcaacttttttaaaaaattaattaataaaaaaaaagccatgcaacgaaacatgtggtgttatggggcacaaaggaaatttcatactatttaaaaaagacagcataaaaccatataaaaccgtacagtatttttgtaaaattgttaggctacttttagcctatattttggattgactttatgttcgtttttcgttgttttaggacagatttatgggtgttttctaagtttttaggttcctcggagttacagaggtctcgggatgcaaaagtgcattaaaagatgagcggagccaagaaaaactcgatttttcttacttatgcatatctggctgcggcgaggtacactctagccgcggccatagtgaaattacagaagcagttttttagaggtacatctggccgcggcgagatacaccctcgccgcggctatataaaagttatagaagcaggatttttgatgtctatctggccgcggcgagctacagcttggccgcggcgagatcccgtacgacccaggggtaaaatt

SEQ ID NO: 123636 - DNA, 826 bp, Cannabis sativa
tgttttatgtctccaaaaacaaataaaaaaaaaataacaaatttcagagaagaagaaaaaaattgtctttataaagaaatatttatttttgttttaaattatattttcctcataaataagaatgtaacatacagttgatttactaagttctaaaatatttttgtatcatatgtattagatttttaaattactatattttacattaaaatattaattgtatatataattttttaaaaatatatataaatatgtgtgaattggattggatcggttacttttatgtgaatcaatatccaatctgtacaagcgcgaattttagattttctaatccaattcaatttgcacagggacgaatatttgtactttgcagactgaattggattggatcatgcgaagtggattaaattttatattttatgaacacccctaggtgaaatgtatttaatttatctctatttatcaactatcatctaccgcgctacttgtttcacgatgaaattaaatagaatgtgaaaaattgtatttttgtatatgttaataaatttcgttaataatagtaaaaaaatacaactacaaagatctacaataacatattgaaaacttattagtgctgaacacagatttgcaattacaaaacataaataatagtgtagaatataaaaacctgacattagagaattatatgtagtatcagtgttctttcaaatattcctagtccacggggccacactcaaagaacgaaatcaattagtaaaatctcaaacaattacaaatacaattgacttaaacaagtttagactccttgtaaaactttactgcaatcctt

SEQ ID NO: 123637 - DNA, 1045 bp, Cannabis sativa
  modified_base (205)..(207): a, c, t, g, unknown or other
actgttgttttataaaaacacaatatttttaaaaaaatttccgtgtgacagtatttttgtaaaagttaaacccaaattttagtatttttgtacgtttctctaatggggtttttacaaaagtattattttggacaaaaatttataattttactgtcacacggaattttttacaaaaataatatctttttataaaacaaccgtaaannnacaaaacagaacaattaaaacaattaaaaaaaaaaccgtgaaacaacagtaaaaacttaatacaatacacagtattttataaaaaaaaaatatagtatttgtgaaaaaaaaaaatttacaccacaacaaaaaagaaaaaaaatcagaaatttcagggtaaaaattcctataaaaattgatgatagatataattgcaatttttgaaaatgtatggctagcttgcttaactagctagctcccacagatatttttttcctaattatattgaattgctgttcgttcaaccccactatattgatgtaattaaatattctatcctgcatactaaaaaaaaattattcgcatagtggcaatggtgttgagcatcattgctatagagcaatcctctatcattttcattaaagtggttcctttcaaagtgaagggcacgctaaattcaaagtaaaataccagtgcaaaattagttgcaagcaaaacataaattaggggtgattattttatctaattcccactatttattgttctagcacatctgattatgctttgcgaattttatattttggatctaatctaatctttttattttggattgattactttttaatattgaattatttaatatttatcattttttttcacataattaactacaaaataaaacaaattatggttgttttatatcttcaacaacaaattaaaataaaaaaaaaaaatcaaaacaagaagaaaaaaatttaaattatacgtataaaaaatatttaattttattttagattgtatttttcttataaataagaataaacaaaaatcttacaaataagaataaaatatatatttg

SEQ ID NO: 123638 - DNA, 1125 bp, Cannabis sativa
atcaaactccaaggtttctaatctcaatgttaaaatggttggccagatatcaaatgacacttgtactcttaccgaacttaactaatttaaccaactgtcagttatgacagttggtgttcgggtactttgccacaacgttgcaacttcagtatttaaagggccattctatctactacatagactaatcttggagaatatagaaaaacagagagtgaaagggagttcaggtgtgattgaaagagagagagtgaggtgcattgagtgtttgtaattggagtaacacattgtctttgttcactgccattcgagacagtagattactgaagctttgcttccaagtttttgtgtaatttatacatgtgttatctctctttattcaagctcaatcaataaaactctcacagtcattgttgaggttgtttctggccgaggatgtaggcaaggtaatgatacattatcttgttcgaacctcgtaaaatcattttgtgatctttatgttttaatgctcatgttttctggtttaaacatgactgcatagttgtgattattgtcattgttggtttcattgatctttcttgttctatatatgttcttgccgaggtgttgtttcacaacactcaagttctctaaataattctacaacccatgcagagattcactcgagcaagaactcttctctctctcacttgctacaagtcgagttcttgatctttaagacaaactcacaactcttctctctcttacttgctacccttacaaaatctctcaatgtgtttttcaaatcccaaccctaactccaaatcttttaaaggcagtttggcacaatttttaaaaaagttaaataaaattgtatttagtaagaagctaaaaaataattttttgaagaatttataaggaagttacaattaaaaattgaaatcggtacaacctaatttcttaaaaaaaattaattaaaaaactataataaatttatttatacttaaactatattttcttatttattatatattaaaaaaaataaaaatatttaaaataaataaattgtaataaactaaataataattaaaattaaatctcttactctttataaaaaaaaaatattttatatttttattttaatattaa

SEQ ID NO: 123639 - DNA, 1392 bp, Cannabis sativa
tctctctctctctctctataatgggtaagttgtgttttaagcattttgttagacattagtaatagtatgtagttagttttcgttatacgtgtgtggtatttgttagaactagtatttttgatctgaaatggtagatctggtttttttgtcaaaatcgaggttttccagagtttatcgatagttagtcaatagaatatcgatgcaatgccgataatatgcgaaggaaggtaagagatgaccattatcgacatgatatcgacagtttgttgatatcaggtcgataactaaagtaatttaaataaaataattgttattgatagtatatcgacatattgtcgattaaatttgaaaatatgttttggccaattgtttttggcaatttatcagtattttatcgacatgttatcgacaatacacttaattaatttaaatcgttgtcgatatttaggaatatttcctggtatttatgtttttcaacaatttatcgggagaatgttgatagattatcaacgttaagataaaaagattgagaacttttaaacagtaaacaggaaacaagtgaaattttttaaacataattaaagactaaaaaaaatattaaaactaaccactaaacaatcataacaaaacaatttaaaagtctttactgtatcggtgagacttgtaatacgggcataaagatccaggtttgaccgatttgtcatcaaaataaactaatctgtaatgacgacaccctttggggaacctaggtggtggatatggatatttcagccactcatcattcattgactgcgtaggaacctccattcgttcactagcctttcattttcaaaacgtttaaaagcttctatatattcttacatttctgaagtaattttgtcactagtttcctgtttgatctcttcactagacagaagtttctgtttggtctttttactagacatttcgaacttataagagaagaacactctatggttaaagaataagaaaatatgtaacttatgaagtagaaatttatttttatagagcagaatagttgttaggaaggtaggaaaaattaattagcatgaaatatctaattgtacacgtgtatggcatacaatgtgtatttattgatataatgtcgatacattatcgataagttgtcaataatttgtggatatgagaaagttgaggccacactttatcgatattatgtcgatgatttgtcgacagcttgttaattgcctcgacaaatagaacagaagttgaaaatgtgagaaaaactaattagcattaaatgtcccattgtacacgtgtatgtcatacaatgtgcgtttattaatattatgtcgatagttttatttagaactatgataaaatctatcaagaactatgatattttatttagca

SEQ ID NO: 123640 - DNA, 1672 bp, Cannabis sativa
gcatctggggacccaatagaatcatggcttcatggtttactttgcttggatgctacaaattctgttcctaaacttagtgggtaaggataagtcttttaaagcctctaggaggttaaaactactttcacttgactaattcacaacttcctttttgctactaggttacctcatccaagtaagtgtgagctctattatgttaaccgtgatacacttttttctttccataaagagagcgagttattcttgcaggtaaaagtttatttctcttcattgcttctgtcacacacacacaaaaaaaaaatacaaatcattttataaatggtgcttttaaattgtttgtgtgtgtgtgtgtgtggggttggggggttgttgaatatttgttgcttatgtgatgcaatatctacagcggatgatggccttgtatgtttcctcgcactacaaaaactctccaaatgacttgcagcttatggcagatgctccagctcaccacttgtttgtattgcttggtatattttatttctttgggaaatgctttttcttgcatgcaaactttttcttacatcatttatattgtggctagacttttactaatttgacatgtaggccctgttgatgagtcgaaaaatcaacttcctgatatattgtgcgtcattcaggttagcatgtttctcttgtacactatagcattattttttagttcttaatatttcaattcactattgctcatgaatcttcaggaaattgcttgtgtgattttcttattaaattaccctagttgtaaatctttttccgctaaagtaaatttgatgccacttctttttatctctctttttttttccaacttgacagctcattgacaatttatatatcttttttttagtatttaacatgtttttataataaatatgtctcttttgtttttataagaactatcattggtatctactatttgtgtatactccaaactcattcataagtaatgtattatccttcctaagttattataaatattaattaaaattgtaagagttacttaagtttatggttatattgagtaagtttaaaatttaatatatttattacattaatactgaattttgaacgaaaatatttttcccccaaaacttaacattataacttaaataaacatttattagtatacaaatctatatacaacctcttagtacaacatatcatcgcgtaatgtaggatagtagggcataacctaatacagttcaatccaacctaagttatagtcttaccaatcctttctgttccatgagcggtatacttgccaagtttgtgggtgatttaaatttgttattgaataattagcaatttggttccttgaactttcgacaatattgattttggtctttaaaatatacggcttgttaagaatccccttgaacttttacacatacaaaaatttagtccttctgttaggttccgtctcattattctgtttaaatgctgacgtgtctttttaaattagtaactttgctccttaaattttgacaactatcaaattgtaccccttcagaataaaaatgaaaaaaattcaacattttttttttcagtaagtctcaaaaaattaacgtagatcttaagaaaatgttattttgaatgattaagaaaattaaaaaataaattaaattttaattaattttta

SEQ ID NO: 123641 - DNA, 1014 bp, Cannabis sativa
  modified_base (52)..(56): a, c, t, g, unknown or other
atgcaacataaaagcaatttctgatcttatattaattagtaaatctcattannnnnaaataggttttatttacggcacaaaacccaacagtggtttgacagactaaaatctacactcttgagctggagatttattagttcaaaagtttactcttcattgttcttctacgggtctgatacacttgctattctcgtattaatttgcgttgatgatataatcattacaatcgataatatagaatagctattcacatcaaaattgaatcagaattttgatcttaaaggttcttgcactatttcttaagaattgacgttcaccgtgattacatgggaatgtatctaaattagtccaaatgtatagaggagttgctcaaaagaattaagatgctacacttaaaatctaatccaagtcccatgacagttgggaagatgatatcactctaatccaacagagtatcgaggtattattggaggcctagaataaactatattatcattattattgcttttttttgttgagtccctgtgactcatgggtgctatgtggtgcaggtaaaggcaaggaaaagttagagttgccatgacataactgtcttctctagcaatgtacatattgaccccatcggcctgcatgttgagttgctatcaatttttttgggctttatctattgtgtattttggtttttatatttttgaggtgtcgtcgtatacagttctttcataaaactttttataacagggatactcggaacacactttttatgctgttataatgtccgtttttagtggtatattttagtcaagtttttaatattatcacggtcttttataattaattaacctattagtattaaactagtttataaaatcacacatgtggcgtccccatggccagccctgggcataggcgggttaggcctgcgcctatggtccactgattttaggggcctaaatcaaaaaattgccttttaaaaaatatacatattttttgtaataatttttaaaaatactattt

SEQ ID NO: 123642 - DNA, 2758 bp, Cannabis sativa
tcatagaggatccataagcaagatactatctcaaacttgagaatagaaatctgaaagtcccattaggaaagatattatgtattccatgtgatagtgttcttgaagcttcttgacaccaccacaaatacatccattgtaggtacacgtgggtttgtaattaaatagttcttcccaatttgtttttaatttggtaaagtacacgctcacaatttgtgtttcttatttcagattcatcaaattctttcttaaattgtagatatgtggcccattcctttgatgaaaccgaaccttaagatcgatccatatcgcagctgttgtttcatcatacataatactagaaaaaaattccttaaaaacaaaactcagtatccaagaaatcacgatattgttgttcgtcatttagacattatacatgatatggttagaaggtgaaggtttagaaatagagctatcaagaagtcttaatttgtctttaacagaatagcaaatagcaagttgcattgctctactttaggataaatagttatcttgaccaataagtggctaagaggctagagtattaccaagattatctgcatgatggagataatatagatttgtgggattttcaagtagatttctggtatgattcacctatgaattttggaaattatctattgtagctgtcacagatcttattccagcttgagatgtagcttgaattgattgatcatcagtagatatggttgaaaatcaagtgatgaagaacaaagaatcaagaaaagaggaatcaattgaagaataagaactgaagcagagatcgaagaggaaaggtcttcacagagaagaaatttgagccctaagattgatgaccgcaacttcgccgaagagatcatcacgacaaagatagaggaacaagattagaaggagagcttaactttcctactctgataccatattgcggaaatgagaaattgagaatcaaagaattaagagaaaattgtattaaaaaaattctaactgagtacaagagatggtgctaagcaacttatataagtagggatgtaaacggggcatggcgggggcatggattgctcccccaccccatacctgcttcttaaattcacccccatacctgctcaatatccatttaaattaaagtggggatggggcagggattacccgaaagggaaatgattcccatcaagtacctattacatatatatttgtgaaaaaaaaatgatgtctcaaatagaagtaaaaataacattaaaacacataaaaataaacataagtagaataatatgtataataaatggagttagtaaatacaaaattggtaatcgaaaataagtggttaagtgttattttatttaaagcagttaagtgtgattattaatatgtatcacgatagatcgatattttcatgaacactgaaatgtctcattaatataatcaataaaagagctaaaatatgaaattattttaattgtaatatttaagatattaaaacttaaatatatacatatatatcatatcgagacgggtatctattctcccgttctgccccgaacccgactcaggtatgaacatttaaactcatacctgtccttgtccccaaatttcgacccctgccctgcctccttctattagaagcgggtacccacaggtaatagtcaatcctaaaaaaaacattaaaactcttaagtggaatgatatgtccttatacatgcaaaatctcttaagtcaacaagaggcacggttgtgacactaatgtttagaagaattaacgtcacaatgtatataattttgaataaaattattgtataatttattatttctttatttataagttttttttttttttgaataagaacattttaattgaaaattaataagagaataagttctaataattatttagtttcataattttgaatgaagagttgttaaagtgagtgaaacttaccacttttatcaaattgggaaagaaaagaaagttgcgttccgtatagcaattgactttcttttagaaaacaatttgccaaatgtttggtccttttttttttgatggccgattccttaattttggatttgtagcttagtttttaatcattatactttatacccatcaaatgccaacgttgtaaacgtggcaattaataatttatgttgattgcaaaataactaaataatttattcaacttcaacttgaaaaaaatttgtagtagactttttttttttttttctttttgagaaaaggctgttattataaattagaaagagtcatttacaacaacagagagaataacagagggaatttcctcatgccaaatacaaatattatcctgtactaaagcctgttttgttaattcatgagccgcttgattagtagttcgtcaaacatgacgaacacaaacttgagggagattggataaatgttgtttaatatctatgactaaatcgctaaaataggacttagaagatgttggattattcaccgcatttgcaagtaaatgaaattcaaacgcaaattgagatcttgggccattagtaaaccattgaacatcgccttagcctccatttcttgaggactataacaaccaaatgctggttttgacatagcagccactacacatcctaaagagtcacgaacaatagatccaaatccaattgagtaaatttaagaatagtgatgaattgaatatctctactcaagaacgagaggcagagtaaatttcattatatagccactagggcaaaaaaggagaatacaatt

SEQ ID NO: 123643 - DNA, 917 bp, Cannabis sativa
tttttttttttttttttacaaaaagtgatacaaattaaaataatatatcaattgataactattacttatatgaataaacaatcctaatgaatttgaagaaaaaaaataaatctttggtaaatatgaatacatcaattgataactattacctataagaataaacaatccgaatgaatataaagaaagaaaataaacctttagtaagtataagtgagattattttaagagattaattctcaatatatgtatatgtttacaatttttacacgtaagttgtaacaaatacgaaaaaaaaatatataagtattaatgatttgattatgtctatcaacacaaaataattctttttacaattattctcacctaacaccaaagcttagacattcattctcgatgaaaacaaaaagcaaagacacaaattaaatgattgatcaagggttgaaatttatactatttacttaaaataagcaaagctcaataatctatactacatgtctaagtaaagcatattatatatatagatgaataatggagagattaatataagatactacagttagagaaccaaagtatgtagccaattggagcaacgacaaaactgttaatcccttcaaccccaatcttatattgtctggaactctacttgggcaattagagtgaattttttttcttcaatcagttgatatcgtccataattaaaaaatatttgtatgagagaatgtatatattaatatatttatggtttatacgatataagtatgaatctacaaaataatttaaaatagttatacaatatagattttatagataaatagatatatagaagagattttaatggttatatttttattgtaactatcatggttacatttttttaagtcattggattactattaaatggttgtgattaatttgaa

SEQ ID NO: 123644 - DNA, 1696 bp, Cannabis sativa
ttttttttttttttttctaattacttttagagtttttgtttaaaataaataatataaatacatatacatacatatatttttatgatttgatttttaaaataaatttttgaatattttaaattaaataaacattagattagagttttgtttaaattaaataatataataactttcacggttttattttttaaaaaataattttaaatttaataaatatgttttttttaaaaaattatttaattatatgtgtgtggcactaaattgacactgccacctaagctccaaaaatgccatataagaaaaataatttgagagatttcttaccaattaaaaatgtttagggggcaagattcgaatgtggtcatatatttattttattttatttttttttacttagcattaattaagtacagcatgccgcgtaaaaaaaaaaaaaaattaagtacagcatgcatcattatatgaaaactttcactataattctcctcaaagaaattgtaataagcatataattaaataggtatcactttattatatctgtagaaaaagtatccatgtatattagtatatttataagagaaatgctaaaataaacaccgttaatattactattggtttaatttaatataaagtcccatataatttaatataataacttttaagaagtatttctaacaaaaacactaaagggagatcagaacatcatttacagaagtaaaaacaacaggttccactaccctcaaagaaagaaataaccaaaacgatccaaacatatataacttagatactaattaatattacaaatataataacttgaataattagccgatatatatgacttataaatatatgatcttgttgttcttcttcagatggatttgacttgagtatcccaatctcattacactgccatacaattggtgtacagacctttttataggcctacacctctctctgtctctgtccttttcactcctatcatttcatacgggtcttattcacaactctaatcaccactacatattgcttctttacactaacctatatacttacctcatatgtaatttcgagtactactttacaatattctaatttatgtacatactactcaatctaaaatattttgagaaaagtaattttaaaaaaaaaaaaatcatttaatacagttataaaatttattagttgtatataataatatttaagtatgcatgtattatggacgtagaactctagatagtgctaagattttctttctcaagattttgttcatttctttttacaaaacccaataattttaaaagtgtttttttaataaaaaaataatttttttatattttaaaaaaaatatatattttttttttacaaaatgatgtaacaaaagttaattagtaattaccaactatttctcatattttttgtgatttaattaaatgatatacaagaagtcagaggcttgttgtggtcagcccctgattcaatttatttattttgttttataaaatatgtaaatgtttttaatttcttataaaagagttaggattcccttctctaaaaattataaaattagaattaagccacttctataattatgatttcatccctcttctatatatattattgaaatggagaagtggtatgtatttgatcttcctattatttttctattaggtactaaccagtggcggacccagaattt

SEQ ID NO: 123645 - DNA, 930 bp, Cannabis sativa
gctagttagggtgttacactttgagttcttgaactcaaacttgttcaaccacacgattaaataataacaacatcacaattaggtctaaatctttaatggaatatagcccaattaacagaaactaaaaccaaatcaaaaatcacaaagtgccacaattactcaaaaattcaagcttgaacttcaaagcttcaaaccttcagcttaaaactcagaaatccaagcttaaactccaaagaatccacctcaatttcaatagccttaaatcccaattaacaacccaaaactcatgcaaaataatctaaaggaaaaccacaaaattgaagcttttacaacacacaaattcatcaaaatgaactcattcattcaacatacaattaaaacacaaatcatggcatttcacacatattttcatttcagcaacaaaattcagtaacaaaagatgaaaaccctccaaattaacaagagcagttgctaactcctttagacaattttgactaaaaaaattaaacaagcaaacaacatcacaacaaaattaaatctaagtagcgcctatctatctttggttttggttgatcaagtgaatataattataggaatatgaacatcatatgtctacatatacatacaattaatacaaactgattaaataatagttaatagtatttatagataatatatttgtttgtttttctatttacacatatttgattaagtttccattggaattaattacaccaaaagagaaagacaaaaaaaaaaaagaatttgaagctcagaagtgctttatttcaaccaaattatgataattgtgatggacccctccaacacagaagcacaaatatcatcatagcttagtatttgcaccagccgggaatcgaacccgggtctgtaccgtggcagggtactattctaccactagaccactggtgc

SEQ ID NO: 123646 - DNA, 685 bp, Cannabis sativa
ttttttttttttttgcaaaaaatggagacttttttctatataagtatttataccgtaggtccttgtgttatataaatttgaacaaattcttcaatttttttaacaaattgatccttacttttagtttctttgcaatactaagtctccactattaaatacttatatagaaaaaagtctccattttttgagaagactccactattaaataatggtagttgtgttgatttttattatatattttttcattctttattttatttactttgtcattttaattttttttaataatttttttaaaaaaaaaaataacagatataaaaataaaacaaaataaaaaaaattgcataaaccaaaaaaatatacacataaaaaagtatttttttttttttacaaagtgactaagtaaatacatttctgtaatatttgatttttctttttgaaattgagggagtagaaattcaaatttagacattctttgtgagagttgtgaaactattatgaccactctctttagttaagatttgtctttaacttatactcactttagtcatgtaatttgttttaagaaaattctgtattcaatccaatctaattgaatcgaactgatataatacaatctaattacaaaaaaatagatatctaattacaattggattagattggatgctaaaaattgaattctaat

SEQ ID NO: 123647 - DNA, 1646 bp, Cannabis sativa
aagtagtgagatttgggtgatgaaaataataaaaggaacaattttagggcaaggtattagctagcttaggagcttaaaaaaaaaaagtttgaaaaatgaaaactattatgatgcatttgatgtctcacggggtatttatatatagaatgtaaaaataattcaatattccaattttatataatttaaatttaaaattttaattaaattgatatttatgtgaactctatagattaggattaggattcggtgttggattagaaataggtgatattattataataatatatattaaggaatttaatttttaataatataaaataaattttctaagtaactaatatctattatatatattgtacttagaataaattattttattatatataaagccaaataaaaacattacgtatatataatcattttccgattcttttaaaatttaaataaaagaaagtaagtaaaactaacgttttaaaaatatgtacaagtttttattgcagaaaacgtgtgagattgtgtgatattcacgaaaaaaaattaattttaaaaaaaataaatattattttagactctaaatttctgttttgtgaaatgataaaatagagtctgtattttctaaaatagtataaatagaagtctgatttttttcaaaataaaatttaataataatgtaacctaaatgtgttataaaaaaaactggttaaattttctacatatgttcgtgaaaaaaattatcgaaaattgagttcaagatcctatttgtactattttaaaaaaaaaatacaaggtctattttattatttaacataatagagaatccaatctataactttacaaaacacaaagtctaaaatgatatttactcttgaaaaaataaaactgtttgatattcaggaaaatgtaaaaataaagaaaaaaaataaactttttaaaaataattataatcttcaattgaaactttaaacttcatgagcagcctaaacattgttaatgttattggatgattaaatctttaatgtgacttatatgtataagtgtgtattgctatttgaagtttgatctaaataaagtgatcattttagtaattgtgggtcatatgtattagggtcagtttggtacagctgtgctgtgggaaaaaacagttgtaactgtactgtgagaaaaagcaactgcagcataactgtaaaaaaaattaagctgagtgtttggtaaattataaatttcaaagtactgtgagttgctaagatctattatataatgataatagtaatgttataatctaatttattataatcatgaatatgtaaaagcttattttatataacatttttattttttttatatatttttaatttttttcaaactataaatttatatgcatttgatcaaaataatttatagtattttatattatattttatcaaatgtgaaaaaaattaaaaactcaagtatataagaaaactctaagttgatgtggtttgttaatattaaaataaaatataaaatatttttaaaataaaaaataagagatttaattattatttatttattgtaattaattttttaatatataatatataataaataaataaataaatatagttttagtacaaataaatttattagtcttttaatcaaaacaactt

SEQ ID NO: 123648 - DNA, 3485 bp, Cannabis sativa
tgaaaaaaaaaaaaaaacactatagcgtgccttagcattagggcgttacaatactatagtcctccctcttcatcatctaatgattatggtaacttttcttaagtggaaatttatttcccatttttccctttatctattttttaaataagtattgatgcatctctttgtctcgcagatataaatttagaggatcttctccattcttcaagcaagaaggggaaaaagagtactgctaccttgaaaacttcttctgatgtcaacgtggaacccctcaagaggtctaggaagacgactgcaaataagaagcgtgcctcgctgactatagacctcaagactcttgaagtccaaatttaggttcacactccagccattccacctatcgaggagtcagtctcagaagttcaccaggccactgcttctttgagcaaggcacctgagactttccccaacgaggctaggagcactgattcacagtattgtgcgcagttttctgcatcctactggcgccatttccgatccttttagtgtagcgactgggatttggtcaacaatggtagcccaacagagatgctcgacaggagaattaccttcagtctcttggctaatgtccttcttcttttctttgttttttaacatttctttcaagaacctaaaagaattcatatgcattttttttgtaggccaccttcttatcccacatcgcccaaagtcgagttctccacaaagtaaagcaattggaagctgagcttcgcaaaattattgagcaacgcgagactgttgctaaagaatggaacgatgctcagaaggagatttcctgtctgaacaaggaggctgaggagagaagcaagactcataagattgaactcgaggcagcccaaaaggaggccaaggacaaattcttggcatgctagaaactccaagaggaacttaacgcagccaacgcgaagctcgagggcactgaggccaatgccaaagaacgatgcaacgctgttgccaagcattcaatttaccgagcttggatggcaaatcctgagatggatttaagtttcttgggggagggtgtcgaggaagtcttatcttactgcgagaaggctaagaaagaagaagaagaagaagcagttgagaccgaggaagaagaagatccatccaagtctcctacgatgtaggcttggtttttgactctccctttttttatttatttaagaaaatagccttttggccgagacaatggtttgtcccttgtggcaattttaaagacaaatttgcattgttggatggccaactttgcttttatttttttattgcctcacatctttatatttgaacttaatacgtttgcttatttgtgtttttattcacaacttaaacaattatatttcgatcaaacttaagatactttaagtaagcatttccattgatcttgttcttcctttgaaattgcttaagtagttattaatctactatgtatgtatgcgagtagttatattctactatgctttctatttgtgagcagttcttatcagttctactttacgtgagcagttataatttgccgtttataacttagtaagcaaactgaaatatactttgaataattcattttatgaattactttgcacaattttttattacctatatgaatagttaggccttctattcatattttaggttaagtattgtcttttcaaggcatctcgatgcctcgattataatacatgcctacataatatgagctgttagatattcagcctctcatgtagcttaatgttgtttttatgagttaaatctcatttacaactgctacttcaattttcctttctaacgagaaatgttcaatttttgactttacattgtgcatagacaactttaatcaattatttggaatttttttttttaagtggagtggatttgcaatatatcatgtatttctagataattccagttgatcatacacacatatatgcccctcaagtaattttaaagagtaaaactttgtaattacttgaataatacttcaactttattgataataaaaatttacatcacaaagagaaaatacagcaattacataagtttactggtaataaggtcgcaaatgttcaatattccagtggttctttattagtgagctgttaagcccagctaatttataaaccctagttccaactattgctttgataacataaggaccctcccagtttgggttaaacactccaatagatgcatctctcgtgtttgcaaatactcatcttaacaccaaatctccgacattgaagagccttttcttcactcttttgttgaagtatctcgtgatttgatgttgatatgtcgcattagtggtttgcaattcagtacatttttcttcaagtagatccaaggataatttaaggagtttttggttttcttcttgattatagaaatctcatctacgggtcgcaatattaacttttactgacagcatcacttctgagccaaatgtcaacaagaatggagtgtgccctgttgttctgtatctcccttttgcagcatccaacttctttttaatagtatcttttaaggttttattaacaacttctacttgtccatttgcttgaggccttgaaactgatgagaaacttttaataattttgttcctttcacataactcagtgaataactcaccatcaaactgggttccattgttagatactattttaatgggtattccaaatctgcaaactatgttcttgacgacaaaatcaagagctttcttgcaagttatggaaactagaggttcagcctctgtccacttcgtgaagaagtcgactaccactactgcgtactttgctcatccttgctctgtgggcaatgccccaatcaagttgattccccatatttcaaatgggtatggtgaggtcatcattctcaattctattagtggtatgcgaggtatatgtgaaaatcttagacatccatcgcacctcttgataaattcatgtgtgtctttatttatcgttggccaataatatccttgatggattatcttccttgataagctttgccaacctgcatagtctccacaaaagcctttgtgaatttccttgattacctcacttgcttttatggggagcacacaccgtaggagaggcattgaataacccctcctatataatttgccttctactatcgtgtagcgaggtattgaatacaggagtttccgtgcttcgtttttgtctgcaggaagttgtccattgagtagatagttaacaatgggcatcatccatgtgggcgaggcatctatcatttcaacttcctccttttcacatatattaggttcatttagaactttgattggtaccaaattcaatttatcaagctcattttgcaacgccattttgctaaggcgtcgaaatttgagttatgttctcttggaatttattcaattttaaagtaatcaaatgtgacagtcaatagtcccgtgatctgtaagaggaaataccgggtaa

SEQ ID NO: 123649 - DNA, 1194 bp, Cannabis sativa
aatataaatatttcataatttaatctgatagttaaatatactaataaaataataaaaatgatataaatgtaaataaaaaagtagtacatttattgtggtttaaaatttgttgtgtgccaaatttacatcactttttggcacaccattggatcacactttttgttaaatgagctatattttagcttttcaccatttattcacacctctattggagatactctaaaaatactccaatgtatagtactcttcaaaaatactataattataatcttatacattattattcaatatatatcttaatttttagttacaataactttttagttttgattttttattaaaaaaaataaatagcatcaatgctactgcataacatttatgtaaatttctagaatgacatcatttttctccaatggtataatatctcaaaattttgtcatatgatatgtccagctcagcaaatatccttaaaattttatcattggagatgctttaatatatctttaacatttctttcttatgtcatcttaaattagtaatagtgaccaagtttgatactctttcttcataaaataaatactaaataattttatagtgcacttccaataaatagtgtatcgatgacctttttttcatctttgcacttgttaagatattgcacattaatagagaaaattaaaatgtattacaactctactataaaatataatacaaaaataatataagaaattgattaaatagatgttacaacacacatatattgtatataaaaatagtagaagagaagatacacaaaatctattatatagcactaatataataaaagaagaatatatatgtatatactcacttacaatgcgtagattagtgggaatgagcatgacttgaacaatgtataattatcacatttgttcaaaaacttatttctcctatttctaaggctttaagggagttactctaagaaataagtttgagaattatcaagccttaaaattttctagcaaaatattcttttgattgaaaacttcatcataatttaaacaccttagacctctttatacagtgtttaagatatcaatattttaaccacttaaggttagttcaagaggccataggtaggtgtgtgagtgttagaggtcctgggttcgagtccaggtaaaacatgattgtaatatataaacgcttaaatagaaa

SEQ ID NO: 123650 - DNA, 783 bp, Cannabis sativa
ttacaaaatacttgcccgaggaagatgagataataacattaatagataaagaaaaaaatgagtttaaaactaactacatggctaagaagaggggtacactatatggtggatggaaagaatttgcaattgctcataatttagaggatggggatattctcatctttcggttaatacgccctttggtttttgaggtgattattattattattagtgtaatttaatatcaaattttatttatcgtattttatttaaaatgtgtgaagttcgagattaattaaatatagtacttgtttgttttgaataattttttgtaggtattgattattagggtggatgctacaaaacaatggggttatgattagctttattaactttggaaagtcagtttaattaggtaatttaatttctgtctttgtattaatatataataatttacaacttgtttctatatatttatattgttttttgtatgaagatttgtgtagtggatattgtttatattaaatttatatagatagaaattaatcaaaataagtgaagctaggaacacactcatttatttatttattttaaatatatatacgttttatttatttatttatttatttttctaaataacacatgaaatttagggtaagaaagaatagtgaatcagaaattaatatatgaaatgttattattgaaagaaagaaaagaagttgtttagaacttttttcttttttgcaaaatttgatgtgaattaatttaatgttgtttataaaatgatttattattattattatt

SEQ ID NO: 123651 - DNA, 1641 bp, Cannabis sativa
tcttaactaacaaaaataacagaatacatttattggttaacatcccccctcaaacaaaaaggggtagcagccatttgaagtttgctcttaagatataaaaaccaatcagtggaaagagccttagtaagagcatcggcaatctgatccacagcagggacataccgaatagagagttcgtttgcaatgacttgatcacggacaaagtgttgatcgatctcaatatgctttgagcgagcatggaacacgggattggcagccaaggcaggcagccgcactttggttgtcaacccaaataatgggaggttcagaaagtgagactttgagctcttgcaaaaggaaagttagccacttcaattcagctgctgtattagccaacgttcggaactcactttcggtgctggaccgggcaacaacctgttgcttctttgcggaccaagagaccaagtttccaccaagaaaaaccacatacccgcctgtagaccgcctgtcatcaaggcaactagcccagtcggcatcagagtaagcaaccaagtccattgtagctactggtcgaagaagcaatccatctgaaatcgtgcctttgagataccttaacagacgcttgcaagcctcccaatgaataacagtcggagcatgtataaactgactgagtttgttgattatgtatgcaacatcgggacgagtaagagtgagatattgtagagcaccaagtgtactacggtacaaagttacattaggaaacagttcaccagcagttaaagacaatttggaggtggaacttgttggattgggacaatttttagcaccatcaagttgtaactttactaagagttcggctatatacttactctgagacaagtgcattccagcttgatctctatagatctcaatatcaagaaagaaatgaaccggccccaaatctttcaaagagaaacatgtgttgagatccatgataagcttggtgatgagttgattatttggtccagtaattagtatatcatcaacatatactaaaagaataaccaacatgtcttttgaaccataggtaaagagggaagtgtctgaccgagatgcttgaatccccattgtagcagtgtgtgtctcaacttttcactccatgcccttggagcctgtttcaatccgtacaacaccttgtgaagatggcaaatatgagtgggtttaaagggatcttcaaatcctctaggttgtgtcatgtagacagtctcatgtaaatctccatttaagaaggcattactaacatccagctgctttacttcccaattggaggtgacagcaagcgatagaacaatgcgaactgtgactggcttcacaacaggactaaacatttcagcatagtcaattcctggagtttgcaaatatcccttagcaacaagacgagatttgaacttgtccaatgttccatcagcattgagttttattcgatgaacccatttgttgtcaatgatttgcatgtgaggttgataaggaaccaatgtctaggtgcgggctttctttaaagcatcaacctcattattcattgctgtaggaaatcaagctagcaattagttgtaaatttacatttaatgtattttccatttactctagtattactaggtgttcacattgtattatatataccct

SEQ ID NO: 123652 - DNA, 1242 bp, Cannabis sativa
  modified_base (38)..(39): a, c, t, g, unknown or other
aggttgttaatccaacatacatgatagtaaatagatcnnggtaaaataatttccaacattgctcttgtttcttggggattcctaccaatttttaacctcatagctaggttattagtcataagtatttctaatttagccttaataaaatagaaatatcacttgaggtatctacacatttagcccatgacattttaatactcatgacccacaattactaaaataatcactttattttggtcaaatttcaaatagcagtacactaattcatttgagcccgtattgagaattttaatccaacaatctccaacttgggctacattttctgatagtgtataaccttataagcgcttaattattgctatcataactataggtgtttcaaaataatctcatctattgattatactaacataggatcaaagcggctttcgccatatttagcgtagataagcccagcaatggtcacatatatcaatataactaaatgaaatagatcaatcatggatgcatagcatggaaattacatgcaaatgtgatcttagcgtacctatttctaaatggttcctccttaattgagatcaatcctttattaattctttctaactttatacttaaaccgcagtagaaagtaaacattcagagtactcaaaacttaagtccatactttatctgcagaattaaactataaatatatatatcagcttgatagaatatttaaaatacaaactctcactaaaccaatacaatcttaaataatactacatccatatatgagcaacaagctcctgaaaagccttaagtagtatatccttaatgatccaagttcgaaaacatagagtttgtcggtatatgttctataaataccttattactcttaacttcattttataaataacaattagttcaaagtcaatgtggtattgaccttgcagagcttatgtattgttactaaaatgtaacctgattgatttattatcacaacatatatctttattatttttcaatgccattcctaattttgcagccatatgtgacaaaaatctcacaacaaaaatctttataagatcggaatcagaaatcttaatgatatccaaaattttctatttagtgaacatgtgtcttttgttctccataaattccttataacccatttggttgcataccaaaaattccatatagggttactgtaaagcccgcttagttaatttgaaaattagcagttatttatgttaatcatgaaat

SEQ ID NO: 123653 - DNA, 796 bp, Cannabis sativa
aaaaaaaaccttacaatttaaaacttgtaatcaaatggagtttacaaatcttattttcacgttttattctcctataaaatgttacttttggcaaatgaataattaaactatttattcatttaaattgccaaataaattgtcttttatttttgtttacattaaattatttataaattatataacataacattcaaattattttaatcttaatttaatgtttttatacgacaatcacaatgtacatcataattatgaaatacatactgtaatattttgaaaaaatttaaactgtatctttcaataatagacatgtataaaataaaaaatggtaacaaattgcttaaactttaaagttgccgcattaaattttaaaatttttaaaaaatttatgaaatatcttcatacaatatacaccatcatataaatattattacaattaaacctatctaaatatccaaaagataaaagaattttgtatgtaacgaaaatttagttaaaatgggtcatatatgacaaaagaagaacatacaaagaaactattttgtctatatatatatatatatagatatatataggaatataattttgtctcgtgatgtacttttacggaatgtattccgtgatacattagatgagtctcagagtacattaaatgagtgtcagggtacgtttctactttttaactctaattactcctaaatcaatctcacggctgccgtacatcacgaattacaatccgtgaaagtacagcaacagaacaaaatcatatccttatatatatatattttaacaaagg

SEQ ID NO: 123654 - DNA, 1016 bp, Cannabis sativa
tcaacgctatgaatagtagcgttgaccgacgtaaatagtgtaatttgtagtagtgtgggcattgtcccttatgcttcttgtgtagggagtttaatgtattgtatggtttgcactaggcccgatctggcctatactttgagcatggttagtagatttatttctgatccagggaaggtgcactgagatgcaataaagtagattttgaggtatctaaaagggacagcaagagtaggactattgtacaagaataatgcagtgtttgacactaaaatttcatggtttgttgatttagattatgctggaagtattgacactagaaggtccataacacaatatttggtagatgcataagctggaagtcaatttgcaaaaggtggtggatttgtctaccacagaggcagaatacatggctgcaactgaagctattaaggaggcaatttggctgaaaggtttctcagaggaacttggtttcaaatcaaaagatatcacagtacattatgatagtcagagtgccatacacttaatgaagaacactatgtaccatgaaagatcaaaacatgtagacatgaagctacatttcattagagaggtcattgcaaggaaagaagttcatgctaagaagattagtattctaaggagaacccagcatatatgttgacaaagtatgttccacaaactaagtttagactctatctaaacttgctaaacattctcactagttgagtatgtcaagtccagaaatgctgcagcttaatggatcagttcatgatatatggccaaaggtggataattgttgtgttttattggcaaaatatcattctctacctattctacccctagctcaaccgacttaatcgaattatccaactgtcagttatgacagttggtgctcgagtcatgcctttataaggctcactttgaaaccagctcagtgataacacatcaagagaaatcagatcaagagtgagagattgaattcgtaattgttgtttagtaagaaaagagagagagagaga

SEQ ID NO: 123655 - DNA, 1174 bp, Cannabis sativa
aaatatatatatatattctatgctagtcttacctcatttttgaattcaagtgagccggtcgacttggatggaaaattatgcactgaacggaggccttatgtaacaatcacgtaaaatgagtaaacaactttctaaaacctttttggagatttaaacttgaaaataaaagttttcctatcgataaatagcatggcaaaaccctaaatatcgaggaaacacgagaaaatcagctaaatggggaaactgcctgaaaaacggtaggctgtttctatagaatcggcaagccatttttctaggtctgtgctagtaaaaactgtagaccgtttttgtaggaacgacctaccgtttttcactgcaaaaacacaaagagtttccaattcgactcaaaataatcataaactccacactaagctccagaacacctatacacatcattataagccatttccaagcaacaaaaccaacaataaactcaatatgaaaattttaccacttcaaacaagcttagaaaaaccctactaaactgcagaaaatacaacaacctaaaccctaactcgaacagcaacacatacatcacttgcatgctcaaaaactaaaacaaattatcaaagcttaaaggagcaagttctaggattcttctctttggattacactactcgaatattgctaaacaacctctgaattgatgaaagaaggctagatttttccactggtttggttgagccgaagaaagagagagaaaaggcaagaagtggatttagttttttgtctttttgtctttgtttttttatttaacttagataaatcaaactaacttaacttagtctactaattaaaataatggcctgctgccactaaaagggataagccacctatcctcaaaataataaattccaaattttacccttgatttaaagctgaaattattaaatggcttagggataaaatagtccaacaccttaatcctactacataaaaaggttctaagctaacccatatgactaaattgactatatccgtcgcatattctatcgtcaccgagtaaaaaatcataaaaattgtaaattttctatatgttatagataatacacatagagtttaataaaatttttagaattaagaaattacagctctaatgtccattttttgaaaatgggtcccataatattaataa

SEQ ID NO: 123656 - DNA, 3194 bp, Cannabis sativa
catctcagttctaattaccgagtccaaccaaattatgccttgaacgcataattcttaatctcaatatatatagcatggcatagcatttaaacattaacaaatactagagtaacaaccctagaccataaaccgctcactttagggtaataatcctagtcccagctcttaatcacaaaatattcaacataagcgccaccgcgtataactctacatgctaactactatcttacctgatgtctcgtaaacatggagattccaagtccccgggtgcttctgactaagtgtcagtaatcctagtcacaattttcaggattcacaaaatagggttaatccctaaatccacttccacataattataaaattggcattcaaatttcaaataaacacatagagctcagaacgagctttccaacgatacttggaacacccaaattgaagttcggatcaccaagctacgaatattcgaataacgtgttcgaaactgcccaaaaacaaggggcgggctgcggcactcccgcggcacctgggttgaaaacccagactttgaacaggggcaggccacgacacccaaagagtggggtcgcggcgcctaagtttcaaacccaggaaaccccaattttcaactagagaacatgagccaaaacacacctaactcacccaaatcatgcataaatctcaaaaccgtactttatagattaataagtagtaaaacagagcattagaaacatatttcacgcttaatcctcaaccgaacatacatcataaattcagattaacaacattcaatataggctccaaacattgagctaaacatcaacacatatcaagctcaaaatcttgaaccacaaaactaaaacacaagctcaagaataacaaaatattcagagctgcaaaacagaattaaaacaccaatctaacctcaaaattctctcaaaaacaataacacaaagtattttactccattcctctaacacaattaagcatagaacataaaaattacactaattcctacacacatgcatctcaagaacatttacaacaaaaatcatgctttcccatattcaatttcagaaataaaacaagactaaaaatggtagaaaaactacctcaaattctactcaaatccaagcaccaagaccatcaaacttcaagcttgatccaaaggaattttcaagacttaaccaaaatattgagatgagaaatagagagggtcagtttaggccaaggaaaatcagaaaaataaacatttaatttccttcaaattccattttattgaaaatacactaaatggtcaaaaagaccaaaatgcccctagtgccatacaccacctaaacatgcattcaagggcaataatgtcattctatcatattccacattaccaaataaatttagattattcatttaattataaaatgccaaaataaaatctcgatagtgtatttcggcaccgaacccaatttggcccgaaatacccgattgtgactatactgcgccgactagtcagaacacacctcaaaaaggacaaaacaagtatactatataataatatagtcccatgagcacgtaattaaattaaatttatagttctccccttcttggttcaaaaataaaaatgcccctactcaccaacgaggtcttaacatatcatttattaggttaatttcacatataataaattatataataatataattctataataatacatatttaaccagttagggtgtgttaatctgttttcttaatctttgggtattacatgatttgtgagaagagatgcaaaaagttcttgatctctctcgaaagctcttacaatgatttctgagtatttctctcttgaatctatgattcttttttctctaatttttctcgtgtccccgaacagtaaaatgactccactatttttatggaagaattgcatcaaattggttttccaaagctaataagaactaaaataagaaacttatttatgttccttaaataaatacaacaaaatgggaaactagctaggtttcctctcttctttgttactgcgaatctatcccatgaatttagggatattgtcataacttgcaagcttgcagatatatgtgttatatctctgaaagcatttaattcacattctctagtcggtgtatgcgagtttcctgcataatggaagctgttagatgttattgtactaatcctcaaatatttctaacttcttttatgatttaagtaccaaatttctctataggcacattgtaggaggaattccccgcccaggttatagggtcttttccacgtgttactcagatgaatgccacctcacattgtataaaaattgagataacaaatttattgtcaaatcttaatctatagatgtccctcgaaggggccacataagatacaaaatgaataagaaaaagaatgcagctagaagatgaaggaaccgttggaggtgggaatgaaaaaaattaaaccaaaactctttttttttcatgaaaagtcatcatggattaagatacagaattgaggagtttgcgatggaacctaatcccaattgtttaatacacaattcccatatacgaattgatattcattactacttttagatatataataataataataatataaaattaattgaaaatattatattaaataatggtatattcttttaaagttaacaaataaaataaaaaaaaacaatgttaaataaaaaattttgttacccatattttttagaataattagttttttcgctccttgaactttcggcactacctgattttgcattttaaaatatacaacttgttaaaaattctccttaaaatctaactgttacataattacgcctcttccgttaggtttcgtttctcttacctaatatgcaggtaaagccaataaacgagagcatgttcgaagtggtagaactaacaagatcatgggtgatcaatctaaaggagaagacatgcagtcgcaacagatttcaaattgacgaattaccgtgtgctcatgcactcgctatgataaaagagatgaacttaaatgtttataattactgttcacattattacacaacaagaacatggcttgacacatacaatgggtcaatatatctggtacacaatcacacaacatgggatgtaccacagaacataaaagatatccttgttctgccaccaaatcagaaaataagatttggaagacca

SEQ ID NO: 123657 - DNA, 1406 bp, Cannabis sativa
tgttagactttttttaggacaaaaatctttaaatccaacaatctcaatagtttaaagggcatttttaacgaccttaaaagtttaaggggcataatttggtacatgtcaaagttcgatgggtcaaaatcttaattagccaaaagaaaaatggtgctcattataatcacttagttaaccttcacactcaaaatttttatttttattttatttttttttcgtaacgttattagttatagttataatatcattcttgtgaatttttaagagaatcttaatacaataccaaaaataaaatttctagtttatgagggtgatgttttaagtataaagaacaccgttgtgaataaaaaataaaaaaaaaaatatatttcgatatatgtttttaggtccaaaaattgactaagatgttgtgataagagattgatggtaatactcttctaatgattgattaaatattattgttaccaataactacaacgtaaaatcttggaaaaaaaatcttatgtttcatttaattggatttatttattttttttgggattcttacccaaatacctaaaatggtatttttttttagatattgttataaacttttcaagtttttacttgatattttttacttaatatcattctaaatacttgacacaggacatgccccctactttcttgggatcgtgtcagaattctatcatgtgggtcaattttcgcaactctagttgttatcagatgccctttcatatttcgttctcagaagcttcctatgggcatccttcttcgatctatacttgttcactgtttaagggatcttaggtccggctttaggtctccaggtctgtcgttgaaagacagttctgatggatccggcttcaagtctccggtttcgaccatccaagtaaacgagttgtccaaatgattcatttgggtctagtgaatttgccttgtttctgtattgagaattcattgtagcttactcattagttatccaaaaaatacggataacataatgaaattaaattattcattacgatatttggttactcttaaaggtgatgtaataggattacaatgtactcgttacattatataaatatatatataatggaatagaattctcatttattacttattttactttccatttcactgttaccattcttattctattctattactattactattactattataattacattacaccaaacatccctatttcaaaatattagaaaaatatttaaaaacataaacttagaactcttgatttgattactaccatttcttttagttttgtcaagaattttatctctattctcctctctctcatctaatatatgactctattaatcgattaagagagataagagttatttttctatatacatatatattcatgattataatta

SEQ ID NO: 123658 - DNA, 1391 bp, Cannabis sativa
tatttttataagttgtttccctaataatattatatattgtgtgctaaatttagcacaacttttagcatgtgccaaatttagcacactttttaaaaattggagcaataacttttattaagtgtgctaaatataactatacaccacatttttaacactccgttagagatgctctaagctagaataatgttaaaatgttaattagtgaaatatatatttatataattaaatgttaataaatagtacttttattaatgacaatatataatgtagcttaaaataattttaatttcttgtttactccacaaccttaagaagatgaccttttttatcaacttgattagtatttactacgaacgtctatattactgtagataatttttgagtcacaatataaatattttgtaataatattaacatatgacttttatttttaataaaaaattattttgatttaaatataatatttaaataaaattagtaataatttaactttagtcacaataagtatgtattgtaattaaaaataaatttatttacaaaaaatggtgatttttgttactaattaatacttttagtcacaatttaagaataataatttataattagtcacaattttttttttacttttaatcacaaattttattaaaactaaaaataaaaaattttgtagggtagcatagcacatataagagttaccaaaacatataaatgtatatttatgattgtacaagaaaactaactatttaaagagcaaccatatatattataaatatattctgttattcataatgattacacgatcactacttcatcatatacatatatatatatattattcttagctataaggttggaggattaattaattaaaagcacgattattattggggttttgatgaggaggagaaggagtagtagtagcgctctcttcttgaatggtatccaatcttctcagaaaacttggcctcctttctgggcagaccatgttttgtggtggtgcttcaagcctcacttgtaatgaagttgcattattattattataattactcttaataatgatgcctccaggtgttcttgacataatataattatatatactgtgtatttgcccttacaataaatatatgtaagtttttgtttgaggattatcattttgccataaactcatacatttatataggatcgatatagttgtaaaatttaaaatcaattaatggccacgtaaacactaatataagatgcccatttgaaaaaaataaaaaagatgcctatgtgatatatatacatgagatgccccacttggatatttatggatatatatgatgttgcatattatatatatattggtgattatttaatggttacatttttattgtaactatatggttaca

SEQ ID NO: 123659 - DNA, 1005 bp, Cannabis sativa
  modified_base (856)..(874): a, c, t, g, unknown or other
aaattagataaaaattcttaaatctaacaatctcaatagttgagggagaatttttaacggtaaaaaaaattcaaaggtataatttagtacatattaaagttcggagaaaatatcctaattaaccttaaaaagaaaaaataattccacatcggtcaagttagactattacaagaatctcacctatatcattttccatatggataagcacagaaattttacacatatttatataattaattaattatttttggtgaaatgtttgatgttttaacattataaaaacaaaattcaagttttaaatgttttctccattaatttcgtttcaagtactagagttcaaattttattttatttaattagaaaagaatattgaagaactgcatgtagttgcttgactttggttaaaaaaaatgtgcatgatatttttcaacatattgttgacactttgtattttcattcattgaatgtaacactcaacatgtatacattgtgtcttttatgatgaagatcgacggatccaagaaattcaatcatttgatgaaagaacatttaagtatatattaaatttagtaaaataaataaataaatattatatttaacataacatttataattgaattctaagagatcataatattttaaaaggtaaatcgatataaaaataaataatcaataataataattaataaattaaatatttaaaaaattattaatgacaatattctaaatgaaatatatctattctttataaagtgtggctatgtaacagaatttttgatttaacgatacttttttggtttctaagttaactttaacagaatatctttctacttaacaaaatattctttattaattnnnnnnnnnnnnnnnnnnnatttaaaaataaaaattatataaatattttaatttaaaataattaaaatattatagatatttttaatttttattttaatctaaaatacttaaaatattattgatatttttaatcttatttttaaatttatt

SEQ ID NO: 123660 - DNA, 1683 bp, Cannabis sativa
  modified_base (1641)..(1648): a, c, t, g, unknown or other
gtaaaataaattccaacagtttatatataaggcacaaaaaaggaagcccacaataaaattgggttgaaaatattgggccactaaacctaatacttccctctcaagatgaaatatacaatttttttaagttcatcttggtagtaatggtatgaaaataagcaagaaatagaggtttggtaaaaatgtcaccagtgttatttttggtggtaacatgaattagcttcagtgtgccttcttggatcttctctcagacgtcatgacaatcaatctcaatgtacttggtcgttcgtggaatacagggtttttagaaatgtggatggcggctgtattgtcgcaataaaagatggtgggatctttgtaatggatgccaaagtcttgaaggagtgctaacatctaggtaatctcacaagtggccttggccatagcccgatattctacttcagcggatgaacgagatacgatggactactttttggatttcgaatagattaagtatctaccaagaaagacactgtagctagaaatagaccttctagtgtcactacatgaagcccaatcagcatctgaaaaatattgagatgaaagtctatatttgacatatcagtttcaacataagcaaataagttagttgaagatgctgggtaaaaaaatagcccttggccagaggtacccgtaagatattgtaatattctatgagcagcagtgaggtgggtaactctcggattagataaaaatttacttagtttatttacgacaaaagaaatatcaagccgtgtaatagttaagtaaatgagtttaccaatgaggatgcggtaaatttttagattttctaatggttttccaacatcggatgagagtcggatgcttggttccattggagcgggagcagcggaagctcctaaataccctatgtcagtcaaaagttgtaaggtgaatgatccttgagaaacagaaatctcggaggaagaacgaccaatctccaaacctaagaaaaaacgtaaaggatctaggtccttaagctgaaacacagagttaagttgctgtttgaaagaagtaacaacatcatcgttattggaggtaaccacaatgccatcaacatatattaaaagggcgagaaaaatgcctttatcattttttatgaacaaactagtatgagagagattgggtgaaaccagttgataaaagataattgctgagttttgtgaaccattgtctagaggcttgtttcaagccatatagacttttggtcaatttacaaagaacatttgggggaatttgtcccttgagtttatatcctttggggagtgtcatatagagagttttattgaaatcgccatgaaaaaaggcattattgatatcaagttggtacagagaccgattgttaatggccgtaatggcaagcagaagttttaaggtattaaactttgcaacatggacaaaggtgtgaaagtaatcaataccttatttttgattgaagcttttggcaaccaatcgtgctttgaaacgatcaactaagccatcaacattgtatttgattatgtatacccatttacaaccaatgcatggtgtccattagggagactgacgactaggggtgttcgtggtgcgggtggtgcggtttttaaccattttttcaaaccnnnnnnnncatgcggtttttccaattttccaaaccgcacccgc

SEQ ID NO: 123661 - DNA, 938 bp, Cannabis sativa
tttggtcattagaatcacattttaatatttttagtatagcgcggattatagttagacattgggaatattgagattagttaggattttagaattgaccaaattatcccttgatggttttgtgacttttagttagtgtggggggcaaaatggtctttttgccctagagttcttttgtctttttatgagttttaattaactcttatgatctgatttttatgcttgaattaaatagataaaacttgattttgtttttattttattaaaattagaggaaaaacacaaaaaatacactctctctccaaattctctctttctctctcgagccccatagaaatcagtaaggatttgggtgtttttagcttgttgctgagcaatttatcaagtgttagtgatccaatccaaggtaaagctcttaggcatcttattctttgatttcttaagtttgaagttatagttttatgcatcaatttgagtatgagggttctgtgttgtggaatagtgtttgagtttattttttggagttaaattaaggttattcatgttgttttgaagtggatttaggcgtttttgtgatgtttgagcaatgagtgaaagaactcaagctttgctcttttatggtagattttgattctaagcttgtttagttgttttgttgcttggagtatattctttggggtatattaagcaggtctggaaggtttggtatggtttggatacgaattaggaaaggtttcaaaaaaatttggtttacctggtgtaaatcggttaaccagttttataggtcttgtaaaaccgtttaaccaaatcacaaactggtttcctgaatttttcttgttgttgattccttgattatttagggtaattccgtgtaattccttaatttagcgtgtcactcaccagttttacgaataatgtaatttaggggcctgtaattcgtc

SEQ ID NO: 123662 - DNA, 1325 bp, Cannabis sativa
aatcactgaaatagtaaaattgaataaaattagataaaaatctttaaatttaacaatctcaataattcaaaggatacttttaatgatcttaaaaattttatggaacataatattaaaattttaggcataatttttcaactacaagttatattatataaattttaaatatatatatatataaatgcatatacaatttaatatataactttgaatattttgtgttgatgaagacgaaatttgtgtagatagtaatcccatttcccactcccagccatcatagctttggacttttctcctttttatttttgtgatacccacagatttgtattgtattttggatcaaattagttgaatattctttcctatatagccaagccatgccaatatcgccaaccttatttaacgggtcatgcgttaagaattcacaccaaaacatggatcacatgatacgacatcgttttggcatattctatatgtattaaaacaaaaagaagggtatattagtcttttcattgttgaagagaaatacttaagaaataactatcgaacagttcacgtgtttaccacctctcgatatttacttctccaacgggtctactacacaacacaacacaagtcaaagtcaaagactcaaaaggtagttttgacatataaataaatagtgaactgagttttgcaaaaataaaagaaacagtgaactgagatagtatatatagtaataaagttttaacacaattttcatattctaacagttaatgtacggcggagagagttggcagaatttaatgttattagatgaggttgatatatatgaaaacctaaatatatccaaatccaaaagagtgacatggccaagcgagacataaaattaagcgacaattatttatttttatcgacacatatgtctaattttaggaggtgagatattaatattagtgtaattttatattgaaatttatttatattatttataataataattataaaaatttactaattatgtatagaaatttttacatcaaaaatataaaatgacttttttattacatatatactcccacgcggcagtagttacatttgtactctttaagtttttcttatttacaattttactacttatacacactgtacatataatgtcactctttaaatgcaactgaggtatctatacatgtcagctgattgacacatatcaatccacgctttccctaaaaattctccataattgatcttctttcctaaccacaatcaaaacctattttttcactactcaattttctgtcattttcttttctaacttccattaaccgattttccataactat

SEQ ID NO: 123663 - DNA, 1078 bp, Cannabis sativa
  modified_base (35)..(36): a, c, t, g, unknown or other
actgtgtagtcccatacatacacagtctcagaatnntcccacttgaccttccccaagcgatgtgggattgcacagtctcagaatcatcccactgtcacaacaagagaaataattatgggtagtaacttcttgattctatttgcaaaaagtttagaaataaccttatagaagttacacaaactgatgggtcgaaagtcatcaaaactagaggcattatcttttttcgaaatgaggataatgaagttttgattcaaaataccaacaaattctcttgtttggaaaaattggatgatagtcccataaacgtcgttcccaacgatatcccaatgagctttattaaagtgtcaaggcattccatccagccccgaagcttttagagaacccaaagaccaaacaacttccttgatctcgctcgggctaggaatatgcaccagctctgagttatcagagagagcaactttagaggtgataccttcaaaaactgcctgattctcaacagggaaactcgaggagagcacatccaaaaacctactacgaaaatactgactatataagcacgacctgtaacccaatcgacaccattgtctgagactgcccccacaaaattacgtttccaaccactattttgagatttttgtttccaaatctcttattttttctttgcaatctcatccaattcaagaagaatatcggcctcagtcttcatattatcttggaaaagaatgcacccttggatttccaccaaaagtttatcaagcaaggccacacttgaatttgttatttgttatttttttaatttactttatggtggggattatgaaacaccatcttgtttgcctctaccataccaagtatatttgtaattttttttttgtttgttttgcttaattatgaaaaatcctaataacaaataaattcaatttacatatttataaattcagaacaaaacaagtttacaaaaaaaaaaaacttatatacttttgggtgattctaaaatgcatccccttaaaaggaatgtactgatgcaccctccacttgtttcagaaaaaaaaaattagtctatttttttcatattcat

SEQ ID NO: 123664 - DNA, 1894 bp, Cannabis sativa
cgggactactgactgtcacagagtattatccccgtcccgtcctgtttaacattcagggacagtaaatgatccttatcctcgtcttgattctcatttagataaagaatcctcactccattaagggcgagtccccgtaggcctatcaccattagaaaaatgtgcatccctatttacaaataggtctttcctagaataaaagagtaattctttacacttaataataggtcttttatctaattgggccagattaatatacagatattcagactttcgtttataagagataagaaatactcactaaaaacatttttgaatgaaaaggatgcttttatttaaactttaatatcatccaatacaattcttagcaaatcagaaggagaattatccttaacaaaaatacaatctgacaaataacaagaattacgggcaaggaaatgcgcggcctcattagcagaatgcttaacaaaacacaatttgacatgagacatttgtgaaagcaagtattggcaatcttgaaccaacatactaaaagttgaaggcataacaacgctggtatagatggcttgaacaacaagaaggcaatcagtctcgagcaaaatgttgtcccatgacttatctttaatccaactgagagcttccttaataccaatcaattctacaatttcaggtgaagatgtcccactcttactaaaagagtcagcttcaataatctctccattacaatctcgagcaatgaaaccaaaaccaaaagaatgcaatgcctcaaaaatagctccatccacattaacctttaccatgttcacatctggtttcgtccagtgctccacctcctttccaatctcaaaatgagacaaatgaggatctaacttacattcttgagcacactgccattgataaagatgagttcttgcagaaagaactacctcagctgctgagtattcttttgattccaaagcaaattatttctagcattccaaatggcccaaatcaccataagagcttcctcaatttgttcactcgaattgctactcattaaatcttggaaccaagtatagaaatgatgctgagaaaaggaggtaatgttgagagaagatctatgccaacaagacttggcaaaattgcaactcaccaaaatatgcatgatagtctcttcggccatcttgcagaagctacatattctgttaacatagacatgtttggtattaagttggactttagtagcaagtataccaaatatagctcgccacccgaagtggaggactttcggttgcactttgattttccagaaatttttccacaaaccagcgtccacaccagcaggtatcgactggtttcgtagccacccgtaagcgctcttaacagaatagaaaccagatttctctttactccaagtccagcagtcttcatgaacagtcataggcaaaggaacactcataattaggctctgatctcttgcattgaacaggtcattgatgatctccatatcccattgtttagcattgacacacattaaagaagacaccagctagttactaagagcagggtgatccgattgaacaaaagggtactcttcatgaggaagccacggatcccctaaaatagacgtttgtaaaccactagcaatactatttgttacccctgccaacatcagattcttagtctcaaacaagcttctccacacatagcttggattatttcctagttgggcagccaagaaggagctattagggaagtatcttgctttaaacacctttgtcactaatgcagaatcatgcatcagcaacctccaagattgctttcccagtaaagcaatattatactgtcttagatctttaaatccaagacccccaacattcttatgattgcataacttattccagctcaaccaagacac

SEQ ID NO: 123665 - DNA, 619 bp, Cannabis sativa
tggtttgaagatttttgagttattgggttttggataaatgaaagaaaaaaatagataaaaagagttttgatttgaagaagggatttctcttgttctatacagaggaagttgttgagttgtttggttttttgagaaactaaaataaaactaagaaaagagacatgaaactaacaatggcctcttgttgtatatatatagcataaacttattagtaagagaagaagagagagtactatgtatgtataaaaataagccattttttctcagtccttagctttctacgcgccactttagagagagaaagaagaagagagagagaggagagagagtatttccaaccacgtggagtggactcttcttctctttcaagggcttttttattttatttattttaacaaaggaaaatgaaaaatttagtgcccataataataataatacactaaaaaagaaacaatttttatcttattatcttcttgaattttttttattcttatttgataaataaattagaaaaatttacagaccaaaaattttaaaaaaattacaacaatacatcaatataaaaaaaaagttattttcattttttgattttttaatttataaaaatatatttttagta

SEQ ID NO: 123666 - DNA, 719 bp, Cannabis sativa
tttattttttgaagagttcttcctaatcctctgtttttcttatgctctaaattgttatcagatatttttaatgattatgagtagctagactttttattatggtgttaaagagattgcttgacacgttattttggttttaatatgatttagttcttccccaatttgttatgtgcatctattttattcatacttaattacttttaattgcttgaatggccaattaaatagtttatgattttaatgcaaaatttgataagcgagtattgattatgatatagtaaaatcgacatagatttcgataaggacgagagtacttatatggttcatgtagcatttatgaattttatgcttaatgtctcctatgtgtttaaatttatcacaagaatagaaaatttgcatgtaggttgagatttatataacctagcatgtacataaatttctttgttaaatctgatatcacacgaaaattagactttaagaactaaattatgttaaactaagtaaaatagattcaattaacattaattaccctaaactttaatcattgttaatttcccattaattatttatttttttattttctttttagtagaaattgaatatcatttcttattttttattatcaccaaatagaattaggaatttaattgtttggtaattaactacagtccttgtgagatcgccctcactcttgtgagtctattacttatgaacgatac

SEQ ID NO: 123667 - DNA, 1867 bp, Cannabis sativa
tctgtaaaagtatgaatcagatctgcaaaattggataatatatattcaaacacaagtgatattcaatcacacaaatacattactacaacattccatttcatctcatttcaaattaagaaatatgaaatggtaccatcgctttgcaaatgaagaacagacgaagcgattaagaaaggaaagagaagcaataaggatgtgaatggagtttaccttgccgatttacgctatatcttcttcaatcgaatcgacctttgctaatgtgaacgagggagaagaagagctttggattttagtggttggggagctccatcggagctgagtggaaatatgagagggaacacgaagggttttgagtttttgtcttttttttttccttaataggtttttttttttttttgaaacaaaaactgaattacaaactagcacccaacacccaaaggcacatctgcttttaaacaagtagcagcacagtcaggaagaaccgttgtccacaccccagtaacatggtacaaccggccccaattagctaaacaatgagctactttcttacaattcctaggagaaaaaaataaaagaaaggttatgaaatcttttgctagctaggatacaatcatcaaccaaaaggccccagtccgtatttatgcgagtattcccagtcaaagctttaaccacggtttgactgtccgaagcaatgcacatattctgcagcgatcttgtttcagcgagcttcagagccaaacggattgccattgtttctgccaaaagcaccgaaaggcagccaggaataaagtcagtcgcagcagcaactaaggcacccaaatgatctctaattatcacccctaaaccacatcccggttgcccgtcaatgagagaagcatctgtattaataatgaatgttctcgggggtggaggagaccatctaacaatatccttagaatgcttctggtatggatgagcttgatcagttgcaagatgtaattccatcatctccatggcccaaggaatccaaattttatcttcaatgtccttattctgaaaaatacacttattccttcggtaccaaattagccaagtaataccaataaagaacataaactcttccttagaaagctttcccttcataaccattagaaaattaggggcttgcctcaaggaagaagggaaaagatgaaggtaaccgaagtgcttccacactttgtgtaagttagggcaactccataaagcatggcaaacatcttccacatgactcttacaccggttacaagtattatccatggacataccacgcttgtttaattctgttttgactggaatccagttgtggaacacacgccatatgaagatcttcattttaggagtgagacgagacccccaaaccaccttccaccaagctctattagcagaattatcagagcattctgctatgttagggtccctaaaccgcagtttgtaaccactagccacagtataatgaccactaggagttaggctccaaccgattgtatcatctctctcccgcgaaggagtaatccccaacacccaaggaatgtcttctttgtgaaaccagctagctatttcttcaactttctagcccccattagcatttataagtgtctgaacttttacatcagctggaacttgaaccttggtgcgaagggtaaaaggagctcctctagggatccaagggtcctcattaatccgaaccgactgtccatttccaataacccaatgatagccttttagtaacaactctctgccccataatatacccctccaaatattagaactgaaatgtcccaacttggcctcaagaaagttgttgttggggaagtaaagagctttcatgaccctagccaaaagacaatcg

SEQ ID NO: 123668 - DNA, 1103 bp, Cannabis sativa
  modified_base (79)..(93): a, c, t, g, unknown or other
aggtttcttaaactttatatgtgtctattttcattgttttagaattcatattatgatgttaatcaaacatacttggtannnnnnnnnnnnnnnggtaaaataatttccaacaaataggtgattggttgtttagtcacctttgtatttttaattgagaaaattctcaagtattttgttgatgtagtcttcttgacttaatattagcttccttttctgtctatctctctttatatacatcctaagtatcttggtggcctctcctaagtccttcatttcaaattaagctttcaacaaatcttttagatttttttatcttggccttttctttgcttataatcaacatatcatccacatacaacaacaagtatgtttctgtatcaatatatgtacctttgtagtataggcatgtgtcatagacacttcttgtaaagccttgcttagtcatgaaggtatcaaaccttttgttccactgtcttagtgactgtttaagtccatacaatgatctctctagcttgcataccattccttcttgtcccttctttatgtagctcttgggttgctccatgtaaatttcttcttccaattctccattgagaaaagttattgtaacatacatttctttcacctctaagtcaaacttagctgcaattgctagcataattctaatagttttatactttactacaggaaaaaatatctttgtaaagtctattccttctttttggctaaatccttttgtcactagtctagctctgaacctaattggttcacctagtctggtcccttccttatgtttgaacatctatttgcatgttgaagaagatccctgactcatggctgccaaatattttctatcctttacctgcaccacataccactcatgagtcacaaagattcagcaagaaaagaaataacataatatcacaaagcagtacaaaaatattataatgactgcattttatgatatggattagtaaaggccattagtactaattattgatatttctatagttatttatgaatttatttaattatgggtctcctttttagaaatgggcattagaattattatttctcaattctggagattttattacactcta

SEQ ID NO: 123669 - DNA, 1234 bp, Cannabis sativa
  modified_base (36)..(75): a, c, t, g, unknown or other
  modified_base (1188)..(1196): a, c, t, g, unknown or other
aaccatgcaacataaatgttatttctgatctttatnnnnnnnnnnnnnnnnnnnnnnnnnnnnnnnnnnnnnnnngggcacaaaacccaacacaaacatgaatcggccaacctctggaaggtagaccaagaatcgtctagctaaaacttggttcactatgaaccgaccaggatagatttagtcctataagggctagatagagttccaagaactaagtacccgctaagggttttagacagaaccaagaaccgtacagggtctctaacaaacccaaagcgctagctaggtccctaaatggataaaaaaaccatattttctaaaattcaaagctactttcttcgaatgtcaaagattaaaatctcaaaatagagcgcaatattcgatctttttcatcatggagttatacattatgtatcctaaagctattgaattgattataatgcgtaaaaactatcctaagatatgagattcaagaagttcataaaagctctaaaactcatcaatggtagaaattcaaagaacgaaaaagagagaaagctttgaacttatccaatgggaaggtgaaaggaggctctagctagtctgcacgagtagggtgagtcagaaactcaaaaatccatgaagaacttgggctcataaggcttcgactctatggcgtcttggagaggattttttacttagagaatatagacgagaagttaagaatgaaaagaagaatgaggcacttatatatagtttttggaaaaaatttctcccaaaaacttaatagggagttaatgccacaaaaattggcatgcatggaaaaaagagaaggtcaagagttgtaacatgggaaagtgtgcagccgtcacacaatttcccacattgattgacgtaaaatcaataactgccataaaatcacatcagctaaagagtccaatacttggtcatgcatacctacacgaacgacaaagggtgttacagtatcaaatattgtaaagtccttaactgaccagacttttggacagggacttgggaaaaaatattatcccaatttttctacttgacatgacacctcaacgtgacaaaaagtagaaaataccttgaagacaggttagcactaacctgccaggttagtgtcgtacaaccttctaacctttgtgattccatggttgcacgttggacacaagctgtaaagaccgcttagtnnnnnnnnnaaattagcagttaatcatgattaattatgaaattattt

SEQ ID NO: 123670 - DNA, 2101 bp, Cannabis sativa
atatatagaaacctaatgtcaaaagataaaaaaatacaaacatatatatatatatatatggatcaaaaaaaggtttcagtttggattgcacatgtgtacgtttacgtgagagcgagttttaacggccaaatttaagttgggtgcacatcatcatcatcactacacatatataaatatatataattaaccttgcttctatatatgtaatttaatcattgccaatctatttggattaaaagattataattaattaagaacaatgatcattatatatatataattcagaactttcgacgaagcttccccatcgatctaattacgatgcacactcactgtacttggccgtacttatataaatacacgtatacaattaagttacgttgtcaaatatcaaacgtacgtaattatatattacattattattatttattcttccctatatatacgtaccttacaagaatagaaatgataaacttaatattaatttaattaacatatataatttaatataataatttttgaaagtattgttaactaattgcaaaacgataggtctaaaggtactagacactataattattgaaattaaaatatatttcatgcagaaacccttaatatgaattcaaagagaaagtgccttaaaatgaatctcttagttcgtattaattatttatcgaataaaaagcaatataggtcaaacaatacatgtagaatatgaattatagtgattgatacacgtgatcaattttttgctctctttttttggtatgtataatatataacgaattgaaaatgacacccttctccattaatccaaaaaaagagacacttctaattttatacgtttcaatcatattatggccattctattatcaccacataatcatatttagatcaacacctatcaatcaagtggccggtggagattcaaaaattcatccctttttgaaaattaaattaaataaaattaaaacagttttatttttctgtttcaatacataaatattgtacggacaacttgacattacatagctagctatatgtatgtataagaacaaattaaaatgcttggtgtatatatacagaattgtcacttatattggcaaaagtttagtattgtactggtaaaataaaatttacttctgatgtgttggcaaaaggggtaggcaaatcaaacgttggtattaaaacttttaccagcacaaaatgcgtaaatgcgctgataaaagctagaatttaaccactgtaaatgtgcgctggcatagtaaaactggcttttttatcagtgcagttcgcgaaatgtgctggtaaaagttacttttcttgtagacatatatgggcagacccatatatataggcgagagagcagttgttcctaaaaaaaaatcgagaaaaaaaatgtgtcctatagttttttttaataaattatgtaattttagtagcagtcatctaaaataatagcctacaatttaatcccctattagatatacgatcattattattagaattaaaaaaacgagtcaaataagcagcgctgagcatgcaactattgtgtaaggtacgtaactgcactactaacaaccctatcggtcgtagagaatttgttatttccaaccactaatagtgatttgatgatgagtcatcgaattaacaaagaagaaccaacaacaaaacaaaataaaattatatcacatagacaagaccaaaatactcaaaactatgttacatagacaagactaaaacatgcaaaaccatgtcataaagacaaagctaatcgcaatagcggaaatcgaatcgcaatagcaaaacacaactccgatcaaaccactatgcccaaggaaggcgagcgggcctgagcggagaaaaaaaacaatcttctgtagatataaatttaaaaacaaaaaatcctaattcttttaaattagttcaatgttgtgaatttttttctatttaggtattctctaaatttcatattatagttatttataacatatactagttggttaacacgtgctttgcacgtgtgttaaaccttttaaaattttattaagtttgtaatgtacaattaaaattaaaggagaaattaaagaagaattaattt

SEQ ID NO: 123671 - DNA, 1141 bp, Cannabis sativa
ctatattgatcaacaaaatcaagatcgttctatggagtttcttcaaggacttcatgaccgtttttctgctattcgtagtcaaattctcttgatggatacattccctttaattcagcgtatctataatttagtacgtcaagaagaaaaacaataagagattaatattcgcacaactccgacaattgattctgcagaactccaagcatcaaaactaccttttaagtcacctggcaagcgccaacgccctttttgtgaacattgtaacaagcatggtcatactctcgctacatgctatcaaatttatgggttcccagacaagcaggtgaagaaacaagggccaccttcatcgccttccgctactgtttctaatcaattgacccctgaacaatacagcaagattcttgctcttttatccaaagatgaatctaatggatcatcagctaatttagcaggttcaatcctcacttgtttatctccttcttggattattgattcaggtgcttttaatcatatatgtacatctcttttatttattttttttcttcatattccactgttaataaaggtatttcagttcaattgcctgatggctctcgtgcgcctgtgacacacataggaacaattcatttttcaccatcacttattctgaaagatatttttcatattccatctttcaaattcaacttattatcgatttctcaattgaaaaaatcaagcaattgtgatgtcttattttcatcttctcaatgtatattttaggaccgagcaacgaagaatatgattggtcagggtagtgctcgcaatagtctattttatctagatgctagtttgcattttaattttgtattttcttttaagcgttgtaataagtttgacatatggcactctcgcctaggtcatccatctagttctcgttttaattttcttgttaagacttatccaagtattctttcaaatgagagttttatttgtgatgtatgtccaggtgctaaacaatcacgtctttcttttcctcatgtaacatcccgatttctcgagatgtcacacaaacaatttaataagatgaagacaataaaatatttctttattaaaaaatatctaagcatgagatctcacagtttaaaacaaaaatatttttagt

SEQ ID NO: 123672 - DNA, 968 bp, Cannabis sativa
  modified_base (904)..(938): a, c, t, g, unknown or other
ttagccgccaatatcccttttaaaacctaaattttttatttacagttttacaaatttaattttccaaaaatacaatttaaaatttttaaaattacaaaaatacaaatttctcattagaaaaaaaatagtgcgggaaaataactaaaaaataatataaaaacaacatgacattaaacacactgcaatatacaaatcaatcaaagataaaatataaataagttataaaataactaaaaaatagcatcgaaaagcaaagaaaagaaaagaagatatcaaccctttacaatatgcaaattaacggaaaatctaacttaaaataaactacaagacaattaaaaaaaaataacatcgagaagcttatcactatattaaaatatctgtaaacaaataaactaaaaatgtacatcaagaatattgcacataaactaatattaactgaacaataactaaaaatcaatcaaaggtatatgttcactttaatatgatttgataaaacaactacaaatcacgtattaaattgatgcattaaaaaaatatttaattaaaaataaattagtcatcaactaaaaaatatacttaacaaaaattaaaaatgtactattttttgcaactaaataagaacaaatgaataactaaagaacaacattattttaatatgtaaatgaagtagaaattaagaccgtctccaatgcaagatgtaaaatttgtattaagtttagcacaaaaaatgattttatgttatatttaacccactctttacaattgtactccaatgtaaatatgtaaaaaaatataatattattgattatcaattaatttttattgaaaacatacaaacattattattttttattttttattgttttaataatatagtaaataaaaagggttaatttcacaaatnnnnnnnnnnnnnnnnnnnnnnnnnnnnnnnnnnnttaaacatttttacaatttttttgatttta

SEQ ID NO: 123673 - DNA, 1062 bp, Cannabis sativa
  modified_base (195)..(197): a, c, t, g, unknown or other
  modified_base (855)..(857): a, c, t, g, unknown or other
aaaatacagtatttttctgttgtactcttgttaatttattgttgattttttgttatatgtatgttattttttgctgttattttgatgttattttcattttacttttgtgtagttcttttattgttttcatgttgtttctatagaaagtcataaaaatatatatatataaaaaaattctttaaatgtaaaaatgtnnntttttttacaaaaaatagtaccttatgtaattatccctttataaattatctatttgtaacttttgaatgatcactttataatattattaatagttcagagattgttttagtagataaaaaatttagggtacaataatacataaattataatttaaggacaaattctaaatagtttaaaattaaatagtcacgctttcgtgtaacaaactatttaaattgttttttagcttgttaaattattataaatttttcaaaattttataaaatactttaaataactactacattctacatatatgcctatagaaaaattaaacaaaaattacagaggatgttaaaacaaatgggaatgcaattgcataggtgcatctcttttagagagttccctatgaaattttcctaactatttataatattttcaacatattaaaataaaaattgtgagcagtcataagtttatgagacacttgagtaagaagaagaggtttccaaatttaaatcacatcccataatattaaaataaaaaaaaattgaaaaaaatctaatattctttgaaattttaagataattaaatttgtacaagtttataatggacaatattatcccacatgaatcaaatgtaaaagtattgaaccatatataagaacatgggctactnnnctcatcaccaattggttttgagatgtactccatgattctcaacatggtatcaaagccatatccctagcgggctttcgatatacacctatcaaaagagttaaccagccacaagcgagcaaaatggtactcccagccgcaaacaagaataagcgagcaaatggaactcccagccgcaaaactagggctttcgatccacacctatcaa

SEQ ID NO: 123674 - DNA, 1103 bp, Cannabis sativa
aaaaaattaatatttacgtgcctcggaacgtaacttctacctagtaaatattaaatatacatatatataaatatacaataatttatctttagtttgaactcattactcattaaatacattaatcatagtgatcttaggcttaagaaatttattagcaccccaaaaaaattaaaataaggttgttgagactttatattctaagttttttgaggaaactttcaacaaaacaaattaattaagaatttattaaaaaataaataaaaatcgcaaacatataaatatctctcttacaatttttcgtttattcaagacattataattttgcggcccataatatgattaagtggactttcgctaaaaatgttactggtaccgagcttttttttatactagactacataatcttatgtaatgacggtagaattctctataataaataaaataagtagaattcaataaaaaattgtaccaatagtgatattagatataatatttctctatatattatatgttatgaaaagcattgcaacgaggcattaaggtgcctaaaatttttatgacatgacgtcttataattagttagcggtattctataatttttgttaaattaaaataagtaaaacatgatattgaatttcaccaatagtgatagagttttttgcggttaaactctctcaactatcattctactttcatttaaccctccaagttcaaattttggtgataaaaccctctaaattacttaactgttagcaaatttaaggtgtcatctatttttcatagttatctgctaacatggacggcttatgtgtacattcttgtacacgtgggacgtttatattggtacataattaataatattatttaaaaattataaaaaatttataatattttttatttttttaaatatttgattattattttttataatttaatttaaatttaaaatgacttagtgtactaatataaacgtgtcatgtgcacataagtagtctatagtgaccattaaccagatgacacttttaatttgcaaacaattcagtagtttaaaaggttttaccaccaaaatttaaattttgaaaattaagtacaagtaaaacaat

SEQ ID NO: 123675 - DNA, 1997 bp, Cannabis sativa
agagagagagagagagagcaaactgagagggaaagagagagaaagaggaggctgaattttttaggtttgaggagaggggcattttggggttaccactaaaagattagcatagttacaaaatttttaggagggtggtataattaaacaacattagtcatttttaagcataaaatataaaatttccctttcgttattagtgcaattaagtaaggtaataatttttacgtaactaattgtaagacgctacttctgggtgatgctagacactattgatacctaacaataatgctctttttgaaccttgaagaatagttgtatgtcaaactaaaatatacacattatcaaaataattgattaattgggagaatttttgttatccatacaataataatttgacgcatatttttaatatttattttcttaattattcgtgtacatttatgctgtgtgtgggcatttaagggtgttcataaaatatttaacccgcacgatccaatccaatttaatctgtaaagtacggatattcacacttgtgtggattagattgaaaatccaaaattcgcaaaagtgcgaatttgatattaattgacatataaaagcaaccgatccaattcaatattacacacatatttatatatgttaattttttctgacatacaattaatattttaatgtaaaaaaatattaattaaaaaatataatacatatgatacaaatatatttcaaaacttaatagatcaaatatatattccattcttttatataaggaaatataattcaaaacaaaattaaaaatttctttctacatgcaattttttcttcttcttatgatttttttgttttgtttattttaatttgttgttggagatataaaaacaacaataatttattttattttactgttacttatgtgatttttttttttgagataattcttaaataattcaatattaaaaagtattgacgactataatttcaagttaaggccaaaaaacctatttagaaatatcagttatgatgctaaactatggaagtccttaaaaaaattcaaatggcaatggttaaaatgctactattctattgatttaagaaaaatggattatatggtgtgattttccaatctctcttagggaagaaacacatctacaaaaagggtcttttgcttcggttttaaagtgacacataaataatttgtgccggttagagtaaccaaagcaataaccgtaggcgcaaatagtcatagtttttgctttagtttaaaaccgacgccaaatcataaccgaagcaaaaaaaaaaggtttttgcttcggttcataactgaagaaaatagtactgtaccaacgctaattggttttttacttcgattatgaaccaagcaaaagaattttaaaaaaaatcagaactaccgcaccactaccaccacaacactactatacatctcgcaccaccaccacatatacatagatttaaacaactatttaaacctaaaatacacaaatttaacccaccgcattactacccatggccatcgcaccaccaaaaccctaagaaaaagccaaaatcaaattaaaaaaagaagatcgaaagagggaaagagagagagatcagaagagggaaagagagagagattatcatgatcaggtggctgcgcggggtccatccgagcttgtggtgcgagcgacggcctccgtcgtcttggctccaccatcagcaatccaacatatatatatagcgagagatagatagaattgagtgagaaagtgagagcaaaatgcgaggcgactgagggtattaggttatgtattgtagggttttatatattagtaggattttgtaaaatgggttaaagcccaattttgcgattttttttaaagtaaattagtgtttgttgtgtaccaacgcaaaaagctctgtcggttgggattttatgtgtggggcctaaggattcattttcatttagtgtgtggtttttgttatcccaaatttggcactctgac

SEQ ID NO: 123676 - DNA, 2558 bp, Cannabis sativa
ttctccattgcccaaaaaaaaattaaaaaattggtgataaatctatatcaaataggtccaaaggaaaacgcttagttgtataagatgataactccgactttgctcctccagtattgaaacgggatcgtggacctgcgaagaagaaagaaaaagtttttgttcctcagaaaatttccccaacttctgagaataagatggagaaggttcaagatgatcatgggttggaggtttgttttcagtttcttttttagttttcccccaatttcgattattttttcttaattatttttttgagttttgtgtttattgtttttatttttttagggtttacattttctaagttattttttattgtggttgtttttatgcttttttttgttttaattttaatcattccgtttgtttaatttgatttatgtttagtttattatgttcttcctttttatttttccagttttaaattttgttatattttttgttgtttttatttttgttttgattttcaaatgtatttttgtgtttgattttattttgttcatttgatctgtgtgcctgtttctttataatttttttatagttgctttatagtttaaacgctattaattattagataacatttttaagtattgatcatatttatctgtatatttttcacttcttttatcatatatgttctctgtggtatccatatatatatataacatcaaggagtaaatataagaactatcctagtaattgatattgaaagagcttaattgggtcggtatagtacttttcatatttatgtatgtcatgtgtttttatatattttgttgttcatattaagttttattttcatctatgtttatgcttatgtaatttttttactttttcctctgtgtgactattttttcaaggttgtttttaggtgtattacagttttgaaacttttgtttgtccatttattattttatctttcttatttaaatgcagccttctattgagggaggttaacctggccaatccgacagacttttgggaaaggttgctggtcgttgtatacggtttaacgctaaagcattttatttgatttcatgtctggaatgtttattacaataaattgttatttacccaggaatcaaaccgattagttgatgtatattttccaggaaccaaaaccattgactataagtctattgaagatgcttttttgggcactaggtggggccatgatgagtctctttgtttgaaattgaccgttctttatttcatacattgatgccttctaagtaacactcttgagaaggaagttgttaggtcagaattagatctcattaatagcggtcgttgggatgaatattgttggggtagggagtcatttgagttgataattgattcatttaagggtatagttgaacatggtatcaagataaaaaaaaaataagaaatataagagaaaaagagagttcagtcttatgattgttggtatagcgctttggggtgtccgtgggtgtttattgtattgttttatgaatgttatcccacgaagataaattttttttgcaaaagagttgcatctaggattctaagatttctcaattggaccaataatgtcggggccaaaaatctaacttttagggatttgtaaggcaagatatttgatttgccgttaaagtaggtgatttttagtttctttactattttattattgttttttctcattctgttaatcttttttatttatgtttttgttgttttttattataacttttgcaactttttttccagttaatgttggagaacattcatccttctgttgaagaaaggaagtctttgaaactggatggcttatttttggatgaatctattgattatcgtggttcattaaaagccaacctttgagagtggttcctcttctaaaaatcgtattccgaagatatagaaatgtcaaaagcgaagttgggattagttattctagtcaggaatcgttggccgaagattttatttcgtttaggtgtttagttgatcttaatttcaagtctgtgagactgctatacaacaattgtaatatttgcagtttagaagagactaagtctccctcatctcatctaccttagatttgtctcttattctcactattgtaatataaagagagccactctagaactcataacaattgtgatctaagttgtattacctctcatatcaatataaccgaaaggggcgtaggtcattacccgctaactaaaggggttgaacctttataaaaatattgtgtcctttttgtttgcttattctaattatgtacgcgtggtgattttagtaataaatacgactccacttgcagttggccaaacttaaggtcaacaaaagcgattgggcttactaaagaaaacctatcaccttgtcgaatccagctgtaaggctttaatggggacacgttgatgtcaatggggaaaatccaactacatgtcaacctaaaaggggaaaataatgttagtgtcttcaagcacagtactttttagttgtagattttgttggaatatattttaccatgacctagatttactaacaagtat

SEQ ID NO: 123677 - DNA, 1185 bp, Cannabis sativa
tgtagacaatatttatacattttaagtgcttttaatttaaaagtacctcttacaattatcagttacacacataatcactatcacttactgtgtatacaacctattaacttttttttatcttcttttctttcatttttcattttcaaatttaccattcagtatttctttccttttctttctcaatttttcatttcaaaactatcttccagtcattatacttttgaaacctacgtttaaaacccacaaaaaccacctcccacccataacctttgccatttggttcttccaattgcctcttttatcaattcttttatatatcatcttcatcttctccatctccattgcccaaaaaaacttaaaaaaattggtcataaatcagttgttaacaaggctaaagggaaatgcttagtcatcgacgacgataactccgatttcgctccccctatggctaatggtggtcgtcgtctagtgaagaagaagtcgaaggtgcctttgcctaaaaaaattcaacttcgacagctagaagggaaagaagaagtcaacttcaagaaaactgtgatgagactgtaatgtaacaattatatctgttgcgagcaaactaacataaaactacaaaacaactaataatttaacatatttaatacaaacgaatattacaagaatcgtgtttcatctattcaggtcacgtgtttgacaattccgaaccctatttttatatactatgatattgtagttgcaaaaccattattcagttaacgtgcaacttaattgcaaataaaaatattaaatgtgaatgtgtattcgtaagaaactatttgtcatcagtatttttttttgtcactgatcaataattacttgtatcttaatagtaatatgtggagaaataattgttagcaaaatattaatgcaagagtaatgcaactgttatgaaacattaaaaattataatagtgtttccacgtacgtaactctatctacatgtctcttcatgatttaatatgaacaaatttaccattgaaaatttggaaaacaataaaagtttacctaggattaacattttactatattgttgatgtaatttttttcttttttggattatacttgagttaattgtttgggaactccagttcaacaatttttgagatctgcattttatggatcagaaaattgaagttagaacattagt

SEQ ID NO: 123678 - DNA, 1459 bp, Cannabis sativa
tttttcttcttataattatagttttgtttggtttcaaactactaatggcattgttattttggaagagtgatgctatttcaaaatgaaagatttttgagtgtagaagttttttctttttgttaggatttgagtgtacaagttgaatattctactcaatagtaaatttaatcacattttgcatgggaaaaccactttaatcacttggtactcaagtgacccaattattgcagggttattattttatgggaaaaataaagaataaaaaaaaatatggggaatatagtttagagtaagtaactagttatttcggtatcttatattatttttctcaaattttctatttttttttttaaaaaaaaaaattcccataaattttttggtacaaaaccatattgttgaaaacttttgccataaaaattaaaattctccttttatttttatactactctctttttcatatttgattgtagggtaatttgtattgtaaatacttatataaatttaatttttaaccgtagtaatatttaagttatattttgtagtacttttataggtatctagtggtcaaatatcaagttaatagctgtgtcagtttttattggtttatttaaagaaatttttaaataaaaaataaaattttaatgactttgactatttagagaatgttatgtggtgttgatttgatatttaatggataggtatttatgaaagtttcaaaatataatgtgaaaatacatatgatcctactggtggggctttacttctgttgctatgattggttgagtacaccataaagaatgatttttttttattttttttgaaatcataaatgaatgaatttggttgtacataattttcttcctcttctattatcttcatgctttgtttttttttttaaaaaaaaaaaattgatcaaaaaacaaagaggttacaaatctaaatagaaaggttacaaattttaatatggatttgtaacctatggaccaaacttaatcatatgtaatcaagaaactaattacatttggagggttctgtaagaggatgtttctagctgatagaaattgatgaaacaaacatttatttcagatgagaaccttagaattgaagttatatcggttgaggagattcaaagcttcaaaatgaagctcgaaaaccattcaagtgtgcatgtgattgtttttaacatttttcaacatggttcaaaatatttactccaggtgacatatcgtctagtgtcattttttagataaatattttgaaacatcaggcattcaatggggtaagttttctgatttttttaccttcatcaatccttcttacatgcttagtcacaacgaaataaaatttactgtccctaaattggtgtgccttctctgtttctattaattgtttcaggacacatcatctatacttattttacatgtattaattttggtaccgtttggtaacacttttattt

SEQ ID NO: 123679 - DNA, 1038 bp, Cannabis sativa
  modified_base (558)..(561): a, c, t, g, unknown or other
ttggtctctcaagatgaatcttgagcagagcaggggtatgatcaaacaatccttcattagcaaataacacttcagtcgtttgaaatctatctatccacttcttattaggaagaataaattcccatttttattaggaataatttcttcctaatttttattaggaagaactcgatcaattatagaataaattttatccgccccatcttgcttattactccatgtataaaacctcccactgtatttaacatcttctaattggcaatgattcacacattccaggaaagcattattcctattatgtcttactcgatctccaattctcttttctttagttagtatgtcgttaaaatctccaaaaagaacccattggcaattgaatatttttagagcttaagaaagtaacaatggcataaataatgaaataacaaacaagagatttttacgtggttcaggcgttagctatccttagtccacgagtccattttattaggctcgttggtcggcgattgtttatacaagtacaaatacaatggacttttactcctttccaccgtgttnnnnttgaagaagaggaagcttagtaggtatattcgagagttaatagtagggttacagaaatgtgtttgcttggtgtgatgaagcataagtcttcaattcaaaggagaaggtcttttttttaaaaaaaaaagtcctccctcttgtcctttttctagggtatttataggccaacttctttgcatggattgtcttcgatggatcactgtagggatgaaatcctactgtgagattggtaggtggcatatttctcatgtggcttttaagggtgttaaatcgtaccggctgtacaagttgggcctcggatgcgtgtcacctcagggtcattcttatttaaatttccctcattcctagccattggatcatttagctcaatacacaaggacacgcatgctctatacgattgtgtgttgtgggagacaaactctgacatcatacatgaaaaagcctggtcactaggtctgtagcctgacacgcgtgggc

SEQ ID NO: 123680 - DNA, 956 bp, Cannabis sativa
ggggttatatcttaagaggaggaaaatgaaatttaagatggataaaataaaaatttgaaatttaagatgcaggaaatgaaatttcagatttgaaacgcgtgaaatatattgaagcatggaaattactaacggtctaaaaccatcagttatactggcaacggttttatcattgcttatagtatagtcgacgggtttaaaccgttggcaattccctttacaaatgcatgagattttttttaaggcacgtttgaaaaccgtcacctacatacctcacatcagtttaaaactgtgaggaatactttatttttcacgacggttctaaatacttgcttaacttttttagtgacggttctaaaaaaaaaaaaacatttttaaaattgtcctgaatacccatttttgcaggagtgatggggtttggcgtttatttttattgttttgaagaatattaatagggacatactaatgacgacgtatcaatccatgtttaatgatattgtcctcagtggtaattttagggggaaaaagcccacccattccaactattgtttttcataaaaaaaaaaaaaaaaaaaaacatatatttaatatatttatcaatgatgatttgtggtcattaataaataagtcgtcattaatagtttatgtcactattaatgaattattttatatataaaaaaaaaatacatttttatcatcgacgacagtcaaataatatcgatgatactcatacttttagtgatgactttatactggtgatacccttattcttgtaatgaatggtctttcttttctctggtgcgtctcttattgcactggtgttttcaagcctcatgttatggaggctgtggccttggctcatgggcttttcttgtgtcttccgttgggttataagaaggttactctcttagataaattaacaattaacccaagatctatttgtatataacatagaacac

SEQ ID NO: 123681 - DNA, 2027 bp, Cannabis sativa
aaaaaaaaaaaaaaaaataaacctcaatgcaagagaacatcattaatcccttcaaatgtattagggattcaatcattctcatcataaacaacacttcaaagttagcaatctaacataaaatctaccaccgtccagtccaaaaacttcaaagtcacctgttgaatgtgtttttttcttcttttatttattattaaaataattaattaataatttatccccacttttctctccattaacgcataactacctgtcactcacctgaaaaatctgccaaaatttacagagaagtattactacgtatctttcaagaaatttttacagggtaagtattaggattattcctattttcttttcatcaatttaaacatcttttttttttttcaaataaattttcttattttgtctttggtccactttgatctaggctttctaagccacaaaatatcttcaaaattgagatatagccaaacgaaaaataagagaatttaatgtctccatgccgttatgctatccaattccttatagattttatgtttctctttgattccttagatttcagaaaataagtcaatatgagagtgcataatcaaagagaaagatataaaaaatcttaacaaaaaagaaaaaaaaaattgttatgctgtcaattttttattaatgatttttatatttctctttaatttcttagatttcagaaaataagttaatatagaatgcataatgaagttaaaaatcttaaataataaaaaaataatgttgtcaaaattctcattaagaatcaccataatcaaagagaaataaaattatttgtatatctcatacctcattcaaatatactaacacaaaatggtataaaaactgttatcaagatacttgactaaaccaatcctggtgaagttgaaaaaagtcaatctgtgagagaataagtatatgagggaagtaaaaagctaattgaatttgggactctttgaaatcaaagctttatatatatgcatggtttatatatgtgtgcatagcaaaataattccaaatcaaattggaggaaactctgactttgtttatgatagccactctcatatttatatatacatatattgacaagaataatatatatatatatatatatatatttcaagagagctagcatactaaaaatttcgatttgtgtatactgttggaatatctgatgtgtgaaatatatatatattatatatatatcaaagaatgacaagttatgtcattaaagcacaaaatgcacaatcatttcaatgagaagagttgaaattatatgtgtcaaataaaattttcaatatttgacaaaaaaacaaaaatgactaaaaaaaaatagtcataattcttgttaaaatatcattcttaaatattatgggatttaattccataatagaagattcaaattacttttgtaaagacagaaagtctcaaataaatttgaattttatttcacaattctcttcaaaattgaattgtaattcaagtaatttttaaatttattcatgtgagactaaaaatgagtttcaatctaaaataaactcaatgtctccaaagaatacaagataaaaaataatctaacagtatgaactacgtttgatttgatcccatcttgggtaagtaggcaacctaattgttaagattaggtacaatcacaaatcctcaaaatcttaaatgaggtcagtcacctcatcaaatccgaaatgaggtcattcaccttaaaaattttaaatgaggtcatttacctcaaaaatattaaatgaggtcatttacctcaagatctcaaagtgatttaattcacctcataattatcaaaacacctcattaaaactacgtttgacttgatttctataagaggatacgtaggcaacttagttgctaagactaagtgcagtcgctgatactacaaaatgatataaaacataaatcttaaaattccataaaaggtcatacacctagggatttttccaaatttttaaataacaaaggattcatgaaagtagtcatctaccagaatc

SEQ ID NO: 123682 - DNA, 1186 bp, Cannabis sativa
ttaccagtcgttttattataattttattttttttattagtttgttgtaacaaaaactttaaaaaaataaataaaaattagaaaactttaaagttgttgaattagattattttctagcagtaatacattcatagggacatgaatgtacttacacagaatgtattccgtgatgtatggtagccgttagatgaatgagttatttgatctgagggttgagattgatctagaggtaattagggttaaaaaatagtaacgtctgacactcatcttatgtatattaagacccatctaatgcacacggagtaccttaagacccatttaatgcaccacggaatacattccgtgaaagtacaatcacaagataaaatcgtatccctacattcataatatgagattaacttaatacatttttttaaaatttattttttaaaaaaatgataatttttcacataattgagagctatatatcatgagagatgagtgtgtgtgtgtttttcattgttgatcaatttaaagagttgatttgtttctcttttgtcttttctgcttctttgggattttgtgttcataattgacaaaatgactaatggtaagtccaaaagagaagataaataatagcagaaaaaggctgtaatgcacatggtgggtggggtaattaaggttgctttaattagtttacccactttatattatgtgaacaaattcaatttttttctattgtagtaattgtgttaaaattatgaacaatttttatgattttggtatagtgattgtaattagcaaattatggttaaattactgcatatcccaatcataaatgacttcaagatagctttaagctttagtcttgaaagtccacttattttgaaaacttaggaggtggttgtcatggcttttagaaactatttttgaaaattattttcgaatttttgaaactttaaatagatttggagaattttcaaaaataccattttttatatattttatttacaattttatgatttaatttttttatttataaaaatatgtttgtaaaattttaaaattacaaaaatatattttactcagcacagagtaaaaaaaagcaaaaaatcaaactcacaataactataaaacaaccaaaaacaactagaaaaataactttacgacaactataaataaactaaaataaataccattttggaccc

SEQ ID NO: 123683 - DNA, 525 bp, Cannabis sativa
ttggggggccatgagtcatgacctctccacatattcagctatcaatactttcatttaatctgatatggagtattgatcaatagttttgttgactgttcaaatcaacactttctttaattaataacctttgattaccatatgagcattactcttaggcacaagtgtctaacacattctccacagttggaccaataagacatatatagaagagtgcttgacactacaggtaccttttagtatttctcttaccatatatgtatttttttgtcttagaattaatacataaaattgacttctttggtaggctcacccatcagtggtgagggagcaaagaaatctgtgggaatggagattactcgatcatgaaaaatccttagtacatttaatatatttgggaccaaaaaatttatattctaattgagagattataactaaatagagttacattaaaaaaaaattaaaataccaaaaaatatcaatgtaacaataataacaataaacatcattaatactatatcataattg

SEQ ID NO: 123684 - DNA, 869 bp, Cannabis sativa
tggcaaaagacaagagtcaacccgagccgtattgttgaagaaataaaatggacactcaagattcggattgatagggtaatgcctaaaaagattaagaacaatgatagagaatgggttcttgcattatagatcacaaaaacaatcttgattttcgattgatatattcttgtacatagatttcggccctatttgggtgcgcataggttgtataaagctagttttgtgcaatacaattcattaatttatcaaaaaaaaaacaaaaaacaataaaaggattattttttaatattcaataaaaatttatattgcattcacttaagaaaatataactacttacgtaatattaattttatcaatcaccacataaaaaataaataatactaaattttaagacaagataaagtgaaagattaaatatctatatataacttaaaagtataaactcactatggtttttaaattatgtggaactttttcaaaaggacgcaactactattaaacctatagagattgctgaaaaagaaaataaaattaaaaaattaaaaaattctacaaattagagaacatgaattattagaaggagagatgccacatggcctccttatgattctccgttatatatttatatagatttggagaatggtgtcatgctaatcaagttgaagtctaaagctgtttattgagctattcataaaatagtcaatccaatccgtacgatttaatccactctaatctgcaaaatacggataattgcacttttgcggattgtattcgattggaatattcaaaatttgaacttgtgcggattggatgttgattgacatgtaaaagtaaccgatttgaattcaatccacacatatttataaaaa

SEQ ID NO: 123685 - DNA, 1057 bp, Cannabis sativa
taaaataatttccaacaggtgggggcatgcatgtggctgcctcctcgcaattgccaaaattttgaacgacttggattggaatttcaacacaattatccagaactacttccaaattacctaaaaattccttggaggcaaacttctgaatttcttccctttttcttcctcttcttgtcttgactcgcgaagcccttttagtcgaagtcatgcctttatcaacgccattgagtctctttcgtgatcccttccatcgtcatccctctggactttcttccattccgatacaaaatctcggttcctcattgacctcctccactgggcgactgcttcccttatctttctccacggaagtaggacaacttggtagggggaagtcaatcactgctggtacaggatcaaaccatgtatgtggctttcgtttcttgcttccccataagtgaagaatcatcatggacaaatctagtgaattagaaattaaagaagcttgggccttgtagagatctgtgtaatccgatccataaagttgtagaaacatcttttgggcttcaggatcattgttgggccatttaataggggtaggtttaggaaactcatgtggcctttgtgatctgcacaaccaagaatgtggtatttctaaactttgtgcaattgaaggcccaatgtcagggatccactttatcattcacaaaagaaaagtctggtgttggtaaatctaaataatgaggcccacgatcattattcaaaatttccatctatccattaaccacgttttccacattttgcctcgtgtcaatcgtaccttccataattccattcgacaccaaaacacgttcattctctgtactctgattgtcaaccgaatcagagtagtggaggtgcctcctcgtactattttatgtttttgacagctcaccatctcctcgccgatgctctcctcctcgatagtaccccggttatcttttgttttaccggtgataagtcggtctccatttttagcagtattgaaaataactaaatagacatttttaatatcattttctaaccttataatttaata

SEQ ID NO: 123686 - DNA, 2020 bp, Cannabis sativa
atttgttctttttatttttcctgaatgtaagtcactatgatcttcaattttaggacaaacgagcgtacctatcttgttgtgtgttaaatcaagagttcgtacagatctttccaaattgaggacttcttctggcaatgtctatttcacattaaagggaaaacaaatgagaacataacaaataaaacaacacagaaaacctccaaagcatcttgtcagaagccttgtagattcaggaatctgggaaattattagagtttatagtttcttcacagtatgtactagggaagctcagctttgtggtgagtttttcctcttagccttctatacatgttcatcagaaaataaatgaacatgaaaaaagtatggatattccatcagtattattttgtacacagtacatttacttattccattttttctattgttttgtgtacaaagtagcgtaaccaatgaatggtgtttattaatgtactaattaattatagaccgattagtagtgatgtagaacgacagatgccatgtctaagttttcaatattaagaaaaaaaggaaaataaaaacttgagcaatgtgaatttgacatttagacaacgattttatcaaaatatttgttgcagctcaattttcaatttgttcatttaagtatataacaatatctatatttaatcaaagatagacaagcaagtcaacagtgaaaatgatggagctgaaaaatctgtagagcaagagaagtagagagccatcatgaatgattgcaatgcaacctaaattctcagtcgacgacttaaacatctgcatttaagcttgggaaattcaacacttgaaagagtaataaaggaccaactataaacaataacaataccaaattttacattaaaagcgcagaactgtgaaactttattccatcttgacttaaactttaatactttttcaaataataatattaatataaaacctacgttaaaatcaaactttagcccgatcactttaccaatttcccataataactagatacccttattttattttctttcagaactcaatcgaaacccaattcaaaccaaaactataagcaaacctttctcataatcccaacaagtaaaaaaaaaaaaaacccaaataaaataaagaaagacaacgaaactgaatagatattttattcaaaagatgaaaacgaaagagcaaagtaccttcaatttggagtcacgcagagcgacaataccagtggatcgccatcgatttagcctactggctttggagtctgcgtgttggctggaacagcaacccatttcgggcgcagagagagaggttgaatagaggtgttaggcttgtttgtggttttgagaggaagaagatgagggggggtaaatggatgggaggggcgaggcaaggcaatggcgagaaagggtcaaagtcaaggaagacaataagagtcagccagagagagattgtgttgtataaaccagaaaaccaaaccgcgtttttctttctctgctgcttcttcttacgctcctatctgcgctgcttagcttaacattttcaatttgttctctacacgagctaatatcaattctatataaaacgtggatatacaaaacaatttttggtttaagggtgtttttaaattttttttaacaggatatttcaattacttacgaagcatttggaataaagtattcaaaataatttaattatagaaaatattactaaggagaatataattataaaaaaatatattgtatttagttgtgtaggataatatgtaattaggaaataggaaataaatcgtgcttcgcgtgaggttacaatttgtttattgataactaagttataaaaatatattaaagttgatatttttgtaataactagcaaaaagttacgtgcgaggcacctatactaaattttatgctattttcttttacgttatcaaaaagtgatacaattaaaaattaaacaaaaatattattagttattaggttcaacatcattaccatgtgttcatttttaaggaaaaaaatat

SEQ ID NO: 123687 - DNA, 2193 bp, Cannabis sativa
  modified_base (71)..(73): a, c, t, g, unknown or other
tgtgccaacgaggcatcctgctcgatctatcttcccgagcagatgcttcaagtggactccacgtgtcaccnnnctcgtgatgccacgtcagagtgaaaaatttggcatagcagtatgaactccgatggacatagcttggttctatttaggaatctattaggaggtggccacgaataatggtagacaccatggcttaccagagcgtgaagttgtttccatttagcttcacaatgaaaggctggttgagtgtgcttctaaagggagaaaaagtgttggatgactgcttgaagcagaggaagaactttgtttggttgttgttgattgtgcatcgctctgagtagtagaggtagttggtggagtctgatcgtttcctgtagacatggaagcgttggccttttctagctctaacaccaagtgaggaaaataggagaaataggtttttaggaatattcaacttaaatgtagttgatgcattatatttctttatatagccatttaggcgtgtacaaaattaaagaatggcctctaagaccttgacacgtattaaaaaaagaataacagaatgagaaaaatatcctaataaatttaattgtgtgttgattacattaggaccacagtgacacttggtgcattctgttgcagtagccgttatggcttcatcttccaatatgacctcattcccttatattttttatagagaattagagagtatattctccttgctcaaacatttgatcataatttttttgcaacattttcttagcttttaatattaaacaattgttttgagtatcactaatgcatataagaattggttgttcataatagtagagagtgactctaaaataactgttataactttaaaggataatcttctagatgggagatagctaatgttatacccgaaatttgtctgcacttcagaggttgacacgtgtccaatagagggaagacaaaacaattttgaatgagacagcgatatcattaagtgcatattaaataacttatttattaaataaaggttaaatagataatattcaaaatacattgactttattgtcaattgcgagacaagaatagtaactattaatctaagaataacgagacatatatatgccttcgaataaactgacaagaaaggataagtcatccatccaagcagagtgagtatatcaacataagatgcctcgcatttcatacagcgagaagatcgcctcacattacaaatgtcataaagaggacaaagcgagatgggaaccttcccaacacttagcatattttttttattaagatggacaaagaagataactcaaatcagagaagaaataaccttccacgtcagcaataactatctaaaggataaaactaaagaacggttggatagtttcttagtattattctacatataatttaaatgaaacgtgggaattgtccacgtttcagaacactcatatttaaatcaatcccaaaaagaataactaccaacctatactcctataaataagggcagatttcatgggaaaaacaacggcgaaattgagagagaaaatactattattcaaattctaatattgtattctgtactcaataaatatccctagtaagaaggactcgtggagtatgtagattttaactacaaaactacgtaaaaatatctggtgttatctaatcatttattatttattaatttctgtaaaatatttattactcaaagagtatttaattttggttaacaaaaatctgcgttaagagctaacactatctatcattgtactattttgagtaactactcttttatttcttgtaactgttataagattgcttgtacctttaacaccacagcctataatgtggctcaatggacattagttcatgatgtttcagattttgttgagcgaagctagctctcagatcatattcactagagatcttatggcctaactgtttgatttttaaatttatatatatatatatatatgaacacttcttttttgaaaaaaaaaataaagtcaagtaataagaatctctctctttcttcctatttggtaccattgtcttcttatgctcgcattttcttgaaataacaccttttttgtatgtttatgtgtatatatatatactagattgatgttacttgaaatgcacgtataattagtttttttttttttaattaggttcaattagatgatgtta

SEQ ID NO: 123688 - DNA, 886 bp, Cannabis sativa
aattattaattaagaaaaaatcttacaaaagtgaatatatatcaatggtgtgatttcatctattggttatcatttagttattatttttttttaaaaaaaatataattgtttcatcactaattattatgattagatccttttaaaaaaaaattattatgattagatggataagtttgcttactcgtaattattgacttattagatacataatttatcataaagatacaaaaacacaacaaccaatgaaaatagacatattaaattaaaaaaaattaataactcaaagttacccatttctttcactaacatatatagcttaattaattagtcttaagcttagagtagtttctctatcaaagaacaacaaaactataataaatataactaattatatataatgaaccaattgcagtaagaagagttagtgttatcctagtacatattgtgtaaatgtatatattatatttaagtaattagtaaaaataagttgtttttaaatattatattttgataagtagattattgtaaaattcttaattggtcctataatatagtgttcaactcaattagtattttattttttttttttaaaaaaaaaaaaaaaactctataatacatcggagctgaatcttttatcctaactaatgaaggaaacaaataattcaccaccgactttgtggatacctaatataactattagtaaaagtacatatatgtatacataacatagatcgactttgagatttagtgagccttaataaagatatcaattgaacctaattagaaaaatatatggtattttaaaaaattactatagaaaatatacatattgttgctatatttttaaacactacgcaagtatacgcaatcaagtagtaaatctcac

SEQ ID NO: 123689 - DNA, 849 bp, Cannabis sativa
aactaataaaatacttattaattgttattagtttgttagatagattataaatccttttattattattacataagaaaaattagaaaaaaccacaaattttgaaaattaaaatcctaaaatattaaattgccacattattgtggttaacgacagaattatatagatatatagatttgctcaagagttttgttgattttctaacgtaacattctggtgtcccaccgccatagttctaaggatagttgactatagtgacacgtatgtagccaataattattcccacatgttggaagggaagaaaaagggcacacatatggctagtttaccagcgcctacaatagattagagtatttttttttagttaaattttagagaatatttattgaggtagatagtttatttggtaaaatatgggagtactacaccattaggaaaaaaaaattctttctagaaatttacattgatactattgttttttttttatttttaaaaaaacaataaaaaattatagtaaataaagttattttttcaagtttatatatctattatatataaagtataactatataacaaaattcttaaagtgtagctatgtaacagaatttttggtttaatagaatttttttggatctcaattacttagcagaatattctttattaattttataatattattatatgtatttaaaaataaaaattatttatattttagatgaaaaaaatttaatagtttaacggagtttttttaatttctactttaactttaacagaatatcttaattacttaatagaatattctttattaattttataatattattatatgtatttaaaaataaaaattattta

SEQ ID NO: 123690 - DNA, 1331 bp, Cannabis sativa
cattcctgtaaattttttaaaaaattcaagtagtttacagtgccgaaagtaggtttgaagttttttgaatatgcgtggtatactagaatattaagaactctatttttagtatcgtaaattatttgcaatttttaaaaatttatagggatcatattgaaactataacgaatattgttatgaaaaaaatataaaaaatattttgacatgtaatttcaagcgtagaagttgactaaaaagttataataggaggttgtaattagctctcagttttttttttagggagattatttacactccagaaaatgagagttttttctttaggagcaaaattgagagttttatgtggagttttatttccaatccaaaatcttataaagccactcaatttttataaatacaattgttgacccgaaaaatagtcaattgatgcggagtcatgaaaaacaataataaaaaaaataaataaaaggtagcaatgatgataaacatgacgatactagtttttatagagttcatcacagatttcaacgataataacttactctttttttagttgtatttatctttagttctacactcaagtgagtttcttgataacaaagagaattacaaatatttttctttagagtttttgcttacgaaagattgttcaccccttctaaggtgatggaaggttagtatatatagggatggaggaatcaatcagcattaattgcacaaatttgcaccccaattaattttctatatttgtggaattggataagatcgaatcattagggatctttagtgttattctgatttatgcaccatgatgtggcaatagaattggatgacatgtgtcccatattttcgatacctgggtggaggaaaatataaatgactacacaacatttgtaacattcaaacatctgagcaggatggttgaagtgatgtccgactaagatgcatatgtgcttatgccgagcgaagcatgagagatgacaattccagagatgaatctcgttgtgtccaaacgcgaagacaatccctataattacgagattgagttagagagtaacaacaacacattccagtttcctatttcttagattgtaattatggaattaatgtagtttcctattttactcattataagcaaaagggaaactatccctcatgtatcaagtccctataaatagtggctagactcactatgagggggtggagagaattgcttcagaaatacattcaagagtgaaacgaatgacctaagagagaatgtttctcaaagatcaaattgtaagagctttcaagaggaagaacacttcgttccttctctcaagtcaatacaa

SEQ ID NO: 123691 - DNA, 840 bp, Cannabis sativa
ttgctggtgaactttccctttttcccattgccttgcctgttatttttgttagaccttttaccgcccgagtttgaattgcttgggtactgagggagctggacagatgttccagcgagggagtttgtgattggttcgatataagctcgacttctgcccgctgattggcttcttcaagtttgatgaaaccatctgcgcggtcgaggaagtcactcagaatctactggttcgtctctcttgatatccttccaaagctctctgagaactttgatgccccccagtattcggttaatttcccttcttcggttaactatgcaactttcgttgcctgtgtcatgaacatgctgatatatgctcggagaggttgtcctggcctttgcttcactttgaccaggtcctctaaatgcaatgggagttggcgagaagaagagaattgtgcatggaattccgaggagaaagccttccacgagttgaaccttcctggtgtcaacttgaaataccatttcgaggcggcttcggagagtgtggcagggaaaactctacaacatacatctcctcgtactccttgtaggtccatttgcatttcaaaatatttgagatgtcataagagatcttctttcccagtatacatcttccaggtcggcatcttgaacttttgaggtaactctaggacattgatctctggagaaaaaaggaatccacgtgctcagtccaactctagatcattgttcttctgtccggccaggccttggaacatatttttcagttcatccaactgtgcctgcacggatggatgaacttgttcggcctcttggctgaccaaggtcacgtcaggatctcttt

SEQ ID NO: 123692 - DNA, 844 bp, Cannabis sativa
tggggcccattcttgcttacattagacctctcattggtcccttttaaataaataaacgacactaacaacattttgttcttcagcctagctagtttgccaacagcagccgagtcagaatcagaaagcttgtggtgtcgttttcgttctgtcactatatacttcaccaagtataatatttgtattattatatgttttttatggagtgtatttttttccatttcaaaatcataaaggcaatttattaagggaatgttaacgtaccagaagaaaaaaaacagcagatgaaattaacagccatgtttctagtacacatgaatgggatatttataatagtattagaaaatttagaactggaacttatttctttgtatttatgtgattctatagacccttagctaagatagtgaatctttctttgtcatgtttcgaattgcaacattcaaactgtaattctctagtcacaaccccatcaccaaatcccaactcttattataattggagattttaaaatacaaattttaatactgattggtgaatttggtttgaatgtctcatagatataattattaaaattaaagttaaaataataactaaaaataatttttataaaaagtactttcacataagaattaatttgattaaaatgtaatattaattaatttaaaaataactattttttattaattataatataatcctaatcagggccggtcctgaaacaaagtggaccatagaaaatttttttatttttggacccttatgttagaaaaaatgtagtattttttaaagtcaataaaaaaaatataattttaaaaggggaaaaaaatttttgggcccctgggct

SEQ ID NO: 123693 - DNA, 1695 bp, Cannabis sativa
  modified_base (1637)..(1649): a, c, t, g, unknown or other
tatgaatctaaatcgagtgcaaatcgagagagaaaatttcaaattttcaaaatattaattgtcagaccataacatggttgacattgcttttagtcaacgacacttattcattaaaactatttaattgaatgatcaattactaataaaacacaagaatttatagaggttcatccccataataattatgataatagcctaaagaattattcagatcacaaggtccagccaagtgagttttttaacattctcgaaaaaaaaaacttactatttttccggcagcataatagctcttcgaaagttaaaaaaaaatatttacataatagactaaaaatttaagaaaaaaaacttacaaaaatacgtcagaaaaatttcatttttactctttgaaaatttttaattacaaaaatacctcttcagttaaaataataaataatttttctagttattttatagttgatttatagttgtcgtgatgttgatttctcattattttttagttgtatttttttactttttactgagcaaagtgtatttttataattttaaaactttacaagtatattttttgtaactaaaactttaggccgtaaaattgtaaataatatatatttttttaaaatttcctttaaaaatgaatcccctcacagtggaatgtaattcactatttatagaaaaaatacaagaggtaatgtatcgaaaaaataggagaagaattcaaagatctaaatagtaaatcctagattatctcaataaaataaatctcataaaaatagggattttaaccaaactatagttgtagagatatttaaggaaaatatcttatgagatcttctcttaccgcgttcctctgtatggagtatggataagcttggcatgtttaattcgttgggagaagtgcaaggcatggaccttgctcagcttggctctgaactaccctggacgttaccctgagtgcttatatcacatccaactattaacataccgggcacgtgctacactgctaagtgccacgtcacattgtccacttcttattttaaagcttcaaatttgactgggtcaaggggacatcttttctactgtacgacaggcatatctttattgacgttcaaaacatgggtaataacgtttggactaatgtcggtcatatctttgtgagtccatgcaaagacatttgctgactccttaatggtctccaaaatttcatttcatttgtcaaaattaaggcctttcccaactcgaataaccttggttggatcctgaccacatatttgaattttttctacttcttccataggttcaagagaggcctcgactcccacttggggatccaattcatcctgtatctccactaggtatcctttttttgcaatttggaccatgatgacggcttgcttggtggctacattgtagcattttcttgctttctcttggtttcctcgaataattcccactcccacagaattggtaaagaattttaggcacaagtgcttgatcgaggttatagcaccaaaatccaccaacacaaggcgtcccatgatggtgttaaaagttgttggacaatctaccatgatgaagttacattacttaaatgtacttcgaggagtgtcaggacacaggtgttgggttttatgccctannnnnnnnnnnnntcaatataatcagatttacttgttaatatagatcagaaataacatt

SEQ ID NO: 123694 - DNA, 800 bp, Cannabis sativa
tcacacattcaattaattttattgtacataagttaactaacacttctttgaccaaaaaaaaaaaggtaaacttacacttttctggtttattaacctaattagcttagtaaacttccattcaaaaaaaaaatattaacttagtaaaataattaaaaaatattagtttaatttgaactcaaggcaaaaatgtatattagtggtggtcgtgatataattttttcttttagaaataaaaattattgaattgttctaaattaaataaagtttagcttatagtactaaacatataatttaaaaataatttgttgtcttcatatattttttttaatttattttataggtatgtaaatttaaatactttaatgtaaactattttgaattcttaaaaaatttattggaaaattctgtgattactgaatcctgattactttaaaagccattattaactaatatatttttgggaagaaaaaaaaaatatttactaattttaatacaaataacctaagaatgagaaagtatacatatattttatcgtcatttaatgttgaaagtaaattttcattctttgtcgctgacagttggatagagtattattaatgttattttttttttattttttttttttttgaaagggtattattaatgttattattttcccattaaaaattcaaagtgtcatctctatcacgtttcaaacttcaaaggcactcagtctactgacttcttccattttttttttttctttttaaaatatttaaattaaaaatagggttatttacaaaaatatgggaaaataaaga

SEQ ID NO: 123695 - DNA, 680 bp, Cannabis sativa
  modified_base (273)..(275): a, c, t, g, unknown or other
agttaagaagatttgatattaaaagagttaattgtggtaaaattcttaacttttttactttactaataattaacccttaaaacttaatttttaatggtaggaactctcaaaattcatgttgcagtttgtcattttcattaatttaattttggagttgttaagtgtcatattattaaacagttcgtgtgtgtatggtatgttgtctacgtgaatccacgtgacacaattttattaatctatgtaaataattatttaaaaattaaaaattaaaannnaaataatttaaaattaaaaaaaatcaattttaaaacaaataaaaatgattttctcctcctcttttcttctccttttctttctttgttatagatcattgttctttctcgcttttttttttcaattttaatttcgctttatatcgttgccgcaccaccactgccatcaccactactgcaccctatttttcatatttaaattacagaaaaaaataacttaaaacaaaatcaaatcaaacttcagatttatttccccaccaaataaatattttaaaataaaatatacatatttattatgtataaaggttgattatttattataatataattataaataaaatatatttatttaaattaaatacatagaaataataaatatatatatgtgtgatatttaaaatatacacg

SEQ ID NO: 123696 - DNA, 887 bp, Cannabis sativa
  modified_base (49)..(60): a, c, t, g, unknown or other
attttttggaaaaccgtaaaaatgtaaaaaaaatattctttgaacgtannnnnnnnnnnnttttacaaaaaatggtgccttatataattattcctatttaaaacatacctaagtttgaagtcctaagtccaggtccagagtcggggtcaaaattcagagtacggcgagaggagaggaagaaaaagagaaggagaagataatgagagggatatttttagtaaaaaagaaaataaatttctattatgtattatgagaaggattgttttgataggagttggtgattttagcatggtaaagtgaaattttccacgtaaaattctatttggtgagttccactcgtattgataagactaaatttgggaaaaaattactaaactttgggtgaaactaattatctcaactattaagaggttgtaattagcattcttggttgtagcgataatattactacagttcttacacttaaaagctggttttctatttgccatctcaaaagatgcggggtttggatctccgtcggtttgaagacatgaacaaaactctttttaacaaaatttgcttggttcgaatgcactaagcatgaagttccgtggattagaaatgttttacttttcctatttttcttgaaattattaatttatttaatgtttttgattttatcaaatttttttatgttaagagaacttgtaacctcttctttgttttcttactttgttatgttgtcgtgaatgaaatttttattgcatcttataagtgtagagccattatactaatttagaaaactaatcaattgtactaattttgataataacgtatgtaatgagtttttagtttttttttttttttaatcaaagtaattttaatttttagttttatactctttgata

SEQ ID NO: 123697 - DNA, 770 bp, Cannabis sativa
gaagctttgagttggattaaggtgaaaaactggtctaattatgtggttgtcgaatctgcttcacttattgcaattcaggctatcacaagttctttttctatgccttctgtttttggtcttttgatttctgattgtaaaaagttgttaaactgtctggttaatgtgtctatttcttttgttacgcggtctgctaacaaaaccgctcattgtcttactcacggttcttgttattggtcagatcgcttgtttaatgtcaacaatatttctagtgttgtacattcctctataatagttaatttacctattatatgtttatgaagttcaccttgtattaaaaaaaaaaaattatgataaaaattatcttacaaaaataaaagactatatagtaattccacatttatggtatcttgtagaactttttcctccatttatttattagtggagaaatttttgagtaacctctcgtgtattcttctctccactaaacactaattttttttcttcttcacttttctctcttactttttttttttctttcatttttcttctagattactctaggtttgtctagccctaattacaaagaaataaaaacattatattctatggaaatcatacgccataagataattaatcgaccaacctaacgaaaagtatctcaccaaattccttttttttttttttgtgaaaaagttcatgtattccaattttgaagcatatgaaaatccatatatatatagtaaataatattttggaccctctgttttaca

SEQ ID NO: 123698 - DNA, 1086 bp, Cannabis sativa
ttgtactgctgggatctgtgatggttgttgcatttgtggcatcggcatcatatgcaactagctcacattactgagttgagtcttatagtttagaaaacagatagccacagtccatagtttaaatttttcttctcttctccagcaatttctcgagagctaacccaaacaagaaatcaaaatcagatcaaagaaagagaatcatcatcgtacctgaaagcaaaccaaaagccagaagtcgatgtacgttgctggagcaatcatcgatatttctaattgttgatggataaatcaccgaagcaagttgctgagcaattgtcgatggagcagtcattgaagcaattggctgagaaatcgtctatgaagagcagtcagcaaagcaattaattggctccgacgtcgtgatgcctccggctacaaacatagtaaccccaaaaaaattgtgatatgtatttttagattaatgatatgagatagagatagagataaatctagatttagaaataaaacttaccgaggatcgtcgaagggatcaccggttgggtgctcggtcggagaggtgctgggccatggtcggagatggaaggagggttggagatgaaagagaatggcagctgtgtctgaaatggtgaaatggtgatgtttaattttttagggaggtaagaatcccattttaatttgcaaaaaaaaaaagacaaaaaaaattaggaacgaaaaaaaatatatcctattttcacatcggatgagaatattgtcattccaaataatcatttaattatttttaaaataaaccaaattgttactatcaaaaaaaatatttcgtcgttcctgatattgtcgcccctgaaaccctcatttgttgtacaatgaagagatttataaaataagaataactttgactctcgcctaaatgggacatcattggattcttattttaatcgaaattatcctttatttttcttttagctttttatttagaaattgcttagatagtatatcattggatagatggtttataaatcaatgcttatgatgtcactcaaaatttctcttatgaaattgaatgacacagatgactatattcccgac

SEQ ID NO: 123699 - DNA, 1833 bp, Cannabis sativa
atcatcatttaactttgtaaactagatccaattaaagaacaagaaagtaaaatttaaaagggcatttctttattactctacaagcacaaactaacttcccatacctcctcggaactcccatttccagtgccatcaccccaaacctctccaccgccatctcctccatgttctgagttctcaacgccctcccctttcggcaccatcactatgagctcgccatcaacaaaggccgccctagcgagctccaatcatgtcgtctccggcaaccgaaacctccacatgtcgagttcgagctcatccaaggacaactccattgatccacttcctcaaaccacaatctttgtcaccccaggatggatttcgaccatgtgagccctcacatcgacgccgaaacccttcgactcagccacgaatcaaaagaaattagcgttctcctcaactaagacatcgacatctgactgaaatggtaactccaaaccccgactaaagacatgggggagccgctagaatttcttgtgggttagagcgactaaggcgttggtggtgctctgtaaggttatcaggacagacgtgagcgagagaggagagtgagtgagggaggagaagaggttttggggccaatgggttccatcgacggcaactagtggtcaaccgtctagttggctttgcagaggtgagtgagagaggagagtgagggaggcatgttttgttagggggtttctttttctttttgtttaatttttaattttttatttatttagtaaaaaaattatttatatatttttttaacaaaataaaatggttttaactattttttatttttaaataattaaattactcggatccataaaattgtgacacgtgtacaatgtatccacatggacatgcccacatggcaattaattgccaaaaatggatggaaaaggctaagtgctaacagaacatgagtttagggggttttaccaccaaaattttagaattagaagttagttgcaataaactaggcacttataaagattatgccacaaattactctaaaattaatgatatcttttcatttttataactcttgcatatataatactaattagggataacttttaaaaaacataaaaacaacaaagaaaaaaaattaaaaaatacggtttgtacaaaattttcaatatttttacagttttttagattttatttacataaaatacggtcttttgttatttttatattgtactcttgttattttgtagttaatttttttgttatttgtatttgtatattattttttttatgtagttttgatgttattttcttgctgtttcttcttacttttatattattttttttgtgtgtgtttttatacaataccgtaaaaatgtaaaaaaaaaaaaaaaacaaaaaactttgaacaaggaaaatgcaaaaattttataaaaattgatatttatgtaattattccaatattattatcttttaggctataacaaaaggaaaacccttcttgtttttgttttatttacatattttttattcaaaaaataaaaatttaaaacatttttatttttttttttggctaattaggatttttactctccgaactttaacatgtaccaaatcatgctcgtgaacttttaagttaaaaaatacaaatttttgtatctattaatcaaaaataccctcatattatatttttttttaaaaaaaatatacccattttttgagtagattgcccaatatacccatactgtttacttaagtcttgcatataatttacattaacttaaggggtctaatggagacatcatccataaaaagtgggtatatcttaaaggatataaa

SEQ ID NO: 123700 - DNA, 2466 bp, Cannabis sativa
  modified_base (2435)..(2440): a, c, t, g, unknown or other
tttagccgttaaaaattcttcctgaactattgagattgttggatttaagaacttttttctaattttagtaaaaaaaaaatctaatatcgatgaaagtccagggggcttgatttggtacatgtcaaagttcgagagggtatggtttggtagatatcaaagtctagggagcatgatttagcacatggacaatcattgaataagtaaaattgaatgaaattagacaaaagtccttaaatcaaccaatttcaatagttcaggagaatttttaacatctaaaaaatttcagggggcatgatttggtacatgtcaaagtttagggggcaaaaattctaattagccattttaatattctttaaatttatatttattttttttcatttttaaaactttaaatatttttttaaaaaattgaaaaatttaattagtttcctttaatttataaaattttaaaaaatacacaaaaaaactaaaaaataaactaagtatacgtgcaatgaacgtaacaataacctagtatctatatatcttaatataaaagaggggaatgaggtggtgacatggttgtctaaaatcacttcaaataagtttttctattctctccttgattctctccttttaataattttagattttattttttaaaaaaaaaattgaattaagcctaccaaattctattttctaatattttattaaaaaaatacatgaactaaccatacaagttctatttttagtctattttatttaattaagtttataaatgtcgttattaattaagaaaaaatataattcaaatattaatataattaataatgctaaaaagataaaaaaaaaaaatatataagaaaataaataaatatttataaacctaaattccaaaatatttaccaaaacctcttatctatactccaaaaatatttattactcttaaaattttgtaagataattatattttgcacggtcattattttttatcaataaacaaatatgtgattagagttttttggaaacaacgagttttcttcttcttttactaataatggttttcatcacaatattttatgtgtgatctattatagtgatgagatggtgttgtgataacagaattgaagtaatggcctatatgtttttttttttttttttatgtggcaaagtatacatttttatactttagtgtatctttagtaaagttgttctttaggatattttcatagttaatattatttatctcaaattttgaatgttgaggtagaacaatataactatgtgtttttagagatattttaaatttgtgttatatgattattaactcttttcttaaaaaaaaaataaataaataacttttaatcatgaatagtttttgtattctaaattgtcaaattttcattgtagggatttatcaaataatttattaaaataaattataaaattgtcttacacatataatttttcgtagctgttatttttttttttgtcatttttaacttaattttattaatttttatgtttttttttttcaaattgttactttggatgtagtgacgattacaagtgagatacggtgatgagagcacttttgtaatcatatgatggtagacctctttcaattttcaatttttaatcttttattcactataacatttgaagataactcttttattaagtgattatataaaaaaattaaattaaataagttaattaaaaatatttaaagcatactatttgaatttaaatttgattattagattcaattttatctattttcttattattaattaatagattttatttagtattttcatttatttttttaaaaaaatatattttagattcacttatatataaaagtgatcagtggcaaacttattgtttaatttattttatgtatagagaaaatctattggaaaatacagtaattaatgatattgactttgaatgtagtgatgactacaaatagatgttgtgatgacaacggttttaaaatcatatgataagctttttataaagtcatcaataattataattttttttgtatttcaaattaattgatttaaagaaaatacatatattataaaaactagctgtataataagatatatctataattaattaaaataattaaaaaagttaagatctaccatattaattaggagaattatctcatacactatttttttaatttttacggtttgggttgctatgtgaatttgagttgcaatttaggttttttcgttggtgactaggtgaattgcgatttcaaatgaagacttaatgaggattgttcaagatgataaatttattgttcatagagttgatccatttaaagataaaattggttttaatattagttttgagcagtgcgttaagttttctaaattattgatgagaacattgtcatgaatagggggttagtataaataccattttggaccctctgnnnnnnaaaagttaccaattgaaccctgtgtt

SEQ ID NO: 123701 - DNA, 1649 bp, Cannabis sativa
  modified_base (1574)..(1575): a, c, t, g, unknown or other
ttgtacatgtcatggcagcgggacctggagtgttcggtctcaggacatctaggatttccattttgtagtcgctgtgtgacctgagatttgtattttggatatttttgtaaaagtttaacaacgggatcccaacacttataaataatatattaaagtttataaaatcacatagttagtattaaaagttttaatttgacacaatttttgagaaaattccttggttagcaaagatagcactgcaattaaaaaatcactgcagcgtgccttagcattaggacattatagaaatagtgtacaaagttgtcctcaacttgcaaaaggctagcctccacactcaaaggctggcctcctctttgtggagctatcgtgacctgccatgtcctgccagaaccatggccagccaaacatccctgtaggtctatgggtggctaggattgacctggcaggactatatgtacaacccaaaacatggacctaaggcatgagcagggccctaaaagcccaacagaatggctgaacaatatctaaattcaagggcactttagtcttttgtaattatctaacaaattatgtaaatatctaggatttaaacttgtaatctagagtttaggccttctatataaaagcattaaccctagcctagaaacctaagtcactaagcctccaaattgttctaagtcaaaaccctagtctctctttgtctctctttgatacacgccccaaagggctctccctctcttctcttcatctctctcacacgcctctaaggtaatctcactctttcattagagacctgcctactgatttatgttttgtatccttataaagagctatatcaaatctcacctatagtgatctgaatagtattttctctagatatcaatacaaccaaaaggggagtagttcattacccgctaactaagggggtcaacctttataaaaattcttatctcgtttactttatcattttgtttgtgtaacacgtggcaatcatcagatgaatacgaacccattgtcagttaatcaatttttgaggtcaacaataattatatataataatgataatgaacttatataataatatataataatgaacaaaattttttgtttttttaaagtaaccaacagttaccttttaatctatatataataattattataatagttaataatatgtaatagatatatttatatagttgtaatattagtacatttataagatatgactaatagaagaattgtactaacttggattaaagtaatttttcttcttgtagttcctcgacaatggcaccaaaaacttgttgtgaccaaaaatggtacgtttcacatttatcaactcgcaagcgcacgaatctttattgtagtgtagagattgtgaagaatgaacccacggaaattgcgtgagatcaaataaaatacttatttaatctaagctaataaaactctaacctagttccaaaaatggtgaggtttttggtaacgaaataaactaaagtattttaactgtaaaaatgatagtaaaagattttgttagtgaaatttaggaatattattaagggttcagaatccanntaagtgtatataaaaatatttatgtttattttaattctttaatcagtaatcaaactaattattttctaacaaaa

SEQ ID NO: 123702 - DNA, 1646 bp, Cannabis sativa
catatatgtgttttcatgatcaaatgaacatcattggcattggcccaagagacagccatggacaatgtaaagactcttacaattaataatacacatatgatatattatatagatataactttgataaatgatgatatgggtttgtggttgtagatcaatatccatagagatccacaactaagatgagaatatcacaatgtgacaataacatctttcttcattcacattatttgatcatcaaaaaaaatccaaataattaattttcacacccaaaaaaaaaatgagctgaaattaatattgcataatttagccttacaaaacaaattggattatttagaaattgtttgacaaccattttaatatttcagatatagttttgaggttttgtttttagtactaagattggattaagccaaattaattatcaacaaaatacaacctgtaatttaacaataatgttgtattgttagaatatttactagattaatatgtatattatatgaataaatttcacatgagcttttccaaagttataaatttatctccacaaattccagttcttaattaaacttgctaattaaattaatatagacatttatatataatataaagtcttatatttaaaaaagggcacttgtcgttttgcaaataataaatcatttatttatattaatattaaaaaaattgttgggtagtagcactagtgtatgtgtatcctcttgacttaaaaaatattttcttttttcaaaactaaaataaataaatgacatacacccacattatgcttccactaattctacttgccctatttttattggccctattatttacttttattatttagtcactaattaatttaattgcacctagttgtgttattgtttaaataattatttattgtgttaaaaaaatcatttattcatcattcaaaatcatgattacctagcactattattctattgaacactaaagtgtgtgaccattattattatgaatatataaagtaaaagattttagaatattccctcaccttttcataaaggtagaaattggaatccccttttatagttactcatttcatagaataataataataataataatgtcccttttgtttcatttaattcatcattcatctataatatattgccaagtaaatttgcatgttttttttacataataaaaacaacagctacaacaaaattggatgagacaaaatgaatcaatgattttgataaggtcaccatgagaaatagtttaactcttaaatatcaagatgaataaaaatactattttagatttagactaactttgttgtttataaaaattactaattgattttcaaccatatcaaataataatttagaatctatattttgcaactatgaacataacaatatattcacagttaatcataaaaaaaaaatatttgagttaagcatatcgcgagcaaaaacatctataccactactctacaactacaagacatcaaaggggtaatattcaaataatcaatggaaaagattaatgtatgacattgacaaagtgatgatatagatcttgggttcttcattttgttcatgagatcatagtgctagtaaccaacaactatgttcatatgtgttttttttttttttgagaaatta

SEQ ID NO: 123703 - DNA, 1777 bp, Cannabis sativa
  modified_base (575)..(580): a, c, t, g, unknown or other
taacttttgtaaaacagatggtccaaaatggtatttaccttaataataaaaaaaaaataattaatatgtgcattttcaaacaattaattcatttaaaagtcaataaggtgaaacaattttcaaatattattggtataaaaaagtcaaattggtcggtcgtgtaatctttctgatctctatcaagtatttttgcatagaacagcaatgaaggtgggcagttgtattcttgcaatggcacctatctctcttaataaaacctacataaagaaaatatgctcatcaaaaaaaaaaaaaaaaactattttctttaagtcatggaaagagaaatattaaaaatcactaccacaaagtgttatgtagttcaggaaacgggtggaatttgaaaaagggacggattttagaggagtcaaatttatgatttttaaataataggtgaattatttaaaaaataaggtaaggtttggtttactagaatgtaattataatggtaatagaaatagtaatgagattactattacatgtttggtttattttgtagtcaattttttttatttggtttagtataaaaataaaannnnnnaattaatatattgaccaaaatgtctttattttatttattgtcaatttggtaaagaggtaagagagagaaggatagaaaagtctttttataatgtattagtaattgtacctatgtcatgagaatttatacaagtggtgtaataggcattacaatgtaaagggattacaaaagttaaaaggaccaaccaaacattttaattgtaatctctattccattccaatattaattacactaaaacaaacatgctctaacttgtaaaaaaggaaaaatcacaaattttgggagaggccaatttaggcctcatgcactaaaagcactcaataggtgatttttttttggatcaacagtgaattaataaaatagttgagatgtaaaaatatagctaaaaattatgtcaatgttcactctccattaattgaggtatataattagctattttagttcaataaagcactagctacatttagctacaaccaataaccattcatgctctgaagcattataattttataaatttttctcttcttttttatattctatctagaaattagaaaagataaaatatcattttaaaagtataataaaagtttaatgatgcagaaaaaaaaaaagctaatgtatacatataatgcaaaaattgagataaaactaaaaagtatgacttttaataaaatattttaaaggatgaagttgaaaagctattgaaaaatatcggattttacatattttattttgaataattattaaaagaagttaatgtcaatattatttctaaaatgccatcggttgaattcggttgaatacctaagatcatcttcaacggtagtaagcatcctttaatgatgttaaaaatttatacatcatcttaaaatataatattttattttatctttctttcacatcatttttgacattcttatttctataaacactccaatatataacactctttaaaaatactataattaatcttacacattattttttaatatatattctaatttttagttacaataactttttagctttaattttttattaaaaaataaataaatagtatcaatgctataacatagcatctatataaatttgacattcgtttttctctaatagtatagcatcttaatattttgtcacataatatacactactacaaaataggctattcccaacggtttagaagagggtcaattatgg

SEQ ID NO: 123704 - DNA, 5905 bp, Cannabis sativa
  modified_base (5859)..(5865): a, c, t, g, unknown or other
agaaaacttggaatggtgatgaggtgtcaatcctaaaggtgcattgcactgcaatacactgcagcaacactaaagcatagaaagatttgattccctagaaattcggttatgaaattgtactatgtgcaatcattgtaaaagttgttagtataagaatattctctagggattcatttattggtcagttgtaaaagagtcgttggctccttctttctctatgtatgtgtaatcctccttttgctattataaatacaatactctggctgctcacaattgaattgagctgaacattatcaaaatcatttctctgtatttttaacttggtatcagagccaaccctaggcctttgccatggcaactcctggtgatgaaaatgatgctcttgctgcaagcacagatggtgcttctacaatccatggaactcaaaccattaaaaatggtgcttcctcttcccgaaacactaacctataccagaatcaactcaccactctcaatcaaacattctcccttaaactcaatcgaaacaactacaccttatggaagactatggtgtttgctattgtttgtggacataggttacatggacatctcagatgaaccaaagagtgtccattggagtttcttcctgcaggtgaaccagatgaatctagacatgttgaagttgttgtgaatcctgagtttgagcactagataataaatgaccagctactcttgggatggctttacagctctatgaaagagagcattgcaactgaggttatgggatctgcctcatctgctgaactgtggcatgctttaggaagcatgtattgtgcttactcaaaatccaagatggatgatgcccgcaccttgatccaaacagtgagaaaaggctcaacacccatgacagagtatctcagacaaaagaaaaactggcccttgccggagatccctatctcaaggcacatctcgttactaatgtgttattaggacatgatgcagagtatctttcaatagtggttcaaatcgaatctagagctgaaaccacatggcaagaacttcaagatatcctcctaagctttgacaacaagattgagaggttgcaaactcgcaactcaagaggaaacctcaagcaaatgttgcaaccaaaatcggatcttgatctgtcggtcgaggtcgtggatatgcacatcaaaatcaacagttcaacagtggaggacgattctctagtaatcgtggttgcactaacagatctcgtagaaagggtcgcacaaatggaccaaggccaacttgccaagtttgtggcaagtatggccactcagcagtagtgtgctacaacaggttcaatgaaagcttcatggtgtctgatcataacaacactcaaaaccagtagcaagaatgccaaagcaaccataatgcattcgttgcaacccttgaaatagtggacaatgatgcttggtttgctgactctggagcaagtaatcacattacttctgatacttccaacatgagcgagaagcaggattacacaggtaaagagtctgtcattgtgggcaatggtaacaggctcaaaatcactcacattggtaatggttatttgtatattgaagatggtagttgtttactgttaaaagatatgctacatgtgcctgaaattgctaagaaattaattagtgtatcgaagctcacttttgataataatattctgattgaattctatcttgattagtgtttggtgaaggacaaagtgacaaagagagtattgcttcaaggagtgcttaaggatggtctgtatcaacttgagtcacctcaatgtcaactcaattttccagttttcaacccagtaacaacagagtcatctcagtccaagtcttgttttctgtctagttctactgctaagtctaagagtcatgtaaatcagtcaagaactgataaggttttatcttccaaaattgatgtgtagcataagagattaggccacccaccttctcgtattttgactcaagagttagagtcaagtaatgtaaaagtttccaagaatgaagtgcaatcactactacaaaatcggcttttcccaacggtttataactgtcttttataatattttctatcggttcctaaaaccgttggcgatgtgggtgtcataattcatatattttaataattcacaatatatacaatattattcagaacaaaaaatacaattaaaaattaataataaagatcaaagttacaacttaatttctaataataataaaaataatctctaaataaaaaatatttaataatgtcaatattacagttcttcaacaataaaaaaatattaaacttaatttctaaacaaaaatttgtctccaatctcagcacaatgatgatcttcttcacagtgatggtcttcttcgcagtaaaaaactcagcacaataaaaatatatattggcattaattaatggtagatggaaatcgaagcttgagatttcaggactgagattaaagttgattgggaacatctgccagtcatttttgttcttcccagtgcaagtgaatcgtcgatactgacggtgttcgggttaacgtcggaggagagcatcaagtaccacatttggctggggcatatggttacgactctcttcccggctcatggcctttcttacatcacattttgggctttcacaaatcaaatctcaaaattttttcgaattatactaacacaaaatagaccaaccgaagtaaggaatacattcacggagacgacaattcaattggatcaattgaaatccatggatttcgttgccggagatgactcgtccgatccgaccctcactgcgcaaagcccatcgccatctcctccaccaccccctgcgataagcccgtcgccgtctcctccaccgtcccttgtgcaaagcccatcctcgtctcctccattgccgcctgcgactgagagagagagagagagagagaaagaagctttgatgtgcggctgtgagatagtgttttgaattagttttctctcattagggttagaaaccttttctatatataccccaattaattatttatttaaaataaaataaaatcttttttttagaaaaaatataaaataaaatctgataccttttttttaaaaaaaaaaattatttacaacttaaaaatttctaaaaacacccaattttaataacttttttctttcaattcatattcttaaaaaatatatctatcaaacaaaaataaattatattttaaatattatgacagaaaaattaaaataaaaaattatatgaaatagaacttagaaaaaaaaaaatatatacatgagttaaaaaaaatgatgaaagcgaaatcaaaataagtattgaaattaatataaaataatataaggaaatagaacttatcattttatggggtgtatttaataatagggtgtatttaataatagggtgtatttatcattttatggggtgcaaatagaacttctttctttttttttttgaaaaatgataccctatttgattttattctagttaattactttattatttatttatttaaaataaagtaaaatctcatagtaaaataagatgttaaaaagaatttttcccaacagtttaaaactattgggaatactaaatatacccaacagtttataactgtggggaatacttagtattcctaacggtttataactgtggggaatacttagtattcccaacagttattaactgttggcaatcattgttttttttaaaaaaaaaaaaattatttagtattgcccacggttctccaccgttggcattggttttcccaacagcttttttgctttagttctaaactgttaggaaaaacctctccttaccttttccaacagttttcataattgacccttttattaaccattgggataagcctattttgtagtagtgaatctttctgtgatgcctgtcaatttggcaaggctcatgctcttccctttaaattgtctcaatctcatgccactgctcctttagatctcataaacactgactcgtgggccctgtcccaatctaatctaacaccaatcatagatattatgtgcgtttcattgatgactttactagatttaccaggttatatcccttaaaattcaaatctaatgcacttaatgccttccttgaatttaaggctcttgttgagaacaagtttgaaaggaaagttaagtgtcttagaactgattgggaaggtgagtatcaacctttcacaaccttagttaaggaacaaggaatataatttcagcactcatgccctcacacctcatcacaaaatggtcaagctgaaagaaagcatcgacacattgttgaaatgggattgacactactagctcaagctagtatgctcctaaaatactggtgtgatgcctcttctacaactgttgtgatgccttgaatactggtgtgatgcctaaaatactggtgtgatgcctttttctggaatatgcacaaatatgtcatctttgtgtcgtattatgttgatgatataattgtcaccatcaataactcaaacaaattgacataattcatctcaacattgaacaaagagttcacactaaaagatctagggcctctacactactttctaggcatagaggtccatagagatggcactggtttgtatccaactaagactatatacatagaggatatcttttgaagagtcaacatgcagaatatcaaaccctgaccactctaatgactgctggcaagcctatgttagcaaaagatggggaaccgatatacaacattacattttatagaagtaccatatgagctttaaagtacctctgcaacactagagcagacattgcctatgctgtcaataaattaagccagtttctacaagctccaacaactcttcattggagtggaattaaaagggttctcaggtatcttcaaggagcaaagcagcagggtcttcacatcagctccagcaataggtgtgtgctgaatggattttctaatgttgattgggcatgctgcccagattacaagaggtcaattacaggtcattgtgtattctttggagacagtctagtgtcatggtcatccaagaaacaacatgttgtctcaagatcaagtacagagcatcaactcatgttgttgctgatatgtcctggatagaatccttgctataagaaaatggatttcctcttactgtgacatcagttacttgatgtgaccatgtgagtgcaagtgccttggcttctaatccttttttttcatgcaaggaccaagcacatcaaaaatgacattcactatgtcaaagacaaggttctgcaaaaacaacttgaagtaagatatatctcctcgcatgattaggttgcagattgtttaaccgaggcacggtcacactccagattcaaattccttgctgacaaacttggagtgagaacatcagccttccatttgagaggagatattgagaaatgagcaaacttagaatggtggtgaggtgtcatccgtgaaggtgcattgcattgcaatacactgcatcaacattgaagcatagaaagatttgattccctggcaatttggttatgaaattgtactatgtgtaatcattgtaaaagttgttaggataagaatattttctagggattcatttgttggatagctgtaaaagagtactctggctcatgattgaatgctgaacattatcaaattatttctctgtattttcaaatctgcattcgtttagtagacttcttgatgcactacaattcgatacccaatcacttcacccacatccctcgtcttaccatggacaggaaaagtatgaagttggaccaaaaaggatgtaaatgaatagctcccccaactctgtattggtcactgttggaatttattttaccnnnnnnntagatctactcacaagcatgttgattaacaccctaaatat

SEQ ID NO: 123705 - DNA, 585 bp, Cannabis sativa
agcttccatttcctctagtttgtaacagtctgtgattggttttgataaagctgcaacgaccgagccatgtgaatcccttaatgcagcaccaatgacaacaatctcattcattttatccacggttgcattagtgctgagtttgaacttctctgttggaggtgcaatccaagggggcttcactgtatgagttgtcgacgctgcaggtggagatgtagcatcattggaagatggctgaggtttaatcactagcatcctagcagcctgatatttggccaaataatcagctgcaaattgagcaattgcatgtggattttttgctggttttccatgaaattcagcattcctttcatacggttataccccaacaaagaactagaaacaattcaagctctgatgttgaggtgttggctactacaaaaagaagaaactcttcacatgatgtcgttgcaacaagcttgaaatttagagacaactgtgtgagacgccacacctcattggcccgtgtgcagaaaaaaagagcatggttgatggtttccttttgttttttgcacaacgtacaaattggtaggggtgttcgcggtgcgg

SEQ ID NO: 123706 - DNA, 967 bp, Cannabis sativa
gtttgatgatcagcatgacttttctaaagtttttacataataataataaattaagaacttaaacaaaaaaaatgagtgatgtatatttttatgagtatggatagattgagagaattgttaaaagatattatattgtgcctaatatattttttggtaccatattgttattggtgtagttaaataacatgtttcatatcatttagaaaaataatttttaaaaaatatcgctaactaataacatagtactacttatagaaggtgttggacataacaagtccaatagcaatgctcctagatttagatatacacttaaattgtaaacatttattacgtatacacaaatgtaaagtcaaagtgtaataaatatctactgcttatatttttaaatgggatcatatcacttttaattatatgattgaaattaattacatattttgtttgtaagaagtacctataatttgagtgtctcccaactatttttctatttttattgtgtaaatttatgttatgatttacatatatacataagtatatttttttaaaaaaagtacaatataatgtttacatatatggtcaaataaaattgattatggttttttaagaaaaaatggttaaacgaatgaatatcaattaatattgttgaaaaatgataagatctaagatcttgaataataatctcatgtgtgtgacaacaaacaaaattatgtcaatttgaaataataaattaataaatttcttttgaacacaacaaagtccataatgcaagcaaaggtacttgaatatttaagtccaaaaaataaagtaaaataatatttgagtgatcactattaagttgtcacttgtcattacaacatttaataaaataaagtcatttcattctattctattttttttttaatttaattatatatacaagcaagacaatcaaacttgcatttatatattaattaggctaattaagattttt

SEQ ID NO: 123707 - DNA, 2100 bp, Cannabis sativa
aaatcctcgataggaaagaaaagttcttcaaaacaagaccatagctttggtcaaggtactctaggtggaagaagcaacctgggagctagagtctggcgtgagtgctcaatatccagagttgttcaagttagattttggggatgaaatccttttaatggaggaataattgtaatgaccgctgattagattatggattagtaaaggcatttagcattaattattagtgttttataattatatatgattttattttgttgtgggtcctatttttaaaaaggcgcattagagttataatttctcaattctgaagattttattaagcttcaagagtattatttaagctaaatatgaattatgcaatttttatgatttttgctcggcgacgaaagaaaatgcgatggttgccgttagagttacatgggtaagtttagaacctattttttagtgggataaatatttgagatatttagaatactgagtttaagcgggattatagttttggaccattttacccctaagcttataattgcttaagttacaagttgaagggcattttgggaaaggtaaatactattttagaccctatgttttgcaaaagttacaaactggacactctattttgttaaatgacaaaatggaccctatattttctaaaatagtacaaataggaccctgaattaattttttatcaaaataaatcttaataataatcctacctagaggtgttatgataaaactgtgattaaattttctatatctgttcgtgttaggaattgtcttcaagttggttttattaaaaaaaatagtcgaaaattgagtttagggtctacttgtaccatttttgaagatgcagggtctgttttgtcatttaacaaaacaaagggtctaattggtaacttttgcaaaacacagagtccaatatggtatttacccttttgggaatttcatttttgggctaggtggctggttagtggttggacaattggccatttggttcacctcaaccttggattattgaggaaattagagaatttgttaattaaaataacggaagaaaaactcaaatttctgtgctctctctctctctcttcccttcgagcctagcaagaactagcaagaacctgggatgtttttgtgtgattttgaggaagttttagctgaaatcaagtggtgtaaatcaaaggtaaccttagaaactttgttctttgaagttttgaagttgttagttgagttgttgcatgtaaaatgttaagtttagctctgttcaaatctgtagtaattagtatttgttttcttggtttatgttaggttgtttagagctggtttgaggtggttttgaagcttgattcttgtgttgagcaagtttgagttttaagaattcaaacttggctcaacaatggcatattgagtttttatcctttttcgctgttgtttttggttggaacctattcttgaatgatgttgtcggtgatctggaagttttggtgaggtttaggtacaaattgaggttgttgtggattttttggggttttctggtgcaaaccagttaacccattctacaggacctgtagaaccagttaaccaaatcagtagcaggattcctgaaaaatccattttgtcgattcttgttagttttagagccttagttcattgttccctcgataattaggatattgtcatgtgaattatcaatagcaaaacttgtatttgtgagtttagatttgcgaattaggtttcagcatgttatttacccatttatgtaaatgtgacatagggcatccatccaccacgtgatttttcgttcatgcagcacacttgaattcgaaaatgaggtaagactagcatagaacgtatttatatatgaatatgtgtggtatatccatgatatttgtgattcgtacacttccaacactagtatggtagtagtactgagtgcgttggtacagtgtacgatgtttaaagagtacattacgatgttaccaactctagtacagacaggtacaaagtgtatgtggtataacacttaggggtacttgaggtacggggcaaaccctaccaacactcgtacagtagcggtacgtagtgcatgtggtacagtgg

SEQ ID NO: 123708 - DNA, 1125 bp, Cannabis sativa
ccttctgactcaatctaggctcaacaaaggcatcgtcacttgggtgaccctaagcaacaacatatggtgagtggtagtaggtggaactaccacctttgcctggctgatagacagttggtttcacagccaaaggcatgggagctgagtaagggtgagacgactcaggagggaaaatgtgctctaagtgagtaagtttctccgctatgtcaccttataatcgtttgaggagggatagacatgcatccatattagcatgatcctgaccctccaagaactcaatctcctcctcaagcctagacagatgctcctaaaactcacaaatttcttttaaacattcccaacgctcagacatcaactggtgataccgtgcccaatggtcaaccacgtccccgtttgaatttgatgagagctcaatgagggaaactccctcgagaatgaaggatggtttgtggttttccataaaaaaagagtggaaaagaggacaaggtagaagtattattcaagaaaagtgaatctggacgccaattaccgctgaccaagtgtaatgacagaacaccaactataactctatcacaagggggtcaccttaaacacacgcctagtcacctgacaaaaaaataaaaggagggggagcatatgaatggacaagattaggggccaaagactaataagattttaacaagagttattataaacttgagttgtgttcacgagtatggtaggtgtataaatataaaaaaaaggtaatgtgaatagagatagaaggcacctgacaagattggcgtgagtaagaagagactcattatgtcggaacccgaagaagaaacaaacatcaaatggcgtggaatgcaggaaaagattagaagaaatagaaagcaaagaaggacaacaaaagatgagaggtaagaataagaaagggataggtaaaggtagaagattggaagcatatttataaggtgaagaagtgaatggtcttgtcctcctcgtcaaagggtcaaagggtggcccccaccctttttgtccttgtccccctcgtcacatttcctcacgcgcccagcctccgcccaactccccccgagcgcccggtccccttgcgcgcctgactcccccgcgcgcccagcctcc

SEQ ID NO: 123709 - DNA, 641 bp, Cannabis sativa
tatcacttttgctgatgcatttactcgcgagcagaagtaaaattaaactaccaaatatttattaacttttgccagcacacttattttaccagtttaagtgaaattgaattgccaaaagttggctccttttggcggttagtttaccaccttttgtcggcaaaactactgcattttgccggcttagatcacttatactggcgaaataactcgtcggtataagtattttccataataaaatgaaggataaatttaccatcttttacaaacgagattcgtaaattgtgctgacaaaagtcaacttgtgccagcacaatttcgctagcaaaaactctttttcttgtagtgtgagtagtgttaacaaatgtatctattaaaaaaaagggatttttacaaaaaaatactgaattttgggtcaaagtttacaattttattgccacattttataaaacaatctaaaacaacagcaaaataacaaaacaggacaattaaaaataacagtagaataactaaaaaaacaactgtaaaacaataatgtaaacttaacatagtacagagtatgaaacttacgcagtatacttgaaaaaaaaatttcaccccacaataaaaaaaaaaaaattaattttaatatgaggtgtaataac

SEQ ID NO: 123710 - DNA, 1327 bp, Cannabis sativa
tatattgaattggattatatatcatatttgtatataatactatgttaactttaatttatactaaaatataatatatttgggtatccataaaagttagtgccccatatagttttacataaaaaatattgcataaaatacaatttaatataatactatacaatgcaatacggtgtaatacggcgtatcaagcgaacccttgggcatttaaaataacctagtcttcagggattgggtagttacgacgaatttgatttccatattcgcaacattgttggtgccaccctgggagctaccctaagatgatcgaggatatctggttattctctttgagcggtcgactcttttcatagagtactattgttgatattatttctttttctttccaaagccttttgggcagtcttaccgcttaattatataccgtcccaactcattatcaacctccacatgtcatcttgctttgtgccatgccataaaggtgatttttggaataataataccatagaaggagctagacaaaactagtgtctttaagcatttttctatatcaaattgtaagggtgtggtgttcatcaaatcgtgtatagaacacaaattatcatattgagccaaaaaaatattaatgaatatccatgtgcttagcaatataagatattatatagctactagtataatttaatattgaattttgtttattgttttaataataaattataaaaatttaagaatcaatgtgtcatctcaaggtggtcaaggtggtgcttggtagatgtctaatagcaatactctttaggctaaatcatgcaatttgacctcaattatattgtgattataggttacactctaaacattacgctttaaaatttacaaatgtggttcaaatgcactatattattaaaaaatatatataaatttgttttatgtagttttacttttgttatataatataatgttacatttggccttgtaacgtctccgcttcaagtctctattgggttcttatacccacggaatgaatggctcttatacacgagtacgtcactttagctgcttaatggactgacgactgaccctacagaccaacacgagtgtttccatcttgatttatcttcactcgcaaaatacaagctcgaacatgtcataattgtcacaactaactttctgttatgacagttatgacatctacgctcattgtccaaagtcctataaaagggatcctctccaatcaagctcaagatctagaaactcagtgtgtgctattgagagagaattagagagagagagagagagagagagagggaaccagaataaagagagagagagagag

SEQ ID NO: 123711 - DNA, 882 bp, Cannabis sativa
aaaaattagtaaactatatcgaattgggatctcaattgtcccacattgctcagtgtgagtcactcaatagcttctgagtcttaaccccgtgataggattttggtaattaaataagaaaaggttgaatcacgaacctgactcgaccttggaaaggtcaagaatgtcgttaatcaattgaagaaccaaatcacccgaagacaacatgacttccaacaactgacgctgctcacgatcgagcttcgttgtggtgagaatctcggccatacttacaaccccggaaagtggagatcttatctcatgagacattgttgccaacatttgctttgctctcattgtttcctctacaaaaaatattcaaaagttagttactaataacaatcttgacaccatttttctagtgaaagagaattaaacctgttatgtgaatagttttgttcaattctgtttctttagccttttgtactgctaattcttccctaacttttgccatcttttctctttttctcacctattgttcaataaatcaaaaacctttatcaacttttaatcatcataaaaaaaacaaaaacattaaactaaacaaatcaaaactcaaacttacttgatcagtaacatccattcccatataattaataccaatagtttcaccagacttactaaaaactggttcaacataaatcaaaaaagtctttgaaccaaacaattctgtctcaaaagtaatttccctttttgctggcaattttttctccaaaacttctcttttaaaatcttgagattctttaacaccagcaccagtaaaaatctcaacatctgttctcccaataatatcctgaaaaaaaaaaaaaaaaaaaaaaaaaactcaaaaaaaaacaataccaaaaa

SEQ ID NO: 123712 - DNA, 1865 bp, Cannabis sativa
  modified_base (1625)..(1634): a, c, t, g, unknown or other
ggtacccatagccttctgaagactcacccaaaacttcgatgtaaactttggatccttatctgacacaatagatttaggaactccatgaagacgaactatcaccttcacacacaatcactactacaaaattggctttttccatcggtttataagtgtcttttatatgatttcccaacggttcctaaaaccgttggctatgtgggtgtcataaaaatacgaaactttaaaagacggtttataactgttgggaaaagtcattttaaattacggtttataactgttggaaaaaatcactttaaatgactatttataattgttggcaaaagtattatgtggattaaaaaaaatcactatttaatattacaataataatatgatataaataaatttatccgagtacaataattttatttatattagattaataaattaatttatgaagaataaatgtaattatttattcatatcagattttattatttaaaaaaatacattaacaaagaataatatgaataaaatttataacaattatttttaaatcctaaaactccaccaccattaaaaaaaccctagaaattctgcaattttcgttgaagaaaacctagaacggcgctgcacattctagccaccaccgttgccatttttgttgaagaaaacgccagaaaataggctctcagccctcgaaaatcccaaacctgaaagctccatcttctttccctttgctctctttctctttcgtctctctccgtcgcgggtcttcctcgcaccaccacaacaggccacctccgatcgtcgtccactggagtcaaggccaccactgcgtttctcggctcgggccacctttgctcgttgagccaaatagttttcaaagaatatgagtccgagcttttgggggttcttggcttgagggttcatcgggggtcacggaggtgagaacaaagaaggagagaggttgtcgctggccataggtggctggccctggcttagtttctgacgccgcaccatgagaacaaagaaagagagaggttgggaaagagagaggtcgggaaagagagagaaaatttagggttttgaatttggtttttatcattagggttacaccattttctatatgtaccgtatttaatcttatcccaatttattattttattatttacttatttaaaataaaacaaaatctgatataaaataacgtgttaaaaaaaatatttcccaacagttataaattgttgggaatattatgtattcccaacacttataaaccgttgggaatacatagtattcccaacagttataagtcgttgggatttacttttttttctttttagttcatttagtattgctcacagttcttcaccgttggcattggcttttcctaacgggttctttacttcggttctaaaccgttggaaaaaacctttgcttactttttccaacggttttcataattgaccctctttttaaccgttgggaaaagctaattttgtagtagtgaatgcagcgtactgatccacggaatatgtaactttcactagtagaaagtgagctgatttgggaatctgtccactatgacccacactgaatcataaattcccgaatttctaggcaatccagttacaaaatcnnnnnnnnnntcctcccacttccattcaggaaggactaaaggttgcagtaaccctgcctgcctctgatgttcaaccttgatttgctgacaagtaaaacattcggacacgtagtccaccatatctcttttcattctgtacaactagaagtaaggtttcaaatcctggtacattttggtggttcccggatgcaatgaataaggtgtggtgtgagcttcatctaggcattgtggaaacaaggct

SEQ ID NO: 123713 - DNA, 1050 bp, Cannabis sativa
atagaaaaattatggatattactctttagtgacactttatgtttttagtgacacacattacatgaggctaacattgaaagtttagagtctaattgtgtgtgtcactagaaattcttcctagtctttagcacttttgtgcatgtcactaaatagtgtcactaaaagcccaaattgtagtagtgacactagatttacactgactagataatctacgatatgatctacttacacttcacaagtgttatgttttttccagaacattagaaaagtagataagattgaatgtatttgttgcattagacaaggtcgatctagacttcatatttaacaaagaatattgttggttatcttatcctttcaaatcacaatagttgatcataggttagttaaacctaaatcctgaaacaattaaactttaagctaattatgttattcaagttctttgatttgtctattaccatcttaccttactgtctagtccatacatacatgttaggaactcggtagtataactgagtgagagtgttaatcatatatatggacatctatagcttctacaataagaagtgaaacgatgatctcctaagagtttggttcaaaggtagctaaattatagagcactcatttttgtaattatattagtttacaaaaatatcatttacaatgagccagatgttttaagaataaattataatgaagggtagaatggtaatttgaactcctaaattataaatcatctatagaggattgaagaaggtaatggttataataatggataacgtatctatattggttatagagcattttgtgagtttaagagtgcaattctgagtatatagtggagttacaaggaattgataaaacaatatatttacttggttgataaatttatagtaatgttttatcgtagcatgaattcatggatcctttgtaacgtccccacttcaagcttccattaggcccatacacccacgaaatgatggatcttatacatgagtacgtcactttggatgcttcatggaatgtcgactgaccctacaaaccaacacg

SEQ ID NO: 123714 - DNA, 3000 bp, Cannabis sativa
aaaaaaaaaaaaaaaaggagaagaccttctttttcagatggaagacccattcttcatcatcacaagcaaacacacgtcagtttgtaaccctactattaactccaaaatatttctactaagctttctcttcttcaagagaacatggcgagaaggagtcttagtccattgtatccatattagtataaatagttattggccaaagagcctaataaaatagactcgtggactaaggatagttaacgcctgaaccacgtaaaaatctcttgtttgttatttcactatttacactattattactttcttaagctctaaaaatatttagttaccgaaaaactcggtaaaaattttagtgctttcattgagagctgaagaaagagatatgcacggcggttaccgatgcaagcccgtcagatgagaattcgtgcaagaaaagaaggaagacctcctgatctcctactgaggtccggtcaaaggccaaaaatgtgcagatcggaggcgttgcccagagtaagacccgatgccttcattcacacgagaaaaatataaaggacgaatgcatgcggtcttagaacacctgttgcaccaatatctgtccttaaaagctcagatctagccagccaacgtcccgtaaggatgaatggccacctgtatcttcagacctgcatttcttgtcgttcactaacacgtaaccacgcagatacgatgaagttcaaggggtgttagggccagaaaaagaagctacgacccggtgtggctacgacgactaactcaaaatggtcgttaggattaacaactctatccagctcgagactcctacgccagtgctgctacgagggctagattttttgtttgaaaactacttcccctgcctttttgctgggtggtgaagttgttcagaaactgatcctgtaatggcagcagttgagaggagaccatcggtaccgttggcgtctactggacctccagtcaggcatgggtatggtactattagttgaggcaagccatatatggctcagtacgctcaaaaggtttctgtcgccaaatgtgactgcaaccccaaagttacatcagagaaagcaatttgagacattataaaccagttaggaagtttgttgtttattgcgatgcctcaagatagggtgtgggttgtgttcttatgcaagctagaaaggtaatagcatattcttctcggtagttaaaggagtacgagcaaacgtaccctactcacgacctagaactcgcagcagtagtatttacgctaaagactatttggcaaaattatttatatggcgagaaatataagatatacactgatcataagagtttgaaaaacttcttcacctagaaatacttaaacatgagacagagacgctggctagaattggtgaagaattaagattgtgagatcctttatcatcctaggaaggccaacgttgtagttgatgccctgagtaaaaaaggccagagttagataaatacagtgaagtagatctcccaacaattagtagatgaaatgacccgagctaaaattgagttcattgtggggaaattggctaatattaccctggaatctactcttttggagcaaattaaagaagcacaattgcaagatccaaatttagtgaaattttgagatagggtttcagccagaaagactagtgactttacagtgaatgacacgggaatgctacaatttatgaatcgtgtttgtgtgtctatggatgaccacattaaaagagaaatcttaaatgagactcatacgactccttactcagttcatctaggatcaacgaagatgtaccaagatctcaaggccatgttttggtggctaggcatgaagaatgatattgctaaatatgttgcaaggtgtttaacttgttagcaagtgaaagctaaacactagagtctggtgggttgttgcagccattgaatcttttggaatgcaaatgggaaggtattgccatggacttcatggttggattgcctaagaccacaagacagtacgactctgtgtgggttattgttgacaggtttacaaagtcagcgcacttcttacctgttctgacaaatttctccattgatcagtatgctgaattgtatgttagagaaatttttcgtctctagggtgtcccgaagtctattgtttcggatagggatccgaagttcacatccagattctggaagagtctacatcgagccatgggtactcagttgaaatttagcatagcatttcatcctcaaacggatggacagtccaagaggaccattcagatttaagaagacatgcttcgagcacgtgtacttgagtttgaaggatcatgggtaaagtaccttcccctgatcgagttttcgtataacaacagctatcaggcgacaatcgggatggctccttatgaacttttatatggaagaaagtacatatcacctattcactgggatgaagtaggtgaaaaaaagtttttaggtcccaaagttgttcagagaacaagtgaggcagttgataaaatcagagcgcgaatgctcgcggctcagagtagaaagacgagttatgctgatccaaagcgtcgggatattgattttcagatcagggatatggtgtttctccatgtgtcgcctatgaaaggcatcaagcgctttggtaagaaaggaaagcttagcccgaattcattggacctttcgagatccttgagagaatagggcaagtatcgtacaggttggctatgcccctagcgctggcatccgtacatgatgtgttctacatttcgatgcttcggaagtatgtctcagacccgtcccatattcagagttattaagcattagaacttcaactagatctatcatacaaggaacaaccagtgcaagtacaggatagaagagaaaaagttttgagaaacaagacaattacactgataaaggtattatggataaatagtaaagtagaagagccaacctgggaactcaagacggatatgcatcagaaatatccggagttgttcaggt

SEQ ID NO: 123715 - DNA, 512 bp, Cannabis sativa
gccagccaactccctgggggcaagaccgaccaccaatatccttaggctcggattccccaccatgtcactatgcttgaatagagaagtaccaaaggtgccatggccaaacgaagaagctatgacccgatgcagttacgaagactaactcaagaagggtcgttaggtataacgactctatccagctcaaaactctggcgccggtgctagcgcaagggccagatctattgtacgacaactacttcccttgcctttgcattagttggtaaagttattcaaaaactgatcctgtaatggtggcggctgagaggagaccgtcagtatcgtcggcgtctgctgggtcaccagtgaggcctggttatgatactgttggtttaaattaggccatttttggaaaagttcgctcaaggcagtttttgtcgcctgatgtaactgcaaccccggagttacatcaaagaaagaaactcgagacattatatgtaacgccctaatctatagggatgccacgtgtgtga

SEQ ID NO: 123716 - DNA, 3679 bp, Cannabis sativa
  modified_base (62)..(64): a, c, t, g, unknown or other
  modified_base (3615)..(3631): a, c, t, g, unknown or other
aaaatacttctgtttctctattgatattgaataaaatgcattacattgaaatagagttttannnagggcataaaacccaacaaaacatccgtagccttcacctgcaatctggctgggataataatggtgttgtacctcggattctggagaaggtgtatgttcgctggttatctcctagtcttcaaagcttaagaccgtcacttgatgagaacggattggcacaaagacaaggatggtcctcatacaaaagttgaagaaggtcctcgtcgatatgatgttctcctccccaaaactcactagggttcatctacaaaaggcaggacacaagatgagtatttggccaggatatcgaactaaaacaaatggaatttaccgaccaggcccaattgaaggattaaaaaaggggattttgcatgatattaggtttataacccagaatttcaaaactttgaattaagggttaattttcactaaaccctgaatgggcaagtgaaactaaatatcgtgaaatcaaaatgagaattcaataatagtcaagccacatggttgaacataggcaaaatctcatactcctaaacctagattttctacggttttcgtagaacaagttcaagaactatcaaattttctacaaatgaaacccagaatatcaaatatttaagcataaaagatgaaagagacgaagaacttactcactgtttgaagctttagagttgttcagatgacactgattggcatttcctgagattcttcaaataatttgagaggaaaaactttcttgctctgaaatcttcaagaatgaaaaatgctaaaagtggtatgttagggatttctgccctatttataggctaattagtgaggaagtgcaatcatttcaaaatttaaatacctctgttttcccccaaaagcaaatattaagcattcaattaccaaaagggaaaccatcaaagcgtgctattttttgggagtaattcgaggtacaggtcagttagcattaatgagctgaatattgaagagacccttagtcagaatcacgtcggttcaccaacaaaaacttcaaacacgtgtcacccgttcagattaggatccagattgagtgaagtccccgtgcgacttcggaagtcctgcgaaggcttgggggcaaatgttatcctattttttgcactatgatgtggcagcatgtacgagtgacacgtgtctaacatttcttgcacgtggacggaacgatattctgaaggagcttcaggtaacataactgcacgcacgacgtctgcttatccgagcaaggtaaagtgcaaactatccgagcagagaatgaggttgattttccaagctgtgtgccaagacttgactacttcagaatgggtatcgtgaagttcaagtaactcccctacatcatgggattgaattagagggatatggcagtctgtctcaatcccccatttcatgtattctaattatgtaataaatgtcctttccaattatagatattgtaagcaaaagggaaacctttcctcatgcattaagcccctataaatagtgatctagcttaactgtaaaggggatcgagagaattgttttagagagagatctaagagaaatactcagagatttttcattgtgagagctttgagagaggaaacactatgttctttgttctcgagttaatacaatctaagaggagtaggctattaccatactgaaggggtcgaacctcttcaaaacttggtgttctttattgcttattagttttttctatttttattacatttctaatcatttcataattaactcattgtcgttgactaaaagagaggtcaacaataaggattgaaataactaaacaacctaataaaactagccatgctcaaactacataaacagttaaaaataaaaggcaaggcaattactctccccatcaacgatcataatgagtagctaactatctgaatcaaacaaggtaacgaaaaaaatagtaacttacaaaataaaacagaaacattctacactatctctcccctaagtgagcataaacaacgccaaacatcgtgttcataaactaaatgctccccttgagaaaattaaaaaattaacaaagaactcccttgaatggaaataaaaaatgcaacaacaacttcattgccaaaaaaaaaaaaaataccaaagactaccaaatcaccacaatattacacattttgacacactatgacccagaatatatggatattagatataaccaaatgaaaaaaattgaccaagcaaaagactatgaaatcaccacaatattattgatgatgctaaaatgatatttatttttattttcaaccaaaacataccagatgatatatctcaagaattaacacgttcaacttgtaaagaggaaaaaaaaatatgacctaaccaattaataagttgagcaatgatcatttgaacaaagaaacaatttattcagcttcacattgagctatacttaatataaagatgagacatctcatctctcctcatattcacacactataagaaagacaattaataaagaatcttcaacaatattttgaatcaagactttccataagtgtatgctagtgacctcatgtgagaacattatctcaatccctcatagtttcttctgttagaataaagccttttctttctttaagcactcagactctttcttttgcaaccagtaacaacttccactcttcctttgagatgtagccgtccttttttaatcagaataccaatatagaactacttattggtaaaaggactaaagagagctagtctcatttcatctaaaagaggtagccttttcaaatggaaagcaataaaggttcaaaaaatcttggaaaattcacatggttagagcctcctaaaaagaactggagtaaccgtagatgaaacatgaagtgtgtaacgctcttgcttcaagcctccattgggcctttcccctgttggaacttattttaccaagatcttatttactaatcaagtatgttcattataacattataatataacatcctaagtatgcatatacaaaaatactgaatttgaacacgttaatgttggttttttgtactaaattaggtacggaacggaagaattagttctgattatcatcatacaatatgccaaagatcaccatatatatattaaactaaagttaaatagatgaaaataatatttacctcttgatgcctatcaggtatccttgattctttttgcaagtgttattctcaaaaggaactcacaccttgatcttccagacattttgctacacagaaggactagtgtcggctggttggataatagtgtatatgaagttcttgatttattctcaacacacgagcaagaactaatgcttttgtgataaagagaaaaaggtttattgataaaatattttttagacttttagaaaagttacgtgaaaaaattctatatcaaaaacttgtacaaaactttattatacggtatatttaaataaatccaatgaatgttttatttaattaattatttattttcaaatctatttattaaatcatatttaattatttgaatacataatatgactaaattcggttatagatatttccaattctaaccatttaaatnnnnnnnnnnnnnnnnnaataactaaaatagattattaaagaatattgtcatttaatttaattat

SEQ ID NO: 123717 - DNA, 1327 bp, Cannabis sativa
aaaatattattaaccaatcacaaaacaacatgtttaaaaatactagaactactagtattcaataccaatgctcggccaatatcaatgctgtattacaaatgaaatggtatgtgtcattgggtcaatagataatgttgaatttcgcctttaattctaattaatgtggcgtgatgaacactcataatttggttctcttttacccatacccaacttacttgaaagtgatatatcttcaattgtgttcttccattgattatggtatgttatggaatggaatggcaatgggtatacatgtacttgtgggttactcattaattaggttaagaacataagtgctataataaagtagtctattgttatgggttttatttttttgaaaaaataataatgtagcaacttcattcattcaaactatcatccaaataatggaagataacctaacaggaacaaccctcccgttataggtacattaacttatacttatttgtaaataatttgaaaacaattttatatttttgaaaactttaaaaatattttgaaaactaaacctatttattagagatgttcttaggtggttcatttttttatatatgaaaaaagatatcaggtatgcatattttatcctcagatctttagatttttttttgctctttcaacttaatatcaatctcagagactatcgaagagtagattaagtcttatacacagttcttaagatgattgctagctgagactctgccacacagaaaactatggcctacccaaaggacccatagacacatgtattatatactactgaaggagggcctaccatggttcctaagatagttggttccaattttgatgggcttgtttaaaaataaataaaattgatgggttcatgtatcaaaaataaaaatgattatttacaccattgaaatttttaatttttttttactttgaggcggaatttttttcaaaaatattgtataaattttatattgtgtactgtcttaagtttttactgttgttctacggtcttttttagttgttccattgttgtttttagttattctgttttgtgttccactgttgttttataaaaatacagtatttttttaaaaaaatccgtataaaagtatttttataaaagttaatctaaatttcactatttttgtaagtttcccaaaataaaattacttaggatctagtgtatgacaaagtaaaagtatataagaaagtgagagggctgtttgagtttacaattttatgctggaaggaaatttatacttctgttctcttttttaaaagaaggctaattagcaattcccccccccccccccccccc

SEQ ID NO: 123718 - DNA, 867 bp, Cannabis sativa
ccactcaagtggaccaccgaggcttagccattattaggccacttatccacctagaatggccttaaaaggccaagcttttgccagcttcatggctaaacataaaagcatatcgccctaaatctctcaatattcgagagaaaagcaagagccgagaagaagtgagagcaagagcaggacaactcaactcagaaggtgcattgaccacctccctgatgcaggcatggccctcaggacacctggggcaacggctgcacgaggcaattaaggttattttaaagcttctaacaacgagactgaacatgaagctccagttgctggcctcgggccaacacacaaagtgcgggctgaatacctagacatataccacgactctcaactagtcgtaggtcattttctaggcgaatatgcagctcaatgcaaaaatatgatggcctatttgagctaatttcaagacttgttaagttagctcaaaggttgtactaaaaggcaagtccctacagacgatgcaacagccgacgtactcgctgaactagttagttgcgtcttgacaatcaaggcaaacttggttcctgctcagttttttaaagaactaagcatccctatttcaaaaaaatagatatgtgggataaccatcagatatggatgacacccataatagcatgcttccaaaaaaaaatcttgctaaaaagcaaggatgaggggggatagttgctgggtgtccgatcctggacaatataacggacagatgtggtattccaatactacatttaagaagtgttactaagaaataagctgaatagctattgacaggagtgcataaatgctatatggaaatcatgtcaggggtaaagccaaccgagtgtagat

SEQ ID NO: 123719 - DNA, 728 bp, Cannabis sativa
atacaaaaaatgtaaacagttttgttataacacttttagatcggattataattacactttaaaaattaattataatctgatttgtactattttagatcggtcctattttagaaaatacaggatttattttgtcatttaacaaaatatagagtccaattaataacttatgcaaaacccaaattcaaaattatatttacctaaaattaaattaaattctatatgtactataaacttatttgagaatccgcgtagtatcaataaatcaaatcaaatcttgtcattatgatttgtaatttgaattttttagtatttttataatatatatatttagaggtaataagggagtgtgtgtgtataatatatatttaatatatacattgatttgtgtacgtacgtaggactccaataataataaaaggaatgttcaattgatttagtggaaaatctcacattttttgttggttcattccactaactcatgccctaataataagttaggtcatatttttattacaaattgacaatttgggtacatggaagttgcctttttttttcaaaattaaaaaaaaaaaaaaaaattatagaagatcaaagccaaactagcttagttattggttgcctaaattgggtgctaaaaaccaaatgatttgactcaaattgatttcaaatgagctaaaaaccaatataatgtagtttctctctctctctctctctttcaaaaaaaaaaa

SEQ ID NO: 123720 - DNA, 3122 bp, Cannabis sativa
  modified_base (758)..(764): a, c, t, g, unknown or other
gagaagatgtctaccaagagctctaaagaagagcctagcaaagggcaatgaagtctagcccaaagcggggacacggacatagatcctcaccttggggatcttgcaggaaacttcaggcctgtagaagagttggaagaggtggaggttgatcccactttcccaacaagaagactgaagattggaaaaggttaagtgccaaaaataaaatcattattgataaaaaatttaagggcaaacctagacctctttgcatggtcacatggagacaaggtcggtatcgtcccctttgtaatgagccatgcactcaacatcaatccaaacatgcgacctgttcagcaaaagaggaggttgttgaacaaggaacgtgcttaagcgctcaaagatgaagtcgagaggctacgagcccatgacttcataacagaagcattctatccactatgggtatccatcccagtactggtccccaaacccacaaaaagtggaaagtatgcatcgacttcaccaacctaaacaaagcatgtccaaaggactgctgtctacttcccagaattgactagcttatagatgccacacctggccatgaaatcttgactttcatggatgtgtattcaggttataatcaaataaagatgaattcgccaaatcagggagcacataagcttcatgacagacttacgcctgtactgctacaatgtcatgccttttggtttgaaaaatgcaggggccacatattagaggcttgtgaacatgatgttcannnnnnncattggctgcaacatggaggtgtatgaggacgacatgcttggcaggtccaaaaaggctaagggcacgtggaggacttagatgaatgcttcaaaatcctctacagctacaacatgaagcttaaccccctcaaatgttcttttggagtattctcatgcaaattccttggcttcatagtcaatgccaagggaatagaagtaaaccctaacatgatccaagcccttttggacatgaagttgcccaccactatcaaggaagtacaaatctgaatagggcgcattgctgcattaagcagatttgtgtccaagtctacagacaaatgtgtacccttcttcaatattcttagaggcaacaaaaaacttaagtgggcaaaggaatgtgaaaatgcattccaagagctgaagaaacaattggcttaaccacatgtgttgttaaaaccccttgacaatgaagagttaggtgtgtacctagtagtcacagaacgtgatgtgagtgctatcctcataagagaagaagaaggtgtatagcacccttatactacatcagtaaaagtataatcaacgtcgaaagtcgatacccactcgtagagaagctgacttatagtttgctcttggcttccagaaagcttaggacctacttctaggaacaccccataaaggtgtacacttatcaaccattgcggcaggctttgtaaaaacctaaagcattaggctaactactaaagtgggccattaagcttggccagtttgagatcacgtatcaaccaagaacatccataaaagggtcaagcccttgtaaacttatgattgaatgcacaaactcatctcttaaaatatctcaaaatccaggagaaaagcaagagctagagaagaagcgagagcaagagcaacaacaaaaacctgaagagccaacatggaaactacatgttgacggaagctgcaatgactaattatctggtgtaggtattgtccttataagacttgggggcagcaactgcacggagcaatcaaattcaattttaaagcctcaaacaacgaggctaaatatgaagccttaatatctagcctaaagctggcacatgaagtacgagcttaccacctagccatattcaatgactctcaaatggtcgtgaatcaaatcttcggtgagtatacaactttaggtgaaaaaatggcagcctacttgagcaaaatcaaagacttactaagtcagctcaaaggctacacaatcaagaaaatccctagagagaaaaatgctatagcgaatgcacttgcccatctagaaagtagcaatattgccgaaaaagcaaatttggtgccaatatgattcttagaggatcccagcattaccatcccaaaagaagtcgacatgttggctgaaagtccaacatggataacacatattgcaacttacctccaaattggagccttgccagatgacaagaatgaagcaaaaagataagaagaaaagttgctaggtatctaatcctagacgaagtaatgtacatacagagcttctccatgtcgctcttaaggtgtgtcaccaaggctgaagttaaatagcttatgaaagaagtgcatgaaggcttctgcaacaaccatgtcgatgggcaaagcctatccaagaagatactccaacaggggtacttctggcaaacaatgattgaagactcgatggactacgtcaaaagatgtgacaagttctagagattctctaaaattctaaaagctccacccaatgagctcataatgatgcagtcttctttacccttcgcaatatgggggatagacctaattggtaaactcccaaagggaaatggataggtacagtttgatgtagtcgcagtagactacttcacccagtgggcagaagttgaacccatggcaacaatcacctccaaaaaaatccttgactttgttgtcaagaacatcatatgtcaattcagacttccacagaagattgtgttagacaatgaaaagcaatttcacaatgacatgttcactaatttctacaacatgcatggcatcatccaaagcttctctgatgtggcccatcctcaagaaaatgggaaggtagaaggtttcaacaaaaccctcaaggacaccctaaagaagcgccttgaggaagcaaaaggtaattggcctaaattgctcccagaggtcctgtggtcacacacaactcttgagaagaaagccactaggcaaaccccattccctttagcttatgtatatgaagcaatgttgcctgtagatctggtgccatcgtctcacaagagaacaacctatgaccaacaaataaacaatatcctactggcagaatcccttggcgaagtagaagaaagaagagatcaagccaaccta

SEQ ID NO: 123721 - DNA, 1265 bp, Cannabis sativa
ttacattgaaacagagttttatttagggcataaaacccaacacactgatggtagcttgttcttttttcaaggcttctgatgtgtgttgtgtgaggttttgacaacttttgagttggtatggggcgacttcgagtccgttagtaaattttgacaagtctgcagtgtgtttgagccccaatgttatcagttctaagaaagatatttttgtagatttgttgggtgtgaagggtgttgaatgccatgagacttatttaggcctttcttgttttgcggggcatagcaaggcatggttgtttcattccattcaggataggatttggaagaagcttaatgggtggaaatctaaattgttctctatggcggggcgtgagactctcatcaaagcagttatccaatccattcctacttattgtatgaatctttttaaactttcaaagacctttatcaaaaatattcatcgtatgtttgctcccttttggtggggtggtaatgatgtgaaaaaaaagatgcattggtgcacttggaaaaaactttgtttacataagtgttagaatagtagttgtaaaagatagggtaaattgaatttagcaatttcctatttttatttagcagtttctctttttgtctcctagctttgtatataaatattactattctatagaacacacaattctattcaccattctctacatggtatcagatccatacttagaattgtgatttaaaattcgaaatttgggctaaaaaaaaggagattagggtttgagttttgggttcttttttcggaaaccctatttggagtgcaagtttattctcattcgccagatagagggactgccaagccgctgaactataaaaccccaaattttgacgtccaaattcattatgtgtgggccctactcaccgtcaatcgccattttctaaattcccatgcgctggcgtgtgagggtacgttcgacatctttttcggtgatggtcaatgcccgtcacactgccgacccttccccgtcctccttgcaacgatctttgacgattcttctcattttgtggtttgatacttttgccttctttgtgttctggtgttcattctttggtgtttgctttcttccttttatctttcaattgtttttgctttcgagattatggcagagacaaaatcagataaaaaattagtggttgtttttgatgtttttcccatgatgtcgaaaatcacggaccataaattgattggttcaaattatttgaaatggagcaagatgaatcga

SEQ ID NO: 123722 - DNA, 869 bp, Cannabis sativa
  modified_base (27)..(40): a, c, t, g, unknown or other
aggatgttaatgaaacatacatggtannnnnnnnnnnnnntggtaaaatatttccaacaagagcctcctgtccaggcacaagttctcctgtctcctcggcctttggtacaaaatcaggaggataaaagcttgtacttaataaagttggtgtcgatagccaggagagagatattccgttcatcaggagaatggttgagaattttcagagccttctttctacgtttcagtgtgaatagggggcggtagtaggatggaatttgctgaaaactagtgccagtggtgcccatcctcttgaaaaagtaattctcatccacgaagccccctatcttcgtcaccttagtgttcgtggtgccagtaaaccatgacttctcgatctaagacaagtagaagtacccttacctattttgcttacgacttgacttcagatcaaacaggcagttggtgttatggggggcggctcaccccatccttgtaaggcatatagtacgaatacaacagattggtacttgaggcccttgggagtaaactgggtcgggctgatatggtaataattggctatcttcttcaagtacagaagaaagggtagcattgcaccctatttggtgtaagctcccgaccaagcacaataaccttctctagggtcagtagccagttggcctggggagggaaagaagcattcgacattccctaagagaccacgctcgagcaaattagtcatttcttcatggtcactacggatggtggagaaatccatcgatctcttagtgaacctattcttctcaaaggatgagcctcggtatactcctcaataatgtagccctggccggcctccaaaacatcacctccctcagatactggctctccttcat

SEQ ID NO: 123723 - DNA, 885 bp, Cannabis sativa
aaaaaaataataaatatttataattctaaaaatactaatcccttcctctcctcatacctctctttatctctctggtttcttggtgtggcgccgaaactggaccagagccaccatctccaatccccctctcacctcaagcaaaccttgggttccttttcccgaaacccaaaaatccccaaccctgaagcccattctcccttgcactccctttcttctcttggccccttcattatcacgtcgtcgccaccaccattagctcaggcgaagttggacttgagaatccaaggaaaactcgaaggtgtcgcggaccctctctcttttttctctctatttcctggcttctctctcttgttggggccaaagtttttcgacctcgattgcatcatctttgatcccgttgagccaaacgagctatggaaatgtgttcaccttgccaagggttttgagaatttgtggctcgatcctccatgcacctcatttgaccaagaactgccaccacgcacaacggggggtctttgatggttccagttctgatggagcacccagaccctccaaaatctgtggtagtaattgttgggtttgttaaagacatggattgaggtggtggtggtggtttcttgatggttccataaaaaagagagagcaatcggttgcaatatttattatttatttatttaaaatatttttatgtgatatgaaataattttataatattcaaataataaatattatgtagaccattagaaatctgccacgtgtatactgtgtacacttgggatgtccacctaggcacttaataataacatattaacggatttgtaaaaactaaaatagaagtgtaattcaggagtgtttattggatcacatccaatagatttggaccca

SEQ ID NO: 123724 - DNA, 669 bp, Cannabis sativa
aataatctcaaataataattaataatatatttttttaattatttattgtattatttttaaataaagcaaaacacatctagcataaaacttagtatatatacgagcctcgcacgtagcattccactagtaccacattaagcgcctataaatagttattcaacaatgtggaagttttgtatactgaagaaattgagagcatgatgtgtattatgtttttggataaaagataaatcactcacaaaattagaaaaataaattttaaaaaaatatagaatgacacatcactacttttagatttagctttatatggatagattagcgatgatagtatgatgtttttaatagacccaaaccaaagattttgataggttaaattacaggtgattaaaattgtattacctcttctaaataaaatattataatttcagtaagacattaatcaatcacctataaataaaatattatttattgaacaaatcaaaatgacataatacaaatattatttataatacatgtataacacctaaagtagttttatcaaccatgtgtaacttttagatttaatttatttgtagaagaaatgatatacataattttacatagggatattggcggctaaaccacctgaattttacggtttgtaacacttaaccataaaaattgaatttt

SEQ ID NO: 123725 - DNA, 1172 bp, Cannabis sativa
agagttaaaatgtgtccaacccataaccaacccataattatatggcctatcacttttcaacctaatgagtcatggcctactcttaacataactctttactacaaaaaaatggattgggttggctgggttgaatggtttggcccatattttgtgcactccgacactcaagagtctacgaacagtgagtaagttatcttttttttttcttttatacaatttcctttaaagtacatgcattattctttgaatttttgccgtaaattctggttcttgaatctattcttgactaatctgagatttagaagatactagggcttttaactttggacttatatatgcacgtctcttttaagctttctaatttcttaccattttggctagaaattatctgagattactcattcataggcttacgaatattagtgttcttttaaagctcttggtgttgggatttctttattaaattaaattccttcttttttctttgaattaacattgtcggcatatcgaatatgtttttccttctatacctccatccaactctcaccttttggctttcttcttttgtagatgaaccctggtaagttctggggaggtacacatcacatcgagcaggatctccttcaattcctttacaaaaatcatcctcaactccgtgcagactcgtcttcgaccagtgaaagctctttaacttctagttttgatgataggaaagttagtaatgatcattcaaagtcttcagagcctgcggtacagtatcatcagtatcccgaccgaataagtggagaaggttatggccgattcatctgggaattaaacgagggttggagatgctatctccctgcttcgtggacatatagggtccgacttggtatattgatacactaccagagggccaaccaattccttcagccagacacactaccataatagaggttttcattgatgttacaaggtgcacttctgagttgaatccaccatccaaacgtaaaaggacggagaaaacaaaatagacaggaaggcttcagggttcaaccctcatttcgctcggctattcgcgatggctagggtagagcatgcttgcttccttatcttttttttttcactactttggattgaagtgagctcttgtaattgctcaaaattttccccaagtatctccaactcattac

SEQ ID NO: 123726 - DNA, 548 bp, Cannabis sativa
ttttactttttaaaatttattaattttttattacaaaaagtgaatcggttactaatatatttaatcctaaatacccttattctagccagatcaaataactaatctatttaagagtaagagttcattaaccgtatatataaaaaaaatcgtgtccctatttatatatacataaacaacttttctttgggctattacgatatacatagataataaagtggatgggtaagaaatccccaggtccactcaataaaagctcacttaatcaaacacatgctcaattttaaagcttttaatggccctcatatggttttgattttggtttatgaccactacttttccaacctaccattgaataatcttacccagtaatacaaaaactacactatccctctctcttattgaattcaaatatagtagatacgtagttgtaagcatcaattatgtcccacaacacgtctaatcccaagccataaataaaatgggttccactcctttctaacccaaattattatatatatatctatatgcatatgttttttttttttttt

SEQ ID NO: 123727 - DNA, 2728 bp, Cannabis sativa
tgttaatagtttgattaattaattatttgtagcttgtatgtgtagaattgttgatgcaggtgcaagtggaagtcagaaaaagagagttaggagaaagtagaagggaaaaaatattgaacaagaactagccaagcagcctgcaggtcaaaaattgaactttagatttcatatggagactggggccccagtagatgactatggcaacaagtttaataattatatcaagtttcatgttcgcaatacaattcctatgaaccagtttgagttcgaggacgttaaggatacgctcattcagactatatgggatagaatagcagtaacattctaatttttattataatagatcaaacaaaatcattataaaaagttaaatatatatgactttaattaatgttttttctagaccaagtttgagttgccaactaataatcatatgtttgcggattacgtcaccaaattgatgtcaaaaggattacgtgactatagagcagatacgaagaaggcttggaaaaagaatatttaaaaatatggggaggaagaagcaaccaggagatcacgtccagatatagtgacaccacaggaatgggcagagattattgcatactagaaaaacccaaaatagcaggtatgtattgaaagttgtaatatttaatttttattaacttacgatttttttctcaatttgttaacaataatttaactttaaattacagagaagagctgaacaaaatgcaaaaaactgatgacagatgaagattcaaggtggatgaggatctgagaccattgttggtcacattgtgagcggggtttatattttcaacatagtaatattttgttaataatgtttttcaaattttttatattgtttaaaaataggctgatattcagacgggggaacttcccagtgctgtggatacttttgcaaagttccactgcaaggacaacaaatggtgcgatgatcacacacaacaactgcatgtaattaagtaattttatatttttaataaatttgttgtatattttaatttctatttaactttaatagtttcataaaaaattttgaaggccaaaatggttgagattcgtgaaactcaaccagcatcaactaatgtcccgcgccagcacaatgtcgaccctatccaatttcctgcagatatgcatgttatgacacagttattgggtgaacggtcatgcaacttgagaggactgggccagttgccgagacttaagacgggggcaaaaagagcaactcccagggcaagtccctccaggcagcccactatcactcaagaggaatatgaggtacttaagcaaagggtggaagagcaagaagcatggaacgagtggcaacaataaatgatgatgacacggaatcaaatcatgagtgcattccaacaacaaatgatccaattggccaatgtctttttaggatttaacatgcctgcgatgcctctgattctaccggttccaccatttcaacctcttagctatgctactgggtcctcctcacagactgcccatcccggtgatgaaaacgatactgctgtggatgtgtaattttttagttttcagtgtacataatattactatttatgaactaaaaatatttttatttagtttacgatgttttatgtagttttgtaattacaatataaattttgattttataatatatttgttattatatttattctttataatttcaatttatgtttacttttagttttaaatttaattatatattataaatatttaaattaaaaaatacttttgccggcgtacattaactcgcttgcaaaagtgtataatattttaatattatttattttgcctgcgcattaactcgctagaaaaactatttatttttttattattaaataattttgccaacgacttaatgcgttggcaaaacatacgcagtaaattggataactggcgccaaattcgcgctaaaagttttgccagcgcattaaccctctggcaaaatgtcgacaaggacacctcatccgacaccaaattgccagcgatgaacttatgccggcaattgaattcgcttgtgtaaacacttttgtcggcgcagctactaatgtcgccggcaaatgttgatatgccaacgaaccattgctggcatcatttaccagcgaaaaaagtcactgacaaagctatgtcggcgatttcctctcacttttactggcaaacttagtcgctggcaaaagtatattttcttgttgtgagattagggatgtctacaacaactagtcttcccttattttataagttcccttgaacattattaactgtccaccgatttaactgctcatcatcgatgtatttgattctaaataagccttaatttttcatcttgtcactggcgttgcttaacttgttcaaatagtagcactagccactgcgttagatcatactctaccataacagtatattttgcatgtcccgttataaatggccccatgtctataatttatacacaaatatatatgcattcgtatttttgtttcccacaaaatacaccttgttctattttagtagatatatatttatatatatatcttttaaggttcatttgtttgaacgtactgggagtctgaaattagttcattcagtacatagagccattaagaacatttatatatatagttttgttataaaataatataatgtagatgagaagaaagaagaagaagatgaagagaaagagaaagtgaatgag

SEQ ID NO: 123728 - DNA, 1261 bp, Cannabis sativa
taccgcaaaaaatttagaattgggggttagttgcaaaaacctccctactttagggggttttgccgcaaataaccctaaataataatattttgttcatttttaaaacaatttgcttatgtagtcgtgggtcacaggtttaattttagtacaagggtcacaggtccatttatcatagctccaatattagctaacagtcaaatcagaagaagtttgtggtttattgtgatgcatccagacagggtctggggtgtgttataatgcaagctgatagggttattgcttatgcttctcgtcagctgaaggagtatgagcagcgatacccaactcatgatttagaacttacaacagtagtttttgcataaagatttggcgacactatctctacagagagaagtgtgagactcacaccaatcacaagagcctcaaatatttctttacttagaaagacttgaatatgagagagaggcagtggttggaattagttaaagattataattgtgaaatcttttattatcccgagaaggccaacatagtggcagatgccttaagcaggaaaggtcttagccaagtatttagcacgattatgatctcacctcagttggcaaatgacatggtcaaattaggtattgagtttatggttggtaaacttagtaatttgacgttacaattatacttgctggaaagaattagagtagctaagttagtggatccagagttggtaaagacttgagaagaaggtttagctaggcaagctaaggatttcacagtgtcaagtaatggaatgctgctttacaaagcccaagtttgcattcctaatagtgtggaacttagaaaggagattcttgatgaagctcatactacaccttattcattacatcctggtaccaccaaaatgtatcaagatttaaaaccttactactggtggtgcggtatgaaaaagaatgtggtggagtacgtatgttaatgcctgactttttattagatcaagactaaatatcaaagacctataggattattgcagtctttgactcttctcgaatggatatgggaggatgttacaatggattttatggttggactacctagaaacacgggtatgtttggttccatatgggtagttgtggatcagtttaccaagtcagcacattttctacctgtgaaaacaatgtatacagtaagtcagtatgcagaactctatgtaaaggaaatagcacgattacatgggactctaaagtccattgtatcagatagggatctaaag

SEQ ID NO: 123729 - DNA, 1527 bp, Cannabis sativa
  modified_base (1492)..(1502): a, c, t, g, unknown or other
taggattccaactaacgataatcctaccacctttatgccaagcactattagtagtgaaacaccatccattgaacatcctcatatataaggctcccaagttcagagccttagctcttgtctcgaggagaccaacgagccctatttttgattactaatcaattatttgactaggtttcgcttttgttggctgtagatccctcggacattccagcttaaaattttatccatgatttagagagggaaatcccgcctctcctgtatcatcttccttcacttgcttcctttgtcctcaatagagtccttcattgattcatctatcagatgctcattccttttatcttccagcagctgaaaagagttactggtagaggcaacaccattagcaatctctgccctagtcttccaatcgttaactacaagttgaaaccatcagagtcaacaacttcttttggatttgtcaggttttcattattcttttttcctggattctttgacatctttgagaagaggaccccattgctatttttgtctaggttccttctttctaaaatcgttcgtagcatgccgcatgccattacaatttgcacatatcacaggtttccattcataggaaatggcaactgttgtattacaaccattttcatcttcaaactcaataagctctggaagatcttgtttaatagccacttcaatgagtaccctagagaagtttaacttttctctccttttagtagcctcatcaaccacaactggttttccaatctgccttataatcttgtacagagacttttccccccaatatttcagatctaactcatcaagatgtacccaaattgggaccatcttgatgtcttctttcttaacattgattgagggttcctaaggtttcatcacaactggtcttcgattaaagaagatgtaccccctgtagaacaacatctctgtctataatggtgttaaacctgattatatagatgccatacgatagcaaccctactctttcaattttatcaagccacattctcctaacaaatccttctataacaacaaggggaggattagctcctaaaacataacacgcaatagaaggtttccagaaatcaacttcatcttgaatatcatcatttgttatcctcactttgttactcgaattgttcgaaaagagacttcgaacaactgaacctgacctcaatacaggaggattagtagtcataccttgagagatcttagtagagcattgctcattagcctccaagaaatgcactaaatcctttctgatatcatcctgcttaacaattgacttaagaaaggatttaggggataatggagcaggttactgaaattctagaggtaacgctccaatttcatcagtcgaatcttcatcttcaacatccaaaaattcaatgggagttattcctagaactgcatccattgaattagttttctaaacaactgaaacagagttagggcccttctgttgggttttatgccnnnnnnnnnnntccatttcaatgtaatccattttat

SEQ ID NO: 123730 - DNA, 3883 bp, Cannabis sativa
  modified_base (3852)..(3852): a, c, t, g, unknown or other
tagatcagattattattaagttttattttgattaaaaatcagttcagggtcctatttgtacaattttgaaaaatacaggctctattttattttttaataaaacagaaggtccagttaataacttttacaaaatatagggtctaaaataatatctgcccttattaaaaaaaatgtatttattatttaaggcatgttgatttaagaatacataataatttatcatgataaggaattgatgtatacatattttttttttttgaataaaagttaaaaatttcattaaccagcaaaatcaaccagtaaaatattacgcaattcaggacttaactgataatcctgaaaagtacgatttggagaaaaataagagctacacgccaaataatgggcggctttgttcacagatcgttcaaaaactgaataacagcatgactcaaagaagataaagcaattttgcaatcatttaccagtaaaccgaactcagacggcatatgcaactcactctggatagcctgaacatagaccaagctatcagtttctaacaaaacattttgccaattatgtccctgaatccagcttaaagcttccttaatcctaatgatttatgcagtctctggcctaacagttccccttctgctagtagtgaaggcctcaagaacttgaccagcatggttacggtctaagcaacccatcccaaaatagctaacatcattaaacaaagctccgtcagcattgaccttgatctgatcagtggctggtgtagtccaatgcacacgcgaagacaatcccactgaactgttagacaacaaattcgtcgtccgtgattgtgcaaaaagaaattgatcaaggagtgatcttgctgacaaaacaattgatgcagcagtaggagatttttgtttccaaacaacctcattacgggccttccagataccccatgcgaccatcactgcttcctccaatgcttgaagattgactcctgtcgaaagagattgaaaccaagagccaaaactagcaattgaccaactagaaatattaaccatagatctattccaataggctctagcaaaagaacaactcactagagcatgaaaaatagattgctcagcctcatgacatattggacaaatggggctaataaccacatgacgcttgagaagttgcaaacaagttgggaggatactcgaagttgctctccaaataaatttactaaccttttggggaatctttaacttccaaattttcctccaaaaactagtggtttcatcttccaactaaccgtctttgagattttccaagaagcgatacacactttttacggtaaacaagccattattctcaaatttccaagaccagcaatctctatgatagtttgagctcagatgaatagatgtgataagagcactgtcatgggcagagaataagtcattgatgatttctatgttccacaccttatcatccaaacgaaaaagactgtgaactgttttgtcttgtaaaccaggatggtccgaatggacatacggatctacagggcaagataaccaaggatcatgtaaaattgagatcgtagaaccatctcccacagtccttcaagcacccgcccgaacaatagcttgcacctcatgcacactttgccaaacaaagctcagattattacccaaaccagtatccaaaaaaaaaaaatccatttgggtagtaacgagccttaaacacctttccaatcaaagaagattcatttgtaaggagccgccacccttgctttcccagtaaagataaattaaaatcatgaaggctcctaaaacccaatccacccgcatgcttgtgtctacacattcgaccctagctcatctaactaatattccttgtatttgaagagcctgttctccaccagaatttagccataagaccttttaattccttgcaggtttccactgaaagcagaaagacactcattgcatagttgggaatagcttgcgcaatagtttttagtaagacctccttccttgcacgagagagtatgcgaccttcccacccttgaatacgcttttgcaatttatccttaaaaaaacctaaaatggtagttttctttcgacccatgatatttggtagacctagataggtgatgttatcatcgacttcataaatccccatctgtccacagatcgaatctctcacagaaacttcagtattagaactgaagaaaacagataatttctcaaaattcactctttgacccgaagctagctcataaagatgtagtaaccccataatagaatcagcttctcgagtatttgctctataaaaaacataactatcatcagcgaaaagcatatggaaaatcaccaaagctctacgagccactttgcaaccatgaatcttgccatcaacctcatatttcctcaagagacccgaaagccttcagcacaaagaatgaagagataaggagatataggatccccctaacgaataccacgcataagaagaactggacccatctcacaaccagcatgcataaaagtataagatactgattccccacagtgcataatcaagttcacccatctcccatcaaagcccatccgtaaaagaaccgcacgaagataaccccactccattctatcataagcgttactcatgtcgagctttaaagccatcactccttttctcccttgagttttctttttaaataatgcatgatttcaaaagaaaccatgatattgtttgagataagtcggccttgaaaaaaagaactttgggtttaagatattacagagggaagcacaatcttcaacctattttctatgacttttgttatgaccttgagtagcacattacaaagcaaaataggtcttaaatcatccatgttgctaggttttttttcttggggataagaaccatatttgtattattgagaccatctgtgagaacccctgtcaagaagaagttttgtacttgtgcaacggcatcccctccaactaggtcccaacatttttggtagaaacctggtgccatgccatccgaacctggagacttgtcagaatacatttgaaaaagagcttttctaacttcatctgcttcaacaggtctaagaaaatcctcattttgagcaaccgagatacaaggagaaatataattagaattatgagaccaatcagagccgctggaagaaaacaagtttcgaaaataatgcatcattaactcagccatacccgtgtcccacatgccaaatcctattcgaatctttaagcttggaaattaaattgttacagcgactggaagaggctgatttatggaaaaacttactattgttgtctcccgcttgtagccataattgcttggatcgctgtctccaaaaaatctctctctgagtaaacacctcaaacatattcttttttgtattttttttttaaattttgaatagaaagagcatctcaaccatacttccatttattaatctcggccttacaatttttaattctcaccttaaaattgtcaatataatccttactccactcactcaacagctccccgcaatacaaaattttctcttgtatccccttaccaatacaaagatcccaactatctttaataatttagaaacaaaaaggttctcttaaccaagcattttcaaatctaaaattcttcttattaaagatagccacctcattcttaggcactaaaaatatgggataatgatcagaactagaaagcttaagattaaataacttacaatttagaaataagtcaagccaagcatcagaaataagcacccgatcaagcctcacttctatccatttgggagtccctctactccgttctcatgcaaatggataccctattgggttttatgccctaaanaaaactctatttcaatgtaatccagattatt

SEQ ID NO: 123731 - DNA, 961 bp, Cannabis sativa
  modified_base (42)..(82): a, c, t, g, unknown or other
aactttatatgtgtttactttcattgttttagaaattcatannnnnnnnnnnnnnnnnnnnnnnnnnnnnnnnnnnnnnnnntggtaaaacatattccaacatgtttttcaatgtgttgtctattctattaacataatgccaactctagtaattggcaatattattccttatgaatgtttgtttcagcaacaacctgattacagtattcaaaagccctttgttgtgcttgcttccctcatttgaggccatactctcatcacaagatggaatacagatctgaggagtgtatctttcttggctattttcccaaacataaagattatctttgtgaaaataatactttataactattattgatgatagtagatacacatggattcatttcattaaaaccaaatttgaagctcaaaaggtcattcccaatttcttacatcttatcaaaactcattttgtgttcaaatcaaagggataagatctgataatgccaaagagctacaatttacggacctttttagctctttaggcattgttcactaccactcatatgttcaaagaccccaacaaaaattttgtagttgaaagaaagcatcaacacctcttgaatgttggaagagctttattattccaatcctacattcttttgtcttattgggatgaatgtgttgccacttctgcttatctcatcaacaaaacaccaactcccaatttaaagctcaaaatatcttttaacattttgtattccaaattcccatcttatgaacacctcagagtttttggatgcctcgcatatgcttccactctatctcaaggcagatctaagcacacaccaaggtctgcaccttgtattttttagggcatcccactgcaatgaaagcatataaacttttcactaaaatatgctaaaatctctccaaaatactctaaatgcatgaatagtctttaaaataacctaacaaatta

SEQ ID NO: 123732 - DNA, 1982 bp, Cannabis sativa
tcttcaactcaccgccatcgatggtcgccgagctttcgtgattgtccctaatgaccttgaccttattgacatcttggccatgaacagggttatatattgatctccgagggcgattcgggttaggttgtttctgagaagaagtaagaatggcagaagaagggttaaggggttctgtcgagaagaaagagaaacagaaagagaaagaaaaagaaaagaaaaagaggaaaaaaaaaaagaaaaaaaaaagattttttttatttttataattttttgttaatttttaaattattttaagtatatttaaaattaaaattacgtggaccactaaaattttgctacgtgtactcttgtgtacacgtaggcagtctaccgttgcactcaactgtaatttttggacggaggggtatagagcaaaacagaaccagggtttaggtcgttatgccgcccgatttttgtggttaactataacaaacctaaaagtttgggtagtttagcagccaatatccctataaattttgaaaatgattttgtgcaaaggaaattttgggacagtgagtatattgcaaacgtattttaatttggtccaaaaacatatattgtaaaagaaaccaaggattatcatccttttgtgagaaaaataaattacaaccaaacttttttttcaagtttaatttttaagcatttggtcaatttgttttacaaagtttaataatatatattcgggtaaatattattttgtaccctatattttgtaaaaattattaattggaccctctgttttgttaaatgacaaaatgaaccctccaaaataataaaagtaagaccttaagttcaattttcgacattttctttcttaatataaccaacatgaagacaattcctaacacaaataaatacaaataatgtaaccagttttgtcataatacatgtctagatcgaattatattattaagttttattttgactaaaaatcaatccagctcctatttgtacaattttaaaatttacagaatctatttaatcattgaacaaaataaagggttcagtatctaaaataatatttatcctatatattcataaatatcatgtacatgcgggaatatagatgaattattttacttcttatttaagattatagttaggggattcagtgtgttttgtccccataaaatgcttaccatacgaattaatacagaggaatgtttgtagtcatatctattcaatcttcattcttagataaattattataaaatataacataataaataaaacatttatgttttttcaaagaaaaaataaagaatataaaatctcaacattaaatttacaatgaactaaactcattactcatctatacgtgggtgaattttcacagaaaatttaaaaagacaatcaataaggagtaatttataactatagtactgcagtttatagctagcctgaatataaatgttattgtcagtctaacatatatatatatttatatatatatatttcatctactaacttgaaaatataatactaaagttttttaacaatttgattgtaattgttttgcaagtcatgatatatattactcattagtcattcatggatatttaggggtgttcattagattacatctaatggatttggactcatcccatccaatctaattatttattggatattggatttttccatctgatatccaatccaattgaactgagtcatccaatccgatccgatctaattgatgtattgaattggatcagtttaatccattggatgctttaactggttttttattggattggattagatccatccaataaatctcatggatgaatccaatctattttagccactatttaagatgatttcattaaaaaaaaaatatatgaaaaaacataatttaaaacttaataatataacaaagataataaaataacatataaaatattaaatatataaaattataaatattaaatatgattggatgg

SEQ ID NO: 123733 - DNA, 1512 bp, Cannabis sativa
tacttgtttttatggttctcctgtggaaagtcataggcgttttacttgggaacttttggataagctttattataatgctcctagtcttccttgggctattatgggagatttcaatagttatctatttagtagtgataaatttgggggtcgtgttagttctaattcttgttcttcttcttttgttgaatttattaacaaattttctcttattccccttccttttgttggtaataaattcacctggtataattctagtgttaaagaaagattagattgggtggttgtctctgagtcttggtgtgacctttttcctaataattctttacatcatctcggtttttgtggctcggatcatagagctcttaagttagttttagataataaatcgtatactgtacctaattttgtcaataaaaggtttagatttgaaaatatttggctggaggaccctgaattttattctactgttaaagaagtttggtctgatcaatctgttcctatgtctaactctgggttgcagtttttctttgataaatagcaacactgtgttagccatcttaagtcttggggtaaaaaacataattctctttttaagactagaatttctcaacttaacttagaaattgaccaacttcgaagtaagatggctctcaattctgaggagtcccgtaggcttagttttttgaagtttgcactagactctctgctgtataaagaagagatctattggagacaacgtgctagtactaaatggttgaaggctggggacagaaacacaaaattttttcataaacatgcctcttttaggaagaaagtgaatacaatcaagtttcttaaaactgaggatggctctgttgtgaatactcaagaggggattgtaaatctgatcactgactactttcaaaatctcttctctacccaaggcagtgatgtgcatgctgcttctgctatcttttcatatcttaattttgggttagaggattctgatgtcagtttccttcatcaagattttactcctgaagaggttaggagagctgtttttcaaatctctggtgataaagctgtaggtctcgatggcttcaatgcccatttttacgagaagaattggtctgtcttggggtctgatttgactaaggctatcttggattgtcttaatcatgctgcggatttttcctcaatcaattcttctctcattgtcctcattcccaaaaagcaacgcgctcattctcttaaggacttcagacctattagtctttgtaccactttctacaaaattatctcgaaaacccttgccaatcgtctgaaggttgttttggacaaaataatttcccctaaccaaagcgcttttatctcagggcgtatcatctttgataacatactccttgcgaatgaggtagttcataccattaacaataggaaaaatgggaaagtaggttgggcggcccttaaacttgatatgtcaaaagcttttaatagggttgaatgggactttcttcaaagtctgatgtatca

SEQ ID NO: 123734 - DNA, 1507 bp, Cannabis sativa
aataaatttataaactatatgtatatattatgttcaaaaaaaaaaaaaaaaaaaactatatgtatatattttattaaaatataattatttatatataaaaatatgttttataataaattagagtttatttctcaattatttaagataactactaaatttttaaaggaatttgataatttattaattcaaacattttattgtatatacgattagttaaaaaaaacacctaaataaatttgttgaaacatatatgccaatatgaatttttcattattttttaattttttttataaagaaaaattattaaaacaatagtagatacaataatatatgcttttctcacaaaaaaaaattacaataatatatgttaaattgtaggcattaattaatttatttttatttatttatttatgttatattttatggtcactatttgtggctctgcaataaatacacggttaatgactttttcggggtactttcttgcttcttagggaatctattttattgaatctttttatttttatttttatttattattttggtttttgtttttttgctaaaattttattttatttttatttatttttaaaaaaagtggttgtttaatttaattgcgcaattaattaacttcttgtcgaaaggaatccacagcttaatttagcactcaacggcttaattccattttttctttcattaatatttttattattatttaaatagtaataattaacttttcttagggaaaagttgtaataaatatttaagttaatgacattaaattatttcgttataattggatctcacaccgaaaatttagagaggtagattcggaccacattttactaaacattattaattacactaaataattaagtttaagcttaaattttggaaagaaaatagataaaaagaccacgtcctccttttaccaagctttatttattttaataataataattggtcattatgaattaaatcattatgtaaataataaaaccataaaagtatttttttaaaaaatatatattattacaatttttttttaaaaaaaataataattttaccggtgattgcgattgtatttctattgtcaacgaaatcgactctgttttcaaactgaactggtttcaatttattttatttatttattttattttttttgaaaaggggtttcaaattttcaatctatatgaattcacggatttggaaataataaatagtagctactataatttgaatgataaatgtgaataaaatactttacaatttacatgctaaccaattataggaaagaaaaaaaatgttttttgttttcttttttacaaaaacggccagttaaaaccttaaaataaatctactagataaattttttcataaaaaaaagattgtcaaacaatatcattaagcaaagagtatagggtaaatactatttttagactatatattttgcaaaatttacctattatactttgggcccgtttggtacgcaggactggattggatt

SEQ ID NO: 123735 - DNA, 1420 bp, Cannabis sativa
  modified_base (972)..(976): a, c, t, g, unknown or other
tgctgtgttaaatttcactgttgtttttagttgttttgatttgtgttccatagatgttttataaaaacgcagtatttttgaaaatatttccgtgtgacggtatttttgtaaaaattaatccaaattttcatatttttgtaagtttcccaaaaaattgtaggtagaaaaaaaatgttttgttttaaattataattttattatataaaagaatgaaatatacatttgatttattaaattttgaaatatatttataatatacatgtattaaaatttttaaattattatttttatacattaaaatattaattgtatgtataattttttttaaaatatatataaatatatgcggattggacttgattggattggtcacttttatatatcaattagcatccaatccgcacaagtgccgattttaaatttttcaatctaatctaatcagtacaagtacggatattcataccttttggagtaaattggatcgtgcgaattgagtactttacgaacacccctactgctgaggtacttgtaaactccatgtccaatgaaagtttgtgataacccataactaactattacaagtgggaaatttgaatttatatgtatgcatttatggtatattaatttttttaaacacaaacttactaaaattaaaaaaaaaaaaaaaataggcatgctttatatcaataaccataatacccttctcacttctcttctcttccaacttcaccatccatactccccattctatccacttcgatggtagtccgataggggtctgatagtggcccattttttaatgtttttggacataaaaaaatagtagcatcatgccactatcggaccaccatcaaactaatattctacatttatagatgttaaactccattcattaagctcgtcaagaaggtattaggccaccatcagaccaccatcggactaccatcacatatcctacatttataggtagcnnnnnatcaccatcggaccttcatcttcaacctttactcattttaacaacaggaaggcgtcaggccaccatcagaccaccatagggcctggcaaaaaaactaattttctgttcaaaactcagatctgaccatttgcaatcctaaatctaacatcaattcacatatagcagacattaatcataaatttattcctaaatgaataaacctataaataaaaccatacatttcaatcctaaatcacacagaatacaataaaataacatggaaaacttacatttatagtgtggtggtcgtggttcgaagatcttggatcttgggttggtagtcgtcggttggttagtggtcttcagttggaggcatgatggttggcagccatgggttgctagggtctttgtgtgcatgagaagaagagatcgagtgagagagatgttggaaattattttatcagg

SEQ ID NO: 123736 - DNA, 972 bp, Cannabis sativa
agttgtgagagttgagaaaacaacttgttgaacttttattggtcatttgagttggcaaaattgaacttttagaatttcaaacatgacatttactagagggattcatttcttttgtgataaagagcctttattttatttctttgtaatcttattttatatttttgtgtttttatttctttttatatgttgtctcttctcaaaaataaaaatcaataaaaaaaaaggtaaatcaaaagaaaagaaaaaaaaaagaaagaaaaatcataaaaaaaaaatatagaataagagcaacattattttatttcaattttcaagtagtctctatattttctaaataaaaaatatatatattataataataataaaaaaaaattgagagagaacttgaataacattattttattctctctttaaaaaaaagtgtttcaatttagtattttattcaagaaaaaaaaaggagagaaacatcatatttctctataaaaaaaagggaagaaatatatatacatatgtatacatatatttattgttatatttttctatttttattagttagctctttagctcttattttgtaagtatttcacataaatcccaaaggttatttatcatttgaatttcattggtttgatgtgtctatcttgtgatcaattcttgttcaaattgtttgtcctaaagaaatatttatcctctctcatttgtgcgttaactgttacatttccaactccaaaaagagtgtctccctcccaatacaaatacttttaatacccgtgaggaaattggagttgagaccttttttctttcaatactatttgtgttaatgcttaaaaaatagataaaagtttggtgcacacacatacaaaactctgaaattacaactgaaataacattgatagaaatttttgactctataccaatattttgaaaatgcttggatggttttgcttggtttgacttgtttattcaactcga

SEQ ID NO: 123737 - DNA, 2137 bp, Cannabis sativa
tcaggttgacaaacacatcttaaatcgaaattgagataaaattagtataaaagtatacatgcatacatatttagcgtacatgctagttaatttatcaattagaataccgagtctattggccagagtaccaagtatatcggccagagtaccaaatatattggccagagtaacgagaaaattagctagagtaccaagcatatcaactagagtaccgagaaaggatcatggttaggtatatgggcgcctggttacggttgggttacatgtttatattcatgtttttttattaaatctgtcgactcacaaatatgtttacatgtgtaggtaaaggtaaaataaaggttgagcagcaataagtctggagttggatgaagattgtacatacaaggcggttagacctaaagtgttcaaatcttcaagacagttagatttttattttggtaattgctaagcaacaacttttgtataaatatgttttgtaatcttttaaacaagatcctgaaatcatataatgtttgtataaatatataataataataataatataatctaaaggcgctatgacaagactggttacattttttgtatttgttcgtgctagaaattgttttcaattaattagttatattgaaaaattgttaaaaattgtgttcaagataatattttataccaataaattaaatttaatttgtcatttaataaaatagtagtaagttttataaaacacaaaatcgaaaattgtattgattaatgcataatataacaacatatattatgccatagtgatcttccaattaattaactcagatgcaatttcaaaaccctttgtatgtttagtctcaatcatacataatgaatgagatttgttttagggaaaaaaacacattttggagaagaagaagaaaaaaaacttaataaatacacactaaaatcacaatacaatattgcaaacaaacaatattttttatgctgcatgcatgtgcttgcatattcactattaattatttccatttgtcacaataagatggaaaaaaatcattcaaaataatagaaatatttcccttagacaatgtataaatatatatatagaaatttttcaataattgagatttgagagaaaaaaaaaatcaaatttttagtgagaaaaagatcatattttggaaaaagaagagatagagagacatgagatatgttttgtaaagtaatctcttattttaagagtgttttttcttcttttttatttaaaaaaaaaacatatatattaattaatagaaatataatagcaaatgcaactaaaccttaaccaaaaatattgctattactacctatacatattagtatattacaatttttttaactatatatatctagaagaagaatctaagtaaaacagtatgtagttaatttaacttaccaaaacaataaaagtatactttaacccacaattttttttattacatatatatgtaaaggaatgttgaaattttatgaattttatttttaaaaaagttctcactagtggcaataaagaatataacaaaaatcatctttaagagttaaaatttaataggaatctcaagcattaaataataatacatatataaaaaagtttatgagacttttattaagagtattcatatgagttatactaacttaatttataaaatttatatagctccaaataatcaaaaaagaatactttaatcggatgaactaaagtactactctagctattttatagctcacaatataaaattttttaaaacacattactataaaattttaattttttaattttactaaaaaaatttatattatactattaattagtttttattatttttttcttttttcaacatttaaatgttatgtttttaatctcttttaagagtaatttgttacataaatacttaagtttaactcttagttgcatataaatgtcaagtcattattcacgtgttattttcttattgatacatttaatttatttaaaaattagtttaaatataccaataaaaaaatgacacgttgataatgacttgacatttaatactatttattcaaaaataaaaattatttttttcaaaaaaatacctactttattttttaaaatagggtaaatagtggcataagtccc

SEQ ID NO: 123738 - DNA, 503 bp, Cannabis sativa
gtggtatttttcaacttacccctcccatcaatacattacaggcccattgggcccatatactatctataaataacgtattcatcaccgcaaatccttaaaccattccttctctcgctcttcaatggtagccgcctccaatttcttcatcatcttcctctaatctcttccaagtttacatttttattcaacctaatcgcttatggttttcacaaatttgtccgtaccatcaaactttcaaagctttggcaatctctgaggcttttcatattttgattttttagatctgagaattttcatcaaaaggcaataaattagagtctctgtaacacttgatttttgaatagtgttattagcggtgtacgttgcccaaatcgaatctgagaattgagattccggcattttactccattttttcaattgagttttacgcattcatatgttcccatatttcaatatcactgtcttttaattcagcttttaaaaacactcgtttttaagttctg

SEQ ID NO: 123739 - DNA, 2124 bp, Cannabis sativa
tactattaaagaaacaaactatcattaattaaaatattaatgaaattttttatttttaggtgcaccacgaaattctcttatatatataattagggtctatgtaggtacaccatataattctccaatatatataaataatttatgtcatttaaaaaaaaggttttatgtaaatatatacatggtgatatatatatgatccaaaaatgagtgtacttgcatctttattatattttatataggtataattttatttttataaatggtggtctatattgtatactcatttaaaatattatgtaagtattttttttttaaaaaaaatagagtaatttatatttttaaaaataagatttaaataacatattttacagaaatattaaaaacaacaaatacaactgtaatatatcatatctttggcgctaaatttatttagaattaatatatatagaagctaaataactaatgtatgtattgtcttacaaacataataaaataataactatttatgtgctaaaaatacgatataaatatatattgtacaattattttttggagtatatttttaatttttttatatttatatatatttttgagcggggatagtcttcactttacaaatagtaaaccgtgagaattaatatttaattaattataataaagtgatataatattttatagtaatattgagtataagtagtattttttcttaatatttatatggtcatgaatattttgctctacgtgcgtagcacgtataactttactagtatatataaaattataaatgtaatttattgatttctaacttacatcatgagtaaccaaaaacaataattcgagattaattgaaatttgggtagtgaaacttgaggttagacatatttagctgacgcactataataataatattagtaacattattattagatacaaaatatgtaaattattatattttcctaaaattaaaaagtcattcatttcgatttttaggttgataaaaaagtgagtaaaactaaagatttttgtttgagtattattttgtacctaagaccatctttaatggaaatggaaaagttgatctatatttggtataaataataattttgtgatatttttgcataacttttattattatgctctaatgcataattgttaatcttaatgcaaaatttaatatatcatttaatattcatctcataatttattaaaaatataaaataataataataatcatacaataataaatataaaatttaataataattatgaaatcatttaatgtagatgagcatgcaaactaaattttaataaaaatattaaaaatagcataatagtaaatataaatttatagcatttattgttatacaaattttggatcatattatattgtgatataaatttagataacttttttgttatgtgagacatttgcatcatatttagacacaccattagaataaatttttgacaaagtgagccatattttatatttgcattacttatttatatatattttcattggagatgctctaacaacactatattgatgtagtatatcctataattaatcaacgaatttttatattatttatcaaattaaaaatatatagaatctgatattgaaatacactataagtcacctcttaaaacacttagcatcttaatttggtcttcagcattttccttttcttttgacaaggtaattacatgacaaatttgtattacactcaacattaataatcatatatagaatattatttgttaagcctctcttttctaataaaactggtccttagagcatgtgcaagagacggtatattttcatatatcccgtgattatggtctaaggaagctgcatttcacgcagcattttaaagttttgtctacagtgcacggtatatatgccgtagacactgcatatgtattatatataatttaattaatatttatatatatttataaaattaagaattattttttaaaaaattttacaatatatatttttaaagtgatgtataaatttattcctatttgttttggcacccgaaaaaattttttagtaaaaaaatatttttttttacatagtcgtgtatattataattatttaagaaattttacaaaatt

SEQ ID NO: 123740 - DNA, 1779 bp, Cannabis sativa
aaatggttcacttcaatgatttattgcatattaagatcttgtttgaactaacaactgtataagggtgtgctacattcaaatgatcaacatagcatatcaatttttcccataaccaaatataaatagagcttataagaggcatatcatcccattcatcacacacacctaaaaccccacttaagcagaggtatgagtctctatacaaagaaacaaatacagaccgttaaacccaggattaaatgaaaaagtagttaagtcattgcggtgaaggatagtttttgattgagaatagaatagtataaagaagtgagtatagagagtgggagagtttatgcaagacttgagagtcatttttctacatattctctattctagtagcaatctatacacaagttctctctatttttctgctattgggcctggaaagtgagtataacaaacagagacacaagtggctcacgaaaagaccgatgacatttgggctcacaacagattacaagtggctctgataccatgttagaatttaggataagatgaataaggttccatctcaaaaccaattggcaatgggaggagtaactcattcattacaatttatttccacaaattagcaatgtaggattaactctaatagttcttgcacgagaggaattgggccttatcattaacatttaaaaattgcttggtaaaagaccaatttgaagtctaaattcatgataatcaacttatctaagtcaaaacaaaactcgtgtaagataatggaactagaatattaaagattaccaagttaaattcttactataactacctaattactaaattctacacccatctcaagtaaactatggcttgttgatcagagtaaaattatgccaaattgaaatacaattcaaatgaagtacaatcaatcaccaattaactatactcgaattgaaaaaatacagtcgaaattacataaaagaacacaattttgaagagaaacggaaaaagaacaaaccatcagaagacgaatccacatcgttgggaagcttcgagacaaggcaagcagaagctatggcactatgtagaggtctaaaagagctcaattctcgcctcaaaagccttccaatttaatcaataaccaaatttataatacaattactactaaaaaaaaactgatacgaaaaaatgacgatgaatacctcaatggagtcgatgagattcgagcctgggcctgaggaggaggtaggaaaggtgatggaagcgaaggtcttggtggtggtgagactctttgggtagctctcaagaaggcgcgaaccgccattgttgatcttcctgaagctgccatttttcttggctaataggtattttgggactcagctgaggttagaggagaaagaaacccccctaaaacccacctacagtaatgggctttttaatcgggccgggtcatacggaatgggctgatggaatttactatttactgtatcaaattaacggtttttaccattttcttatgagtaatgattgattacacaatttttacacgcaaaatttgcatatacagatgcggtaatattattaagagtaatttgtagtataaaatacttaagtttgactctagttttaaataaatactcaagtttaattttttatggtaataataactaaattatattttcagaacttctataagtaactagtcaggcgtttggttaggaggaatgaaaatataggaatgagaatgggaatagaaataggaatggaataaaatttaaaatgcataaaaaaaaaattgat

SEQ ID NO: 123741 - DNA, 712 bp, Cannabis sativa
ctttatatttatacagagataatatactcgtgcacatgaattagagattcttaaacttaaactggatgaaaaattagtttaaatggatgatttatcattttttttctataattaattaaactctaattatttttaatgaataatcattgttaaaataacacatgaaaaaattgaagaacactaattacaaataaaatctaaaaacttttaaaggcaataacgaggatgaactaaaattttaaacaaggaataaacattggaagctcaatgatattcaaacaaaaaatttctattttttttcctgcaaagtatataaaaattctaaaattttaataaagaatatatataatatggtaggctagatagaaaatgcgtgttaagaatgtggaagtgtgaagtaagtaagatagagtaagtgtataagatgtatggatttctaactacaaattaattaattatcatattttttactacaagccgcaaaaataaacatatttgtagtttctaaagctaaaagtgtcacaaatataaacttaagagtatatctaataaagtattaaattggtaaaatattgctatattttaatacttttcaacaaaagactatgcaatggttgttgtatattgtgtcaaatttgaccaatgatataaaacatttataatggagtgctaaaaagggaaatttgattttttatgcttacatatggttaaa

SEQ ID NO: 123742 - DNA, 760 bp, Cannabis sativa
  modified_base (713)..(721): a, c, t, g, unknown or other
tttttttaaaatctatatttttttattttttattttatttaaatttttttaattaaattattatttaaaccaattaaaaattgacacgtgtcattttatttgaattcaacggttcagttaagttagggaccaacggacttacagaaagtgtgaccttagggattattaccgtcaatttttgaggttggggactaatcggcatcaacctcaagtttttagggacttttaccgcaatttccccatttattaattataaaaatactgtagatacgtaaaattaaaaaaaaaaaaatcaagcaagcatgtgtgtagcacaagcaagtgaagaatacaaatgaccacatttagaatctactgtgacaaactattattattttttatttttttttttttggcacggactattattgacaaaaagaagaggaaattaataaaatatatataaatgataatatttgtgagacatgttacaactacatatgcgaaacattaaaagtatgaaggacttatcaaataatttttattttataagatataaaaaaataattttatattatattttttttggccaatcaaatagctattttcggtatcttattattatcattttgataatattttattagaattgtaattataatttcattaaaattataaaaataagaagagtataaatcgttacccaatcatatatatattgtaacaccctaacnnnnnnnnncgtattacgtgattttcaaacgtactgtgcagctcgttg

SEQ ID NO: 123743 - DNA, 595 bp, Cannabis sativa
caaaagagagtcgactctaaaaaatagtaaaagaaaatagcaaggacacaaataagagagattctacgcatcacacatcaaattcagtcaaagttatttcccagaaattcagcactcaacccaaaaattttaatcataccatgcaaacaaacaataaacaagcacaagatatccagagaacttacatgaaggttgagagctggaggtcggtgttgatcgacggtataacaaagactggcagcagcgaaggaagagcagcaagaaatctatggtgtttggaattttttctctctgtaagggctttgagaaaatttggcaaactagtgaaagtaaccaaatgaaaggagaaagctgcattttataggccagaacaggtatgaagcaattgtgatcaggcatcatcgtagggtgagaatagcaatcgattcgtattctgcaaatctaacggttgggataagcgctcatcagagcggctggaaacacttgagtattggattgacacccattaaatgcgccggatcattaatggatggaaagcgaatcgttgcctgtaaaaagcaaaaactgtaatgatgattgtcataaatgcatccca

SEQ ID NO: 123744 - DNA, 599 bp, Cannabis sativa
  modified_base (328)..(333): a, c, t, g, unknown or other
ttatacttgtatgtataaaaaaaatcaactaaatatatatagtatagttaataataatggacttgccatacttttattaagaaaattatatgtatttttctctttaagtccttcacttaaatatatatatataatatgcttttaatatatatatttattgaatttttctctcttattatttattataatcttatttttttctctttccaaactgtgcctccaattttaatatgaattgttgaaaaatattagtggtgtctagtatcttcctcagtgtcatactgatattactctaattaagtatcgagtctcatataacttaagaaannnnnntttagagaatatcgctaactaattgtgagacactatttatattatagaaagtgctggatactactaatgtcaataatctatatggtgttaactcagtcttagctatatgatattagaattccaattcgatattaaattgaaccaatcactatactaaatcatcacaaatatggtaattttgaaattttgggcaccatgatataatactccataaaaatattcatatatctatacagtacaactatacactatatatatatatatat

SEQ ID NO: 123745 - DNA, 883 bp, Cannabis sativa
  modified_base (835)..(848): a, c, t, g, unknown or other
tttttttttttttttgtataaatggtttttgggttcttctgtgtgagagagagagagagagagagagagaagaaagagttgaaaaaataaaagtgtggagtgagtgaatggggacgttagaataggaaaaaggaaggaagcaaacgtaaagatgacttaaccccaaaacctcttcttaatcttattcaattcttgcttcttgttacactttcacactctctctctctctctctctgtaaatttgtatggagctatggatatatatgtcattctcaactgtgcctgtcatcacactatctataggtgtttgttgttggattcacccctttattacaaaatttccaacttttatatttcataaatttgtgtttatacgatgtatttcttattattaagtgcagattttatatttgggaattattttatatattgtttttttttttttaatatacagtttgagtttctaaattagttttttcgatggattttatgtgggttgctatatgattttttgttgcgatttaggttgcagcgctgttgtagcatgggtttctattaggggtattcgcggtgcgggtggtacggtttttgactattttttcaaaccaatctgcacatgcagttttttcaatttctcaaaccacatccgcaccgcgaaattaaaaaactgcaaaaatcgcaccgcaaaccgcaccgcgcagtttaggaaaaattcaaactacgaccgcaccgcaaaaagtttcaaaccgtattttttttttttttgcagtgtggtgcggtgcgggcggtttgagcggtttggtgaacactcctagtttctatgtagaattccgtnnnnnnnnnnnnnnaaaaaaaaaaaaaatttgttttaaagtgtaaaaat

SEQ ID NO: 123746 - DNA, 1180 bp, Cannabis sativa
taataatttttcccatatttttgaaaatagccctatgtaaattcttgatatataattataacgttaaccaaaaaaaaatatgaatagttacactgaaatttttaacttttttacttttatattgtaggacagaattttttcaaaaatactatattttttctaaaaaatattgtgtagtgtgctaaattttcaatgttgtttaacggttgtgttttagttgttcagttttgtgttccactattgttttataaaaatacagtgtatttgaaaaaaatttgtgaaacaatatttttataaaagttaatttaaattctaatttttttttttgtaagttttcaaaaaaaatatatgtacgtatataaatattattattattatttgatgaaaagagaacattaaatcaagccaaattacaaacaaagctcaacaaggagtttaactataattaggggtcaactttctcttactaaaactcctaaatctagtctcaatatcatgtttgattaattaattaaagacattcaaacacacaaacatcttgaataaaatagtagacaacaacagccatgatagcagcaaaaatttgattatgcaaacccttcactaactttcttatccaacttttctaatccaaaaaaagaaattggccaagtagtaaaatcaaaagaactaatacattatcttctcgttatatattgatgcaattaagtaatgagttctatataatttaaattaataattttaatagaatttcattagctatttacaaaacgttacctctaaatagtcttaagcactaatagtgtgtgttacttaatataaaatcaatttaataagtaatattgaaaattaaaaaccaacactaccattaatttattgagtaaatagctaaaaaaaagtgtaatttggaaataaaatctctattaatattgactttttattcttatcaccacatcaactaaaatcatgaatacttactacaatttattcaaaagatgaaatgaaaacaacacacaaacactcaaagatcatttcacaaatcaaagataaacttaagactttcaagttcaaacatatacatatcaccattctaagaattgacagtccaacacttcttcctgatctcaccagcattgccagtgaggacctcaatagctcccatcttcttcatggacaatgc

SEQ ID NO: 123747 - DNA, 690 bp, Cannabis sativa
ctggagcagctggtttacatccaagtttttcatattgctgcaataaattgcagttttgtaggggtttggttgcaagcctgatgctgtcgagaacagctttaaagcttgtaacatatacaacacactcttcttttcccttttacaaaataatagaacatcatctgcaaaagctagatgattcagtttaagttcatcacatctgtcatgaaaacaaaagacttccttctccccaatcttccccatcagtcttgacaatattccatcccaattataaagagtaatggggattatacctcattttttgcaaatgatcagtttaacatgactgttaaaggaatacgatcagacaatacaaaagagcttcagttttctcttttgtttaaagaacttggtattatgcattaccactcttgtgttcaaataccacaacaatattttgttgtgaaaagaaaacgccaacacttacttaatgtggctagggccttactttttcagtcttatattcctttttgttattggaatgactgtgtggccacaaccacttatctcataaataagactccctcacccaatcttcaacacaaaatcccttatgagatattaatattttttaaaattaattgtgacgccccgatattttgccttattttacaaaatatactattttcatgcataatttgaaaagatgaa

SEQ ID NO: 123748 - DNA, 898 bp, Cannabis sativa
gtaccctatttataataatgtttatttggtattctatatattttgaaattgtatatatgtagtactctaattaaagttaaatttatttaataaaatttatcaattgatgtcttaaatgtaagttatttttattttttaaataatttttaaagttttaaaataaattttattttatttaatagttaaaccattaaaaatttatcacgtgtacaataaaatatattataatatatttactgtgacatttaacaagatttaaaaattcagaaaattttatcacaaaaaattaatttatataattaagtgttataaatcatataattaaaataattttaccttttttttttgaaaaaaaagcgtaattgattaatatattaaaagttagacttcacagtcattacataaaatgtttaaagggatggtggatagcgaaatatcgccaaataacttgtgggtaaacgcccacttaaccacattatgggcgacaaaattacatattctgctaatattagagaaaatacaattagaagataaagaagtgtgactattacaaaatgagacgtagttttcaatgacctaacgggactccttcccattgacagggccggccagagggtggggcagctggggcctcggtcccaggccccacaaatttggaggccctgaaaaaaattaaaattaatatatatacatataaaaacatataatatataaatacttaactcaacaagttacatgcaaaacaaatggtaagtgaagcttttatggatttgaggttcaaggttcaatctttcgttcaccactttttatacttttaattatttgtgataaataataatattataacttatattaaagtacttttaattttaaaatattaataataaataagatttat

SEQ ID NO: 123749 - DNA, 1830 bp, Cannabis sativa
taacttccatatctgactgaggatatctttaagtctagatcttgaaactcccttgccgtcgaaaatgctgactaacactcatgtgcgaacaatctcggccgtgagctcaaaggctggctccaaatcaatggtcattgactacaggaaattgttgcgtagggcctcaaggtcctcattgggtttgtcaatattatcgttgggaggcggctcaacaaacccttcctcagcctcagcagcattaactccctcattgatatcgttggaaggttgttgggagtcatcaatgttcataataacttcagggttctcaaaagaaggttctgagccgaccgaacctggaccacgtgagacattattgttgtcccccataacagcatacaaaagagacaacaaaaaggaacaaaggaatagaacaggggattaaagaatagaaaaagctggtaaccaagagaaaagactttagacttgaaaagataacaaaagactaaagaggagtttaatataagtaagatcaaacaacgtcaactcttaaaaacatagagcgctggaatggactctggttaaagacatggttgtcaagttgcacttccaatactatagattggttgctttgtccaacttggtgatgcatttttcaacttactccaatacaatagctacataattcctctttatataataaatacatatatttttatttgaatatcagtcaccatcattggtagtccatagagggattttccattagagtaagagaagaaaagaaaaaactatagaaggttttatttgagggaagactataggacgttttaagaactaaagaaataagaaggatgttcatacacatttttttatgagcttaatgaaatatttgaaacatagtattagggtaatgtttcatctacacagtaaaggtacgcttggtatgtcgtataagggggtcctataatattaattattacaatcatatttttttttataaaatcaaaattatattttttaattcataataaatggtctctaataaattttattataatatttatgaacctgggttgtatcgtagtaaagtcagagttggagtctgggttcaaaggtcaaggtctagggttcgggtgaaggttggggtcgagttcgagtttgaggtcaaggttggggtcatggtcgagatccaaggtctaggttgaggttcaggtccaagtcatgctccaaggtccgagttagggtaataggttggggtcaaggtctgagatcgggattaagattgaggtcgggatcatggtgagggttcgaggtcggataacaattaaaaactaaaagtatagatgaaaaaaaatcctttgagcaatggttcttcattttaactatgggtacatgtggcataatttttggagaatcaaaaagctgtttatttgaaaaaattgtgctaaaaagatgtttagtaaacagttaaaaaataatttattgaataatttatgaagaagttatagctgaaagttaaaactggtacaactcacattttagaaaaagaattgttttgattaaaagactataataaatttatttttattaaaaatatatttacttatttgttataatatattatgtattattataaaaaaaattataataaaatacataatatttaaatctcttattgtttttttctcaaaaaaaaaaaaaaaatctcttattgttttattttgttttaaaaaatatttgatattctatatttattatatatattttatttttatttttaaaagggtaaataccattttagaccctctgttttacaaaagttaccaattagaccctgtgttttgttaa

SEQ ID NO: 123750 - DNA, 973 bp, Cannabis sativa
tcatccggagtgcctcttcctctgcgcttggctcaacatcatccctgtttctttgcagctaatctagtgtgcattgtggttttgcataaatgtagtttttgcgtccaattgatccatcttgtgcttgattgttatgattttgattcttatctgtggctccatctattaactcgacctattactgtttgtttctctcttcatgttgcgagggacgctggtaccctttaaggtctgccttcatttgactgtttttgctttcgagattattcacatgctctttttgatgtgccaattatgtttcttgcggtgctattttgtcatcccgagtttttagtatttctaggatttcttgccaacttgggattgcgggtgttgctgtgttattctctttctgggtgattatattagtttcttattcttggttagcgctattggtatgtagtgtcacgatatcctcttcttcgtttgtcgtttcaagcttttttcaaattcttcttgaatactgaagaataataaaaaaaacatgaattttggatgcaaaaatcttcaatttgaaagaggagaagatttttccactgatgactcaaaactgttttgaccaaaaacggtgagtaatattttcgatcaatttttcacaattagaatttcttagattttcagttctttctgtcaaagttcataatggatcctctctcgtggtttctttttttttttcgtcccctttacatgaaccctctcttaagtttttctagtacgttctttgcatgcatgactgtggtgtcacgtctataatatatgctcagacaaacatgtgtacttctgagctgttaatttgtaatgattaagtttattgagggattatctcttttagactaattttgttttaaggttttttttttcataaatgtacaacaaaaacaatataattacaaaaaatgtgcaaaaaaaattattttaaaaatttatatatttt

SEQ ID NO: 123751 - DNA, 1441 bp, Cannabis sativa
aaaagtattaatgtaactcatatagtttagttagattattataatgaccggcctagcgatcaatatatgaaaatatgatcagtcaaaaaaaaaaaaaaaattggccaaacatcaagatgattactacgtacattgtgcggatcctattcctacttattattttgatatataagattgtaattaaataattccaattgttttaaactttatatcttatatagaataataaaaggattatttgaaatattatttaagctaatgttgtatttcttacttgatggaattccaattggttcagtcgatctgaaaagctcgcggggtgaggtaaaagaagtattgagaaaaattaggctattgtagatatcatactaacaatctcatttttttactatttatttttcctctgtatgtaggtcttttatcctgaatgagttttcacagagtcagtgagtgttctgtattttcttatctactacttaattaatatatttagattttattaaagagaaaaaaaatctatcatttcaccttatattctgcatacgtatattgttaattttcacatattctaactaaaattaaaatatatagaactgggatatacagtgccaattttgataaaattcgctcccaacattattctaagtgataccgtaagggagaaattaaccaatgtcagaaaacgagtcattggttattataaaataaccgacaatataaggtgctcatgttgaaaatctagcatatatggtgtcggttattagctaataactgacatcgtcgtgttttataacgtcagttattagctaataatcgacgccttatagttacaaaatctaccactgattttcatataaaatttatatattttcacatatttaaattttttaatttttattaatttattcaaattaaatattaatttcacataactaaaaattaaattaattaaccatataactaaatgtatatatattattctaagtaaatatattacacaaatattttaaaattagttaaagtgtttacaagttatttaattaaacataataactaaaataaaagaaaaaaaaaatcttatacaattattttgtacatcagcatcgtgaatcacttaagcaattgtgttatccactctcactgtaatgtaatattttccccaaactgtaaaaataagtgaatatttttattagtatatatatgtaatgccctaaataattaggcacacaacccaatatacttaagaaactctaatcccctaaacgggattactaacaaaagggcgtggaatttaaactttaataacaattggaataaaaacaaacttgtaatactttaaactttataatccaaaagttacaaaagctgggatatcccaaaaatatttataaaacattattacaagtccttttctttcagctgacctaagcggcaaaacaga

SEQ ID NO: 123752 - DNA, 3376 bp, Cannabis sativa
  modified_base (2154)..(2163): a, c, t, g, unknown or other
aataatataattcctcaattaactcataattatctaattagggctttgctaatcctttttcttaattccgggtattacaaaattgttggtggatcgggccagccagggcaagacaaggtggccagccatatttagggagcactgcctaggcgattgaataaggccatagctttctagcatgtggagatggtggtcgaccaaattgtagattctatggccggccaacttgctaaggacatggtcggtcaaccttctaaatgcccaatcgatgctgtagtttgatcccgtctacatttgattggctttgccccccagcaaaaatgttgtagagcctttgtgcacttctgttaatagctatacatcttctttcttacaaatgaaccttggtggtcttaggataccacctctgtgtgttatgctgtcaggattagacaccttgtagccgtcctcctagttcttgctttcttgcaaggattttatttagatgtatgttgttgtaggtgtatccatgctggttgtctagcatgttcgttcctttttgaaataggacttagttctttgaagaactgagcaagtaccaagtttgccttggttgtcaaggcccaactggctaattgaacgagtgcatcggctattgtgctgtctttggaggcttgccttctagtatagcctttgagctattttaacagctccggtaggccatcatcttcttgcattgagatgtatattcacctaggagaccacctacgactatttgagagtcgtggtgcatttctaggtggttagctcgtgcttcatgtgttagcttggggacagcatttggaacttcatgttcagcctcattgttaaaagctttatagctaaccttattgcctcgtgcctcagttccccaggtgccttagggccatgcttgccaatagcaacttctgattagtgtacacctttaaaggttgtatctagaagtatggccttagctttctagaagccaagagcaagctatgggtcagcttctccatgagtgagaattgacttttagtgttgatcagtctcttgttggtgtagcctacagagcactgtacaccgtcttcttctcttatgagggtaccactcaaagcatgttctgtgactgcttggtgcacgcctagctcttccttgtctagggatttgggcaacaaaagtggccgagccaatctatttttttaactcctggaatgtagtttcacattcctttctccactcgaatttgttgttgcttctatttcatcttgaagaagggtacacatttttttgtatatttggacacaagtctacttagtgcaacagtgcgtcctgtttggctttgtacttccttgattattgtgagcaacttaatgttcaaaagggcttggatctagtctaggtttgagcttcttcatgttatagctacgaaggattttgaacttttttgtctaggtcctccatatgcgacccaacccttttagacttgacaagcacgtcgcctacgcacaccttcatgttgcgcctgataggatcattgaacattttgttcctaagcttctgatgtgtggcccctgcattcttcaacccggaagggcgtgactttgtagcagcataggcctaagtctgtcatgaagcttgtatgctccggatgtggtgggtgaatcttctttttcttggctttgggcaaggccaggttatgacgggcagattgttgatctcctcttgacatccacctcatgtcttgttaggaataggcaaagatggtagatgggtgttgccgcctttaggttgcattgggtcggtaagcccatcatggcgttggaggctaatggaacatcgattatgatgaactgcaccattagagttctagtggttggattttctccaacacaaaggggtaatctgatatactcgatgagtgtgatgcttcgactagagaggccatacataacttgattgcagggcgccaagtcagcaagttggagcctcatcttatcatgtgttgattttgaaaagaacgttgagggaggctccattgtccaccatgtatctcgctgcagttatattctcagtttgtgcggtaacgactaggggttgttgtgctgaaaagtgtcttggaaaggacctcctttttgagaaagagatcgtgggctnnnnnnnnnntggttgcttagagccttgttcttcacttgccaggaagtcgcttttgagctcgtgacggagtgtccaagcgtaggccctctagttttgttggtctcgcctgtaatatgggatccgtcaacgacaatccctgaatgtccttccatcatatttggcttagaggtggaccctccctttcttaacatctctatttgaattaaacttgtgaattaagaaataaaagtaacacaagataatgcacttccagatggaactgaaggtggattagatgaaacaacaaaatatcatattgtttgcgttcacaccagaaaacttgtagcaaatcaatcttaatcctaagcaaatctaacagacctagaatcacaatttcaagaagagaaaaagacaaactctgataccaattatgaaagagtaaaacctaattgttttactaatagattgcaagaattatcaagaactaataatgcggaaactaaaccgatatgaacacatcaaatttacaagcttcatctgcattggaaatgcattccagctaactagtgcttgggttccccgaactatggtaaataatctccaataagaattcatgttaaaacacaaactccagtttgtaaatcaaagtaatgtaaaacagtacaacaataatccttacaataatttaccctaagatctaactttcacgttagattcgaagacaagcttgccttgcttcgattatgttaaaattccttcaactatgaatctgaactcccttcagatgaaacaacctcaattgttacttacacagaagcttgaaattttcaacaatggtgtaacctgtaggaaacaaagaagaagaaaaagaagaaaaagatttttaccctaacagagaaaaatctctattaaagaatcaaaatgagtgagagttagttaaaacattcaagaaccaactatatataataacaactcacacaaaactaactttgatagctcactaacaactcattaatacctgttcgagctattttaacttgaaaatacatatctgtcaaagttaactcataaaccaatatcagacatactgagataacacaaaattcataattttccatacacaaaaccatgattcctaccatatcactacaaaaaactgttacttttagtgataactttttagtcacaacataatttttttgtgattaaatgtgactttaagtcacaacaaaatgttacttgt

SEQ ID NO: 123753 - DNA, 1049 bp, Cannabis sativa
aagttcgggggaaaaaattgctaattagccaaaaaaaaaatgaaggagaatttgagagagatctgagatggagtgagagagagcgagagagaccgagacgaagacggaggtggcgacaacagtggaagtgacgatatcgatgttgtggacgaaggtaactatatgccaatcagggtttgttttcttagcaattgaggatttttttgggcgaagcttttgggcttttctggggtggaacataggcgggttctggtggtggcaataaaaataaaaaattatttttatagtattttaataattaatattacgtcgaccattaaaaattttctacgtgtatacttgtatagacgtgggcaatctactgtgtcattcaattgaaatttttagacgaaagggtaatgagaaaaacggaacctgggttcagtaggttttgcagtcaaaatttttatttttgtgggtttaggatttagggtttagggtttagggtaatataaagttcgggcagttttaccgccaatatccctttatgaaatgaaatattttcaggtccgacaaccatgaagacttgattagtggccagaaatttcatggcagtattagtatatggtattagtgatttcgagaagttcacttaattttgagttttacaaattatttcaagataattggttatgaccaaactacccataggttagagattacttaagtgttaagtaaaatggacaaaatggtctttataattgttataagaaataaaaactatccacacttagctaattttttataattctcatgagtaataaaaattctgaaattctgaattttaatattatcaatttattatttaattaatcaattaattaaatataaaataataaatatggtactgaaacagttattgtgtaactacagaacacaactatgtaactacaaaataaaactagaagcaaacaatgcagaaaaataaaaacacacaaggtttcaacaatccttccagatttttactagtctacggggccatgcccagagataagattcattaaatagat

SEQ ID NO: 123754 - DNA, 1688 bp, Cannabis sativa
  modified_base (897)..(898): a, c, t, g, unknown or other
ctctctctctctctctctatctaatgtattctctctctttcttctctttggtttgctactgccaaacctctacccagatgcacagtaggcaacaccaccccctctttggacccagacgcacaaccaaattttgggcatggtgcatgaatttgaccatgaaatcaatctccccacccataaaaatcctagatctaactttgtcaacttctctctctcattcgtgtttccctctatatcgaagaagacaccagcgttaatggcggctagtctcaagtgtggttgtctttctctctcacttattttttcttatttttagtgtaactgaaatattgaacaatgatgaagtgctaggtttcatgattaagagattttatatgagaaactataaatgaggaatatgaatgagtaaatgtggatataatgtgaagagagaatattggagaaaataagagtgagggcctgagaacaatggatagagagaggagaggggctaagaacaaatggagatgaaaaatataaagatggggacgaaattagattggtcggactgtgtcaaaactggtgcaataatggctaagtttcacaagggagaagaatatggtgtgacggggactagggtttcactacggaagaagatggcctaattctttttttttttcttctattttatttacttagtttcgaatttctttgtcatttagttagagcatttagataattatttttgattgaaatatatttagtattttgtattttttcttaaattaagtaaagttatttttaaataattaattaaatatttaacacgtagccgagtgatgtggttccacatatgtctgagctggcacttaaatttagtaaagttattttttatattttaaatttattttattttannttatttttaaatatttatttatgtgcgtcaataatattatgtcatatagacagccaacttggtagttaactgccaaaaatagtaaatgctaacggaatacgggttttggagggtctcgtcatcaaaatttgagttttaggggttaaatatttctagcgaattaaaagtattggagtttatgcgacaatttaatgatggttaacgagatagattatacattttaggacacaaaacaaataatcaaatgggatatagtaaaaaaaaatcacatgaattatataatttgtcacactcaatcccctaaactcattttttggtatacacataaaatatttagtaattattgatccaaaaatttaaccaagtgtagtttttgagataattaggctagatcaaaataaagattccaaagtacgctcaaaaagtgtattggctaaaagacgaggatcgaaacgcataaggcaacgagcccgcacaaggaagagccaaagtgcggcttgatatcctcatgtgaggagcttcccgcacctgagctccccactttactcctttacacgtgcacttgaggattatctaaacttatggcttgtggtatgcctggtgatttacttactttagtgctagcaacttactttagtaagttgttggaaaatttttctaatggctaaatctatagaagttttttgacttctagacatagattttatttatctaaggaaaagtctcatctattccagaaaagttaaaggccaagaaaataatttcttaagatcaacagtgagaggtctca

SEQ ID NO: 123755 - DNA, 2606 bp, Cannabis sativa
ggtacaatacatataaacagaggtatgtttcaattaaatataaaattaaagataaatttaattaattgattaataaaagtgatatttttcaactaaccccaattttcaataatttctaaacttaagccctaaacaatgtagagtcaagttttcaataattttctcttttatgaaaatttacagttataactaattttttttatcatttacaaaaatacatattttctttacaaaattactatttacaactctgaggggacaattcaatttttctcatttaattctcggtataaattttgactccaaactttattttggacgttctttataccgttagcaagttcgttttgagctctattgcttggtctagagttggagtcctaaatgtgaatatttgttaaatgtaattttgggattaaccctatattatgtaaaccaaaaattttgactaagaatatcagtacttgctccagatcacctgtggactataaattgtcctcatactttagaatttaagtaagaattcaaaccttgcacatagagtatagtgcgaagatgcacttgtatattacgtgaatacttagttagaaatgtgagttggggttattaccctaaagtttctatatttatacatgcaatatatgaattaattagtagggaaatttggtttagtatgcttatatataaaatatgttgttttaatataacaccaaattagaaaatagtacatatatacttttaatattttttcctcccaaaaatacctttacatttcaaaaaaacttctctctcttactctccggcgttaaccccgacccagaacctctaccgtcgaacacacagacccagaactacggtcacattgcctcgtcgtcatcttctctcatgacctctctcattttttgtatttttttcttctggtttatcagttttttgcgatatttaacgatgtatttacaatgatagaacaaatctgaggctagggatgaagtttagcaatgatttgtgatatttagcgatgatttgtgatatttagcaatgttttgcgatgtttagcgatgatattcgcgatgtgttttgcgatgttatgaattgaagacatttagagatgttttcacgatttcacgatatttagcgatgttttgcgatatcgttaaaaaccagaaaaaatgcagaaaataagcgatgttgtgaattggagacatttagagatgtttcatgatttcgcgatgtttcgcgacatttagcgatgttttgcgacatttagcgatgtttcgcaacatcgcaaaaaccagaaataaatgcagaaaacaagctagttgcaaactcatagattttggggttttgggtttcacgatttctctttatagtttcgtgatatcctcctcagttttgtcctacgtttcgtctttaaagtgggtttcaccgaaggtggtgcggtggtcgtgggtttggtctgggtctggttcagtggtcgtgggtattggttgggtttggtgagagttagagagagaggaagagagggccaagagaaagagagaaggtatgaggagggtattttgggatttaattaattttagagtattaaattcttatgcatttttaagcatatattgtcaaatttcccattgagtatatgtacaaggttatgcgattaaggcatagctaattaattatttgttgagagttatgcgatcaaggtataactagattagactcaataaccaaaatcgagaaaaatcttgataaggtcttatgtaataaatagacgtgtgagcataacatgtcgtgtctatgcaatatagacataagatatagtgacatcattataagtgcagtggcgtgttatattactacagtggcacagttacgcagtggcatattaagtgtgatatgtatgctttcttgttggggcttagcttacgggtgctctattgtgcgagcaagggtaaagcagtgtcatgccaaccatgagtttgagggttttgatggttaattgttccggccaagctagaccacaagttgagtccaatagggggattgtatagaaattctattttgccgcttaggctggcttgtatgtaaacaacaacttatcatattttgcaaaaagattttacaagatctcgaatatgtattaatattattttggttttaagttaaagataaatcttattataacaagttattttatttaattaagttgtcttgttttaatcactcggcttattgaactgattaagcagaattagcgtaatgtaatcacgacacgtggcattcctttaatcaggcatgtgctaggtgttcctcgctgggcagatcagttggaagccccccaactagccctctagcctagggatgtcataaaatagctgatctaatcttatctgcaaagtacagatatccacacttgtgcggatttgattggattggaaaattcaaaatccgtacttgtgcagattgaatattgattaacatataaaagtaactaatctaatccaatctacatatatttatatataaaaattaaaaaaattatatatacaattaacatttgaataatgtaaagaaaatagtaatttaaaagtctaatacatataatacaa

SEQ ID NO: 123756 - DNA, 1142 bp, Cannabis sativa
aaaaaaaagggtttggaaatgtctctggaatctaaggattcatgcaaggcaaaagactctgttttggaggatcttaagtggctgcctacccatcaaaaatcgtctgggggtggatactgaatactgatataagttgcggtttgtgtggggatgaagtcgaatatgatgtccacttgttcagggactgccattttgctcgtggcctgtggttctcttgcctgtggggtctttgcagcagtagccttgggaacttgaactttgaagattggttcttatggatgtttgatacaaggtgtgagttgctgatgttatatggtgcttgcatcatcaaacacatttggaattgccgaaatgatgtcatcttcaaaggagctaaagcgaatatggctgcctcagtaagagtcatccaacaacggttcaatgaatttcgaatggagctcctggatgctgatggacctgcggatactcctactgatgcttctcgtactgatttggagggaggctacaggattagggtggatgcctcggtctttgatggtctggctgggttatgtgccgttcaaattgatgcagggcccgatgaagcaatggtgttgctgcattatactgtagtagaaagtgtacttgaagctgaaatgctctctattctcagcgctttgacttgggcaagggagaaggaaatcagatctgtcttcattgaatccgactctctaattgcagtaaaggccttaaactctaatgttctgccttatgcttgcggtttatatccggcttttcatgaatgttgtgctttgtttcctttgtttctaaattgtgtgatttcgtttatcccttgtttggagaactatgtagcggatgctcttgcgagttatgctagagtgtctcgtgtgagtgcgaggtgtgtgctaagggaagtagccccctttgtggctactatgtgagtttgttttgctttcaataaaagaccttgattatcaaaaaaaaaaaaaaaaatccataaaatttaactcaaaatcattaaaaaaattacgttattagatgagctaaagtacgtcatatttagcttataccatgtttcatatttataactttagcacagtcagtgacggacccagaatttttactttgtgggggctaattta

SEQ ID NO: 123757 - DNA, 2587 bp, Cannabis sativa
  modified_base (2147)..(2147): a, c, t, g, unknown or other
actgtagcgtgccttagcattagggtgttacaattttggtatcagagccgccaggtttgtctaccgaagcacgccaagacatgtaccatcttcatcagagaaagctcggttcacagttcagtaagcccgtacttgtttagtattatatgtgattattaaagcatgttaggaagcatattagtttgtagttgtttattttaaatgcgttgccttgaaatccataacagcagtactaggtttttatgatcgctgtctgacctacatggcttatgggttcacaggctaagtcctattaaatggatgcctagcgaaatacaaggagtcagggtaatagggtcgagaccggaggcggtcacggaaatcaaattctcgagaatccccgtggtcgccgccaaggccgtggcagggttcagggtggtccacatgtgaacccacctcaggctcctccagagtgggagcagagatttgtggaaatgcaagatcgtatccgcaagaaaggtgaagaaattttgagactaaggcagaagggtcctcctgcagtgcctccagtgcaagttcaggccgtcgtagttcctattgtgccagcaaaacaacctgttgctgacaaccgtatggagtcgttatatgagaggtttcacaagaaaggacctccagtgttcttgggaggtccagatgtgatgaaggctgagtagtggcttagagtgatagaaaaaattctgaatatcatgggggtagttggaaatgatcgagtaacctacgctacatttcagttctaggaagatgccttcgtatggtaggaattggtctacctcacctgagacgtcactattaggacctgggaagagtttaagatttgttgaattccaggtattacaatgaggcagtccgcagtgctaagcggaaagaattcactgagttggtgaagactgagggtatgtcaataactgagtacacaaatgtttgatcatttggccaagctagcctcaggtattgtgcttatagacttcaacaagaaggagaaatatctagcaggtctgaatttgaaaattagacatgatctagtgattactacaaatgtggcaacatcatatgcagagatggttgaaaaggctctatgagccgagggtgcagttaagtttcttcaggagacccgtgtgactccgagtgttggtgggacccccactcttcctactcctgtctggtagggatggtggtaattccaccactgatcagaaaagaaaggttacccctgcatctggtggctcgggacagagcaagcagtttcgtgggaaccaaggatgaggtggatgccagagttactcttaccctaagttcccacgttgcaagaaacatcatccagttagtacaaccagaagacatgcttccagtgtggcatggtggggcatttcaagaaagattgccctcagacaaagaaagaagaacagaagccagagctaaaacccgtacctgcccaggtgtttaccatcattgaagctgatgctgcaaccagtccttctgtggtgataagtcagcttcttgtcaaaaactcctttgacactgtgttatttgattcgggagctacacaattatatgtggaaacacgggtaatcgaccttttgggtaggccatgtgattttattgaaagatggtttggaaccctaatgcctagcggagagttggttatctccaataagcgcattaggtctatgccagttaggatcgaagatagggagttgagtgctgacttaatggagcttgaattaatagaattttatatcatacatgtcggaatatcttttaccagaatctagatttactaacaagtctgtttttaacatcctaaatatgaatttctaaagtgatgaaaataaagacataaaatgtatgagaaaccttacattggttgcaacagaattaaaggactccttctgcttagatctctaacccatgtatcctttctgttgcagagtatcacaaagatttgagcccgaaactcctttagttgtttggattcttcactgtcttacacactatgaatgaagactaacttgatatgggtgagcaagcactcaatcactaaaggctgaatttgttttgtgaagaaggctatagaattcaatttagaagaagagaaaagaagaagaagnagtctcaaactcactagttgtctcacaacaaaaaaactaagtcaagagttaatatttacattagttgaataatgagacctttcttttctttttatactaattcacttagggttagtattgaattatttggaataataaaatgatataaatggagaaaaataaggactagtggccagccgtgaagcgggcccaatactagttagatttttgccatttctctcacccatttatctatttttcacaaatacaactttttgcaattttaatcctataaatgccaaaactatttatttaattactaaaataattatcaaataaattttcatttataatatttattaattagactcctcaaagtcttttaaataaaaagttaaccttaaaatcctatttcttcacaatcaatccatatcttactgaaaattcacaaactagacata

SEQ ID NO: 123758 - DNA, 757 bp, Cannabis sativa
  modified_base (44)..(66): a, c, t, g, unknown or other
atttcattgttttagagatatttatatttaggatgttaatcaannnnnnnnnnnnnnnnnnnnnnncctagtaaaatatttccaacaattcatcaaatcgactacactatacaagttgcccgcactacaccacagtaccacactgcataaaaaaataccgtttacaattctttatggtgtggtttgcatttttcattgaattgcacggtacagtttgcaattttgaatttaataattacatttcaaattgcactacattatatattacaaaatattaatttttaatattttttttatatatatgaataatttatatgtttacgaaactcaaatcatataattaaatttaaagaaacattcatataaattatttttatttcttatttattcttacttataatattattattgatatatatacattatataatttttcaaaaacaattcaatacaatgatttgattttttttactgtggtgtaatagtctatcaactaataatttaatagtctcgagttggttcatgcctttttttttttttttccactcgtctctcgttactaagctaactttagtggcatatttaatacaatgatttgattagtatatatgttaggatgattctataatgcactcctataaaatggatgtactgatacactttttacttattttggcatcaaaaaaaaaattttagtttaatttttttcatattatgtacgttatagctatttaagatatcctacaaaattttgaga

SEQ ID NO: 123759 - DNA, 578 bp, Cannabis sativa
  modified_base (26)..(36): a, c, t, g, unknown or other
ttaaataacatacttgttagtaaatnnnnnnnnnnngtaaaataattccaacaatattttccctccaaatgtacaaaattcaattattccaaaagtaaaaggaagaaaaacaattacaaaataaatatattaaatgtcttagatactctttataacaaataaataatatatatttgaagatgataatataataagtataataaataattattgttccatttctaattctacttccaaaataccaaataacatcaagcttgttttcccctccttctatactctccctctttataattgtaagtggctatgtaattttgccaacaaccacttgggaacaatagttttaaatcttaagagatcccgtttcttaaaaaaatattgtctaaagagacacgtgtgtgtgcctgatgcctcgtatgaaatggaggattaaaataaaggagttttttctattttgggttaatattacttcaaataaacatttatacaactacaagcaaaatacacatttatgttgtttattaatttcaaatatactattttcaaagtttcttatttacaaaaatacggtagaaaaa

SEQ ID NO: 123760 - DNA, 792 bp, Cannabis sativa
  modified_base (28)..(28): a, c, t, g, unknown or other
  modified_base (55)..(55): a, c, t, g, unknown or other
tttctttccatttcattctattttattntttccatttcattctattttattaccnccaaccaaacgccaccttagtgtcgaagagctaaccgacgctaattgaacttttttagctttagttaccctttgaagcataaaatcactagctatttattgtgtcggtcaactattttgtgtgacgcattgaccgacgcaaaatagacattctgtagtagtggtaagaatattgaaggtcttaatgaaagcaccaaaatattggttgggaaaattaccaactgactcagaggctaataaacgttgattaatcaccaatgaaagttaagaacaataataataaaaaaaaaaaaaatagaaagaacacacagcaattatagaggtttgacccccttatatatgggtaatgacctactttccttttagttgtatcgattatgagatcacgttgtgcatatctttaaggaagacagtgaattctaactacaactcttaagatgtttacagagaatattcagcaaagtgttttaaagtgcgagattatgtttcaagtcccttccccctgtgaattcattcactatttatagggtaaggttgttacaattagcttcgtaaaaggagtaactagatagtaaatatccctataatattgtgatcatcaatgagaaaatatggagaacatttagattttttaagtttgcaaaagaaggtgtgatcaactcgttgattgttaagaatttgaagtagggtatgcagaaagtcatccaatccaattccaaccgaccgatccaatcccaa

SEQ ID NO: 123761 - DNA, 1851 bp, Cannabis sativa
  modified_base (1780)..(1815): a, c, t, g, unknown or other
atatatttatatctatataggagcagtgtgaaacactattataccaataatctccgatgttaaattattttgataatagtacaatacataagctagtgtagtgttaatattactatatagatataggaaactaattttatcccctttctgttgtacaaggtgggtcccacgttgttttaattaatacttatacaagatgtatagtaatttcacattttataattattctagcaattcttatcattcatattttattgaataaataatatttaccaactgaaattttaaataaatcttcaataaaattctgcaaaataaaattcttcaaaagaatatatataatattagacaaaaaaaaaaaaaaacaaccaaatctaaagtaggaaacgacaaaaaaaaaatggcaaaaagacgcaatgcaagataatggcagtaagacaaacaattgaaaaattaaggaaagaaaaaaaatgatgtcaatgtaaatatttttttctttctaattttaataataaataaagttatttcaaagtaattgcaaataaattgtattagttaaaatgtaattattaaaaaaaattattgtaaaataaataaattgattaacttctaattttaatttgataataccataagttttggattgaaactaagtcatataatttataacatttcattatttaaaataaatttttggttaaaatgttatataattaattttcaataaatctatacatataaaattattagttaatgtttgattatttatgttttcttttattagattgtgatgatttgaatttttataaaatattaaaaaagtctaaaatgtacagctaacttttcttttcttttttcttaaaaaaaatatttcgaccactaaataaatttaaaattgaaatacaaagtatgtgttgccaatattttttaaaataatttgtacaaattagaaataaataatataatttctaaattaatttcaataaattgtatacaattttataagatttgtataatattttgtatatttatacaatcttattaaaacttatattaataataaaataataaatcaaattttataattaatttttatggacataaatattaaagaaaatataatatttgtcagcaataatttattgattattatattttaagatataatatgtgaataataatattaataaatgtaaaggctccagaaaaataatttttgaataccaaatatttgtagtgttcaggatatatatatatatatattcattgcgacgtgtaattaaaacaaaaaataaattgtaaatattaataattgtaatcattataaattttatttttacttataaaatgacctatgtaatatataattatttatagtgataatttggtgaattatttttattaagaaaaagtatttccgattaaaagaagaacacttgcacgtgtttgggtaatttaatatggttggtgtaattataaaaaattaaaaatttataaaaataatattaaatttagaaaaatttacataataaattaaaaattaaaaaaaaattacaaaaatatatcgatatgaaaaaaaatttcatttttactctttcaaaacagagtacaagtggacaagaaactaacaacctctactaactgtaagaaataacaaaatacaacagagtataaagaagtttattatttatcaaaaagagacattattattagtaaaatttaatattaaattttactattttaatttaataaatattggtgtcgtttggtaacacttttnnnnnnnnnnnnnnnnnnnnnnnnnnnnnnnnnnnntttttgtttttaaaaattttatttttgaaaaacaaa

SEQ ID NO: 123762 - DNA, 2505 bp, Cannabis sativa
  modified_base (1857)..(1857): a, c, t, g, unknown or other
aagatgaaaatttttttatcaattttttttttttgtacatacattttaaatttgatttcattccattctattcctattccctttctcatttttattcttatatttagattcctcccaattaaacacgtacctgtgattttataataaatttgaatttgtcaaaacaacaatgagtagatcaatagtacgtacgagccaaaaagagttgttttggcctttcaaattttattagttaaattatttcaatattcgtgtatattataattatttaaaattatatgtaaatatttaaaaaatataaaataatttctagtgccaaaagtaaaactttaaatattttattgtacacataactatttttttttacaatggtggtaaataactgagaaaactttattttcggtaatataaattattcaaaatttttgaaaatttacatagtaatgctaataattacaatgtacacgcttatgaaaaaaaatagactaaaaaattcttttaaatgccaaaataaatagatgatgtaacagaacaactcaatatgagaatgtattttttttttttggctaattatgacttttttctcccgaattttgatatgaatcaaattataccccctaaacttttcaagtcgttaaaaattccttttgaactattacattgttggatttaaaaacttttgtccaattttactaatggaaacatgacatggatgtaagttcaaggaacatgatttggtacttgtcaaagttttgggccataatttggtagatatcaaagtgttgggactttggacaccatctatctccacattgatatgatattgttctatttgagactaagccctcatggattttttttttgggcaccttcccaaaaggcttcattccaatgaagatattgtccatccttatatacctatgacccttcccatttctagccaatgtgcaactttaattgcacacccaacaatcctctcctcaaacaaacgaccacattgcctcccctcaaacgatcttccaactgtccactctctaccaactagttactagtgtacttccttaaatgcattggatcacacgccttacatggagcactaccactacctcaagagttcttgtactttttcaagccaaatcctctatcaagagcacaccccaatctaactaagcacatccatagatcccatcatgagattattgaggctcatctcttttgttttgacattttgaggatccatttgttaggatttatgccttaaaaagcttataagaactactatttttataaataagagtttaatatttttatatatacttgttaaattattaatatttaatattcaaatttttatatatataaatatcgaaaaaattatgtattcatatatgaggatgtgacttgtattatacggagaattaagagcactcagccacgaataaattaagtcagcaacatatcaaaattttggaatctttaatcaacgattgctaatgcggttcacttatgcctgttattcagtgcaaataatctcaattcggattattaatttgcatgtatataatagaaattatatatgacaatgatcgatatgtaattaagctttctttatcaaatatgtcgtttactataaagacctaataaatatcataaagataatcaatagtagatcgatatgaatcctgagtaatcatgaactcatgttcatgttattagtttctttaattcactcgttaaattttctcagagaaaatgattcttataacttttatttaggaatctaataaaatagatggctggaaatatgatctacaattatgaaatcttcactttcctaacggatcgaatgttggttcnctttaagtgttaattctagaactaaaaagttgtacacaaatttagattagatctaaattatgctttcactagtgaattaatggtactaaaggataaaaaagtaattagaaagataaaacgataatttgaccaaaactaattacgaaccaaaacaaggagggataatcactggaattaattattataaatggacattgtagttgttatttgcgttttttttataagggacatgtggacttcaagtcaacattcaaagcccaccagcagacccaaagaagataacttgggccaagtccaagtctagtaatagatactgacatattaattatatattactcattatattatatatcctattttgaaatcataagattttattatttatattattaatgtaactatctatttaacttttaaaataaattatcattttaactatcattaactaaaagaaaaagagaaaaagaagttgaaagaataaagttgtacccacaaatttcatgaaaaaaaaataatgtaatagtactaaaagataaatctaattgtcaaaactaagtaaaaaaaattgtaatacaaaaacatattgaggaattgatattattttagggattatttcacaaatacataaaaatacggtttcacagaatt

SEQ ID NO: 123763 - DNA, 912 bp, Cannabis sativa
gcaccgctatggaaaaatcacgaggagctttgcgtggctagaagacacgggccgcagcactacaaggtagtgtcgtggcccgcctatttcaaattgcagaaaaaataggtttttttaatattttttagctatataaaggcccttttcaacactttaagggagacgattttggaagtacgaaaattagaagcgtgaagcggctttgaagactttcaacatatatatttcaaagaattctttcttttcttttattttttatgttcttacttaattgttatgagatattttcaatgattatgagtagctagactttttattaaggtattaatagagattgtttgacactttattttggtttaatgtgattcaattcttccctaattttctatgtgcatctatttaattcatacttaattttttttaattgcctggccatcaattaatcgtttaataatttcaatgcaacatctgagcagtgagtattgattatgctatagtgaaatacacataaatttcaatataggacaagagtacttatatagtctgtgtaacatttaagatttttatgcttaatgccttctaattattaaatttatcacgagagtagaaagtttacatataggttgagatttatatgtcctagcccgaatataagtttctttagtaaatttacaataacaagaaaattacaaattaagagttaaattatgttgaatcatataaagaagatgtgatcgaaattaatcaccctaagcgttaatcattgctaatttcactttaattaatgaaattattacataaagcactattttttgtaaaaaaaaatatatatatttttatgtttaatttttttttatatatttttacggtttttttatagaaataatatgaaaataacaagaaaactacata

SEQ ID NO: 123764 - DNA, 2219 bp, Cannabis sativa
tgagccatgggatcttccaggtatatatgcatgtctatacatataaataaatatatgtgtttaattagggctatatatatttaattatttacactactgaaaaattgggatttttcaactgtcagaaaacggtagaataggtgtaattaattaagtgggaaaatgtcggaaaaactgtacaactgttggcaatataagaagaatttatagatatagtttgggataatatatatcgagaaattaaaataagtctatagtggtattgatcaaatttattaattaattataaacaatattattaagggaagttcatgaagatctatacataagattatatatatgatatatatatattctaatttgtgatgatcaaatctttatatatatatatatatgtcatacaaaaaaagatatgtaatatgtatatgtgtatatttttatattatgagaattaattttgatgatctataattctggttttagtggactttttttatttacagaaagagaaaacagtggactttaattagaaaattaattattgaaatattggacgtaaaagataagacactgtacagtagtatattatatatattacttttccttatttgttcataaaatgattcaaaatatataaatatttttttaatttatatatgtgtgtaaattaattaatcttgtatataattatattttagaggatattattaataataattaattgatcaattaattaattaagaaaatatatatatatttttttttgcatgcatgtgtacatgttttcagaaaaggcgtcgatgggagaaaaagaatggtattttttcagcttgaaagaccgaaaatacccaacggggcttcgaacgaacagggccacagaagctgggtattggaaaactaccgggaaggataaggaaatccttaggtcaggaagcggtgtacttgtcgggatgaagaaaaccctagttttctacaagggtagggctccgaggggcgaaaaaagtaattgggttatgcatgaataccgccttcaaaacaaccatcctttcaaccactcaaaggtaagtagtaaattttcttagttaataattgttaaaccaagatttagttttaattattgtatattattatacgattaattaggcaatttaaggtaactaacatcacaaaaattatatagtaattaatattattaatttttttatattattagagagtactatttaacatttctatatatatataaaatttatacatgcaattatgcaaccaatattacatatatcgatcgatctatatatatgcaaattctaattatttcaaaaaaatttactttaagtcacaataaaatttgtgattaaaagtaaaaaaaatataattaattataaattatatattatttctatattgtgacaaaaaaatacaatttgttgtgattaaaactaacttaatatatatatatctaaatattacgtaactttttattctaactataagtcacatttaattagttataaagactttatattgtgactaaaaagttattattaaagataatttttttttagtttgtatccttgtctttattttattatatatttattgatgagtgtaattatatatatggtgtttttgcatgcatggatttgataatacttaagatcatgcacacgtagaactagctgtgctagcttttataatcaattattgataattaatactaattatatataatcttaatatttatttatatattttattataatattttgcaggaagagtgggtggtatgtagggttttccaaaagagcaatggtgtcaaaaaaccacaacaaatacaatcatcacacgagccatcgatcgattcaccatgtgatgatacaaactcaatactaaattacaataataatgatatcaatgagtttcgagacaatattaatatcgatcatcatcatcacatgatcatccctaataataattttgatcatcaacaacaacaaggtttcatcaacaataataataatatgacgatgatgaatttaaacaacataaataataatattaatcctctaataataccatctcttaattcttcatcatcatggaattattctaacttgcttaataaccctaatatcaataatctctcttcatcaatgaactctttcattctcaaggcattacaacttaggaataatattaataacaataataataat

SEQ ID NO: 123765 - DNA, 1423 bp, Cannabis sativa
gcaacattatattatattttcacaatgtgaaaatttattttttagaacaacttagaaacctgtaagaaaaaaaatagtattctgaaaaaacgtaaattttttgttgtttttgggtatttctgaaataatcccattcttctaagttaaaattaagggcaatgctgagaaaacttgtcagagtggtgtcatagagttggcaataatttgttttcacagtaaaaactaatctttttccaaatttgtccataatttgatcttattttgacaatgagagttttatcctttggttttcaatataagatcccttcattgctgagaaatttttgcaatagtaaagtggatacactgaaatatcttgcttataggattttgttttctcaagttttttctaattttctcttcttatctgttttactgcagatttagataatgcttgtcgtttttttacaggcaatacttctcgaccaaccgcgagtcatatcttcaaaagtggggcacgcttgggatctcccagaaaacacatttggtgcagcctatgcaaaattcatgggatcaaggaacttctcccctgatgatagaccaccagtgcggttcatggagacagatgagcttgcatatgttgccatgcgagctcgagaggtgcatgacttctggcacaccctttttgatcttccaaccaatttgattggtgagtcagccctcaaggtgattgagtttgagcaaatgtgccttccaatgtgtctaatgtcagtcattgggggtactgctagattcaatgagaagcaaaggaacctgttcttccagcactactttccttgggccattcgggctggtgctcaggcaaccgatcttatgtgtgtgtattatgagcagcactttcatgaggatttggaggaggtgaggagaaaatggggcatagtccctgttcctaaacaagcctgaccaacaaagatatgatgtctaattggctaggttgccccatggtttaatgttcatttggactcattggactaggattagtattatatcaaagtcccctgcttggaaataaaatttggacttcgataaataattacacttaaattgtccttttgtaagatactagtaggattgcacgcccgaagtgactcttaaaatatttaagcttaattattttgagaagtgattagtatttttgtttcctaaacatctaacattattaaagggagatttacaaaattactgatttttggtccaatctttacaaaaatactgccatagggcaaaaattatttttatactgtcaatttttttttcttttatactgtaaataccaaaaaaataaaaaatgaggcgattatcttccatattcatggacagaaccaccacaggaacaccataacaatcagaaaataaccattaattccggtgagattgagaaaaa

SEQ ID NO: 123766 - DNA, 1772 bp, Cannabis sativa
  modified_base (191)..(203): a, c, t, g, unknown or other
ctcatctagggatactgaattctttactgtatgataagtgcatcaaaagacacatctctaattctatccaaaatggaatagagataaaaacagttaaaaaatttctattgcttttcgaaacaactaatttatttagcttcagtggtggaactaaattattatagacgtgtttttacatccttctagaatannnnnnnnnnnnncagagtaaccaccatctctaataagttttgagttggtgtagatataaggattctaaaatatacacccatattatctaacatataggtcactttcagagattcttccttgattgtctcccaatgttccttgtttgattacatcttagatggctcccagtcaacagtaggagtatagttaaatgcatacaaaagtgtgcatttaacctcttaccattggtgcttagggacctcttgttgtgacattatatcttagtctagaaacattaagttccttctagactaagtcatcaacatagcattctagcattcatgattaacaacttgtataatccttgatagttaacattcatataaaactatttatcttccttcttaataattaacctcgagactttccaagctaatatactaggttgagtaaacttaagttcgtcatttcttgaagtttccaatttacttccttgagttctgttgtagccatttaatatgctgcctcagaaccacttctgctccaactgccaaaacaacaacaaaatctatctttattatgatgataacctaggaggtttggtcaaaaatacatccaaaaactcttataccattttaatgtctaaaggctgaagtgtgtcagccatatagtatctaacaccatcgttaatgactctatgcatacattctatgatggatctttatcttttattatcgtaaaaactcgtgcctaaaaaccacgtctagataccataatacgaacgagctttcattttcaagttgagaagttactactttctgtttgcaatcatcactagcggcttatttagacaataatcccattctgagtaatatctcatacttcgttatacacaaaactacgaggtcatcattcaactttctattttcaaccctaattggcatagacctgagttatccgtttggagatagctaatgctctgtcaggtcacagagttctaaaccctatttcatatctatcttaaggtctatccaatttattaattattctggctaccacatgttaatgtgtcgttctaaaatcaattaacataaagtcaaatagaacagttgataagaaactaattggacatcattgaagaactatcttcaactttgatttgggtaatggccaacacccaaacatggaggggatttttttctcttattctgatcccttattttgtagccatgaacaatctctcttatatgtcctacttggccacaataagaatatttccaatgcttacactctcccaagtgatgtttcttgcaataagagcactctggataagtataacaactattagggctgttctgatggcctccttacccttgtttcccccaaaacttctttctctgtctcgcaccgactgatatagatgcaacttttctaattgggttaatcaaggaaccattgccacttccttcaagattggaagcaaaagaaactgttaccccattttttgcactctgacgtggcatcacacgatggtgatacgtggaatttgttggaatttattttaccaagatattagatcaactcacaagtatgttgtttaa

SEQ ID NO: 123767 - DNA, 1929 bp, Cannabis sativa
tgtagtatacagggtattgtacaccgtcttcttctcttgtgaggacaacacacatagcatgttctgtgactgctaggtacacgctagctcttcattgtctaggggcgtacacaacacaggtggttgagacaattgtttcttcagctcccgaaatgcgtttctatattcctctgtccactcgaatttttcattgcctctgagaatgttgaagaagggtacaaatttgtctgtagagttggacacaaatatgcttaatacagcaatgtgtcctgttaggctctgtacttccttgacaattatgggcgacttcatgtccaaaagggcttggatcttgtctgggtttgcttctattctcctagtgttgactatgaagctaaggaattttccagagcctacaccgaaagagcatttaaagggtttgagcttcatgttatagctgcgaaggattttaaagcatttgtctaagtcctccacatgcccccagccttttcagacttgactagcatgtcgtccacatatacctccatgttgcgactgatgagatctttaaacatcatgttcaccagcctttgatacatggcctcttcattttccagcccaaagggcatgattttgtagtagtacaggcctagatctgtcatgaagctagtgtgctcctaatctggtggatgcatctttatttgactgtaacctgaatacgcgtccataaaactcaaaaattcatggccaactgtggcctctacaagctggtcaattctaagaagtggaaagcactcctttagacatgctttgttcaggtttgtccttagaaatcttatcagtattgatttaatttctagcgctaaacctttcccaatcttcagtcttattgttggaaaagtgggatcaacttccacctcttccaactcttctataggtccaaagcttcctgtaggatccccaaaatgaggatctatgtctgtgtccccgctttcatctggacttcattgtcctttgttaggctcttcttcagagctcttggctggcatcttctctttcttggctttggatagggccaagttgtaacagtgacgggcagactgttggtctcccttcacacatcctaccccatgcgttgttggaaatgtaaggcataggtagtcgatggatgttaccgccttcaggtcactaagggttggccgacctatcatgccgttgaaggctgatggaacgtcaattacgacaaactacgccatcagagttctggtggctgtaatttttccaactgtgagaggtaatctgatatacccgaaaggtgtgatgccttggccaaagaagccatacatcacttgtttacagggtgtcaggttggtgagctggatgcccatattttcatatgataacttgaaaagaatgttggatgaggctccatcgtccaccatacatctcgctgcagtcatgttctcgatttgtgcagtgttgaccaaggggtcattgtgcgggaaactagccttagcagtgtcttcttctgggatagaaatcgtgggctctataagctttggttgcttagagccccaatcttcaatagctaggatgtcacttttaggctcatgacggagtgtccaagcatagcaatccatagctctgtcggtctcacctgcaatatggggtctggcaatgatgacccctaagtgtcctacaattggtggtggcattggatctccattctgggcaccttgtgcctgagtttggtcattctgcacataacgacgcaagtggggattgttataacttatgaggtattcaatctccctcttcaaatttcgacagtcattgttgtgatggtcaaagtcgttgtgataccaacaaaacttctacatgtccctcctgcttatctcccttttaatgggaaagggcttttggtaggggattgttccctgagtggccatg

SEQ ID NO: 123768 - DNA, 924 bp, Cannabis sativa
ggtaaaataattcccaacagtgaaatgacagtcttatcagtttgcttccttagcttcaaaagcttcttgaaataccagctcatttcttgcttgataggaatatcccacagacatcgatccttgatataaatagaattgacccatctcacccataaaatatcttgtttgctagcgatagccaaaaggtatttggccattaaagtcatattccattttctcccttcacaaaatccaacaccaccaagcttttttggaagacaaattttctcccaagaagggaggtgaagtttactcttattggcaacttttctccataaaaagtcacgacaactcttatcaatagcagtagtaactttgtgaggtaagataaacaggctcattcaaaagtttctgatgcctaagaggactgaatgaatcaattgagctctaccagcaaaagacagatttctactatatagcccaacagttaagtttactactgagcttatctaaaatcacaccacagtccgataatttccatcttgtcagtctcaaaaaaacaccaagatatttaagagggaatttaccttcagccatatggaccttctcgaggatattagctttgcaatcatcattgattcctccaaagtatatatgggacttcgagttgtttgcagacagacccgtggtatcataaaatctttggaaagcatcaaacataaaattcacagatgtcatattacccttgcaaaatataagaaggtcatctacaaaacataaattcatcagtctgagattcttacacatcaaatgaaatctgaaccccttattattagaactttgagccaatttcctggtgaggtattccatgatcagcacaaagagtataaataggggttcaccccgttgtaataaataactaagaaattctcattcactttctct

SEQ ID NO: 123769 - DNA, 1406 bp, Cannabis sativa
cattgcaatattgaaaggtgatttcaattaaaattttcattccattttgatctctaggtgatcaaaatcatttgtgatgtacaaaatcttactcaattttaagcactaaaatatagatattcaatccaacactctcattagctcttttataatagctaaaagataaagaaaaaaaaaatagctaaaaaatttaaaatccatctccatcaagtactttatatcttaagcttttaaagcttctttatttatattttaatattattattttttctttatgtgtctcactctctcaatagcatttgtttaaaattatttttattttttttctttaattttcattgataaatattctttataaatgcaatatttaaataaagtaaaagaagatatggagaagttttctgtggtgtgaaattttaataaggtattttaaaagatagagtaaagaagtattagtgtaacacatttataattgcaatatcctacctgacaaaagatgaagcatcagcagggaactacaaattaacatatggttttgggctgggggctacctacaactacacaagttaagtattgtataggcaaaaacatatatttatgtacatgaatcattagtgagtattctatgttatacagtgagttgagccatgttcttaccagtattttccacatgaagttccctctcgaaactactaacaaaatcctccatggatgccttgtaactctccattcctgggacatgcattgcaagttccaaaccaatactcatccattttttggccacatcaatctggccaagcttcacaggcaatgctgctcggttccaagcggttgtagccagccattttccctcttcaatgggatactcgccgtcctttaaacccaccattattcgataagcttgcttatacatgccatacacagcatcatcatcatctgcatctcctctgcgaacattagctactgcaatgagctttcggacaataagagccacactttgatattctggcaaaggagaagaaaggaaagtcgtaaggcactcatttagagcaaaggcagctacttcgagattaggccggggaccctgcatagcattaaggccaatctgaaggaggtatttgggttcgcaagcctttgaattagctaaatttttcacaacaagtagttgtgatcctaaatcattcagccttccttgtatatcgtaggcacagagagtgtatacgaagaaaaggtcgacctcgaagctgttaacttggtcatcaataagccgaggacccgatgaaattgacttgagtaactgcagccacggtaagaataccataataaagagtaaggagatgttccacataaatagagtaattactaattaaatatagtagcacaagcttaaattctacttgttttac

SEQ ID NO: 123770 - DNA, 849 bp, Cannabis sativa
aaaaaaaaaaaaaaaaggtactttatgtaaaaatttcattttgtaaattgtggatcaagtccatatcatatagcctccaaacttgggtgacaattccaagtgcattactcaatatctgtatctgtagttattgggccttacgtgtatagagctttgtgtgtgcctttatggactcttcttttgactttcaaaagcttgtttcatttctaggcttttgttgagtgggtggaagccttaataataaaattgggattattttataaatacacgaaaataacaaaaaaagaaaaattacaaaaatataattttatgaaattttaaatattttgataataatttttatgttgattatgttggaaaaagtagtggattgttattattatggaatgatgattgggaggtgtaagtatagtcgtttacggttggacatattgatgacttggttaaatatttgggtcgggattggtaaatcttggcgattattatgttggcttaacgagatgtatgatgttctatggatttatgggtaattttaacgaaattctctcacttaatgaaaagaaagggacattgtttggtgtatttcagccatgaatgatttccaacaagcttcggataaacgctctttggcttgggttttgagggtcaatgttttacatggcttaataaaaggcagggtggtgcacatgttcaagaaaggcttaatcggtacatttgtaatcaacagtcgcatgcagggacggagggactttagcccatgtatgggctaaagccctcactcaaatatatacatcaaattttttatatgtagatatatacatatattaattcactttgctcaatttatta

SEQ ID NO: 123771 - DNA, 786 bp, Cannabis sativa
caacgatctttgtccccaatattttagatccaactcttcaagttgaacccatatcagaaccttttatacatcttctttcttgaagttcacattgggatcccatgccttcatgatgacaggtcttcgattgaaaaatatgtatccaccctccagaatctgatctctatctgtcatggagttgaacctgatgatgaaaattccataagatatcatcttcacactgtctatcttatccttccaaacccttttaacaaatccatccagtacatgtaatggaggatttgcaccaagcacataacaaacaatggaagcttgccaaaacttaatttcatcctcaatatcatcaagagtaattttcactttgttttcattctcagactatttaaacgaattatccaaattgcgcacaataccagatctcaaaacaggagggatttggggttttaccttgtttcacatcactattacattggttgttggcctgtaggaaatgaataaagtccttctgaacagcttcttgcctctgtaaaagcttcagggacgatctgggagacagaggttgctggaacaaatcgaccatggcaggctcgtcgtccgcagtttcctcctcctccgagacctcaagcagttccactccgatttcctcacatcaagccccagtcgaaatagcttcctgagtcaattgaacttgcttcttcttcgatttcttgcccacagatctagtcttccctttaactttagacctcgttttagccatagccaccagccagaagctgcgagagcaaa

SEQ ID NO: 123772 - DNA, 878 bp, Cannabis sativa
catgtggtcagaagcaccagaatctacaatccaagggttatgaggagtctgaataacctaaagtgcatgagtattgcattgtcttgcgactaaagaaatgactcttaatgagttttttttttgccatggagaaagacaagaagacaaaacaaacaagtacagaatcctagagaagacgaacaaagagagacaatgctggaaaaacgtcgttggagttggagaagagcaagagatggagaaacttgagagagacgacgcagaaaaaatgccgttggaggcttccacgtgcacccatgcaccggcgcgtggagagtcgctgcggatggaggtggcacgtggggcccacgcgcagcttaaatggacgttggatttttgggttttgccgatcggaggtgggacaagctccctgggttggaggtgagaatagaaaactccttttaattagttttctaagatagagactccaacccctaatttttagaaaggaaggaatgaaaaaattctttgagaagcttttacatgctctgataccatgaaggaaatgagagaaaatgatttgtattttctgatgatcaattttagtacatacaaaggatatatataatacaatgtgaacatctagaacactagagtaaatgaaaaagcattaaatgtaaatttacacctaatttacagctagcttgatttcctacagattaaacaaagtaatttgtccagtccagtgtttgggcatgcaagaaatcttgataactaattcagttaatctcatttgtttgagattatttatcccagcttgcaaggtgagataaataatcccatagatgtgagatttattttttatcattttttttttcaattttgattttgttaatatattt

SEQ ID NO: 123773 - DNA, 722 bp, Cannabis sativa
tcatagcatcaataaaggcggacccatatctgcacagtgaagtgataattgttcaaaatgacaaaacaatattttgaagctgctacacatataaaacatatatatatatgatgagatctcataaaataaataaatggttgtatgatataatttgatagatatatgcacctttcaaatataagtgtgttgatgctaattattgagaagtttagaataggttaacatcctcaaaataaaatttaaatagtttgttgtacatacacacatatattttttttttattattattataactgcatttgaaataaactatttaaccctaattttcgtattataaaatagtctaaatttatagaaaaaattatttaaattatatatatttagatttatagaaggagtgcatcattaaagcacttgaatatttattggagaatgaattagtcagcagtcttgaataggaactaaagatagtttgcctccataaatctccgggagctgctcttcatggatgtcattcagcaaagttggttttagctttttgttatccacaaatacgatctgcccaatcaattaatattaacttaattaattaattaattcttttattatgcatatatattaaaaaaaaaaaaaagcggtttcaaaagtaaaattttctaaaaatttaatagtgctagaatagtacagcttgtaataactagaaatatttggtcaccatctta

SEQ ID NO: 123774 - DNA, 829 bp, Cannabis sativa
tcaccaatttgccttataatactgaacaaaacttgctcaccccagtatttcagttctaatccctgaaattgaacccatataggcaccaaatgaatatcttcttttctaaaattcttgttcggatcccacgccttcataatcactggccgattgttgaagaaaatgtatccaccagacagaatcttatcacgatctgctatggaattaaatctgaccatgaagacaccataggaaatcattccaaccttgtcaactttgtccttccacacccttctaacaaagccatctaaaatggacattgggggattggccccaagcacatagcaaacaatagatggggtccaaaactcaacttcttcctgtatatcttcactagtaattttcactttctgctttgaggatgtaccagtaaaacatggctctaaattttgaattatactaccagatctcaatacagggggaatgacattcgtacctcttgcaaccgcagctacagagagttgttgtgcctctcgaaattgtttcaattccaccagttgtgcgaagtccagccttatactgtcccttcgtgagtcctcttgccctctttgcaactcaaaatcgtgcacaataccatgttcctcctcgccactttcttcatcttccgaaaagatgattggttctatccctaaaacttcatccatagacttagttttcttcacttccgaagaggaatcaggccctcgctttttcttcttcttcgtcgtagtccttggcttgccctgcttcgtcgccctcgtcttcgccatagcaacagctcaaagagctgagagaaagctagagagagaaa

SEQ ID NO: 123775 - DNA, 2123 bp, Cannabis sativa
accacgagaggcagcatcagaggaacctgtgccaatgtctgcagtagtaagaaactggctgactgcagctgccagggattgatcaacattttcctgctgtgcaggaggttcgtccaacggaaaagagtttgagaggtcaaacggatttcttttaaagtttgatttcggaggggctttgaggggtattttgtagggaaggtcagggggatatgcactgtcgtcgcatttttgaaggtaggtgatgcattttgtgagagtgtggtcaaataatccacagtgaaagcaaatgtttggcaggttctcatatttaaaagtgagccatttctcacggtggatactcttgaagtccaccatgattccacgagtgatgggcttggagatatcaatgagaacgcgaacacgaagaaagagttcagagactttgaaaagagtaatcttgtcaacctccaagaagtctcccacctcatctccaatgagcttggccagctttagagatttttggccaaaaggatcgagtggcttgtatccagaagggtgagtacctaagctggttgggaaggagagtgtccaggcctgcagggttggcacatgtgaccagacaatggtcaaagtgccatggctggccctcgaggactcttcgcatgtcgccctcatagtgaaactccaccatgaacataccggacccatattcagagaatgttaaagggccacgggtaatccacgcattcctcatagccacttcgaaccactcaagcttgatggttctaggggaaaggattctaaaaaccagacagaaggttctactatgttggctaacccccccagtatcatcttccagatcatgaactacagcttctcggttagttagattaagaatttcagacatgttgagggcaagagaatccatggataggttcagaaagtcaaataaagggaatattacagggaaagaactaggtaccaagagttgaatgagcagggaacgtagcatgtaccaaaaccttaaatagaggactttagagaaatacctggagagaggaggcttgctgaagaaggtgatctgcagatgccatatcagtcctttcggtatctccgtaggatcgccatagctagtaggagcaatgatcgcctccatccttgggcttctcaaaacgacggcaggcattaaatggaaccaaaacaaaccaaggagagagtgcaagagacaaataaaccttcctgcgaagtatctaaaaaaagatctaaaatagatttaaaacaccagagcaattaataactaacagatgactggaggagtaataaatgaacaaacagaacgaagaaaagtcaaatgcaaagcttgaaaaggaagtaaaagacacgacttgaagcctcaaaacgacatcatcaagatgaaaaaacgctggaatggaaccagatttgtgagagtacaggagaaccggagacacgggatttcgccccactagaaagtttcagagcttaatatacatctggacttgttagttaagaatatggttagagaagaagcaattgataccaaagtttcgtgctttactcattaataataatatattttcttattaatattacttattttaaaagtttaaaaggaattcaggcgatgatgttaaatggttaatcattaaaatatttttaattaaatataaacatatagattttttaaactctgtcagtttgcttcataagcatctcctgttgtgcggaattatcaccctcctagtcaaaaagttaagaaaattacaatgagaaaacaaatttagctgagcacaaaaatgtaccaaactcaaaaatcatgggtacaaatccacaacagccatggcaacctcctctgtcacctaaggtacctgcattcaccaaatgttcgcttcatttttcgggtatatgttaaaaacaatagtttgttctaatgataaaaccaaatcaacgtctcatcttttacaaaaaaaaaaaaaaaaatacagaggcaataatattaacttggccagtgttagtactgttattaccgttaggcatggcaaaaagatccattcattcggatcggatcagtgatccgatctgacggatcattactgatccgaaacattcggatagttattggatct

SEQ ID NO: 123776 - DNA, 1677 bp, Cannabis sativa
agttttatattttattagtgatacaaaatctatggtactttaatctctgcaaagagataacaccacataaacacttagaatttaaaattcaatgtttatgaataattgtttcttaagaatttattaagattttgtttaataaaaagatcttttgatttgatagcggcggaataagttatttaatatatgcagttcaaagatcttttatatctattgaactctagattacattcgaaactccaaagaatttctataacacttaggggttgaaaaagttattgataaatgtagttcaaacttcttgaactctagactatactcaactcaatacaccagagaatctcatctctactctacgacacacatattttgattagacatggatatggatataaatataatataataaacgaaatagcaaactattagaacttattcttgatcttgtaagtgttccaataaatatgttactattgtaatagtaaatagatgcgagtaaagtccatgaacatagaatcacgataccttatcttcgtgggaagattttaaaattctaacccattattatttggatgacactggtgattagcctactatgttatgttcaagataggaacttttaaaattaaacaaagaaaagataatctaaccattcatatgcatagtaataacttatcaaaattatgaggataagataggaaatttatgcaaagtttattcgaaagactcaagcacaattcctattccttatgaaacgttttatggtttctataatgattactcaatattaagcaagtattttgcatcaatgtttatacaagaatgctatgttgatgacttagtttagaaggaacttaatgtttctatactaagataaaatgtcacaacaagatgtccctaagtatcaatagtaagagattaaagacacacttctgcatgcatttaaccagactcctactgttgagtaggagccatcaaagatgtaatcaaacaaggaacattgagagacaatcaagaaagaatctctaaaagtgacctatatgttagatgataggggtgtatattagaatccttatatctacaccaactcataactttatattagagatgatggttactttgggagtggaagaattattctacaaggatgtaaaaacccatctataataatttagttccaccagtgaggcttttcaaaaagcactagaaagttattcaaactgaagaaagttcttaactggtttttatctctattccattttagatagaattatagatgggtcttctgtatattcagatgcacttatcatacagtaaagaattcaacatccctagaggagtaatacatacaaaagtgatgttgcataatgttttatgaacacaattgaagtaatggtagagatagcagttgcttacgataaccttacagtttttgttatttgggtatagtcagatatgctacacttgatatggacatcaagataatagattgattgaaatgcacttcttgttttatggtagtgtaagtgggagattgttggaattttatgtccaaaataagacccagttcaatataatcgtatttgttatcaacaaaagattagaagtcatttatgtttacgtgtatttttcatgcttatggtttaatatacaatttttattaaatccagaacatat

SEQ ID NO: 123777 - DNA, 1782 bp, Cannabis sativa
cccagccgagaggagaagaaggaatagttgtactgctagtttccttgggagaattgttggtcatcatgtaattggcttccatttgggcccagccgatccacttctcagttggggggagatgcaaattgagccttttcttgttccttctattccatataagccaagacagaataagaaaaaaaaataaagtcatccttagaaacctattgctgaatgtgaattaacatgtctaaagcattatttctgcttcgtttaaggattggccatattgtgaatcttcgccaaatgtgtttagcagaagtgcaataccaaagactgtgatctatggtctcctcttcctcaccacagcagcagaggggggtaatttccatgccccaagtcctcaaagccatgttaacagggagccaaccattgcaaactctccatatgaaatttctaaccttcgggggagcctctatcttccatagacctcaccaccatttcttaattttatgatcttctgaaggacctgctgtaaattcattagttgtgcccacttgatacccactactcacagtatagcagccatccggggtgtaatgccatatcatatcatcattttgggttgtagaacaaggggctatacctaaaatcattggaatatcatccggatgaaagcactcttttactctttgtgtgttccaatgaccattttcgtctttgaggatgttgaccgtggccccttgggggacttgagcaggggtacgtagagagaaagttgaagggcgagggagccatttgtccttattgatgcgaatgtctcttccagaaataaccctccaacaaattcctttttcaataattttccttccccataagatacttctccacatataagaaccgaacccaccaactttagcttccaagaagtttgaattagtatagtagcacgcctttagcactctagcaagcattgagtgagggttattgatgatcttccacccttgtttggctaataaagattggttgaactgttctaaattcttaaatcccattccccccttttcctttggcttgcaaagcttgttccaattcccccaatggattttttgtttagcatccgaagacccccaccaaaatcgggccatcattgcatggatatccttaattagctccttaggaaggcggaaacaactcatgacgtaagttgggatagcttgaatgatggcttttaacaaaatttccctcccggcttgagaaaataagctagctttccacccttgaagtttggttcttattttggtacgattgtcttcaaaaacttctttcattttcttcccaattgaggcaggcatccccaggtattttgtatggcagtccactagcttcacccccaacattgcagcaagagaagttccagttccttgagcgatcttctttcctacacatagttcagatttgtcaaaatttattctttggcccgaaagcaaagagtattcatccaatatagatttcaagctttgacaatctgaggaagtggcgtctaaaaagatgaaactatcatctgcaaagaataggtgagatagttttatgttgtctctaccaaacctgagaccatgaagtctattggctctctcagcttcttggatgaggcaagacagaccttcggagcagagtaagaacatgtatggtgatagggggtctccctgacgtatgcctcagctaggatgaatttgaccgctgacttctccattaagaagtattgagaaggaaattgactttatgcaattcataatcttatcc

SEQ ID NO: 123778 - DNA, 1346 bp, Cannabis sativa
cgtatactaataaatgacgtgccatgtggccgcctacatttattccacttaatcaaactttaggtccctacattttggaattattattaaagttaactgaaaactctcccattttcttaccaaaaaaaaaaaagaaaactctcccattttttttctttgtctaattaaaattttttgccctctaaattttgatatgtaacaaattatgttttttaaatttttttgacttttaaaaattttccttaaattattgaaattatcaaatttaagaacttttatccaatttcattcaattttactaatttaatgattatttatgtactaaatcatactccttagactttaatatccaccaaatcatgccccttgaattttgatatgtaccaaatcatgtcccctgaactttcatccatattagacttttcttactaaaatcagacaaaagttcttatatctaacaatctcaatagtttataagagatttttaacaaccaaaaaaatttaggggacataatttggtatatatcaaaattcaaggcaaaaattctaattagctttttttttaataaaaactgaaaagtctctttaaaaaaaatctatatttgcaaattagatttgggagatgaaagtagaaaaaaaaaatataggattaaacaatatggagaataaaaaaaaaaatcatgtatggtatacaaattttgttaaatcaagtttttttataaaaaatttctttcatgctaaatatgaaaaaaaaaaatatagtttttttctttctatttcccacaaaaatttaaattcgaaaaacatctttaaaaaaaataaattatttgttaggcaagttcaaattaaatataatttggtaaatcatttccatactccattaaccaattattctaatctccattgtatactatgaataaattgatttataattttttaaaatagataatatagtacttaaattatgtgtgttaggtaatttattttatttaaagtttaaaatttatagtgtttaatttaaaatttagtttttataattactgatttaaattatatctcgatattgaaacttaccattatagaatttaagttatgatatatccgatttttgaaaaatcaaaaaaatcaactttaaaattagatcaaaaagcaaatgacaaaacggagactaaactcaactggagtcccaaatagcacaaaaaaaaggtcaaatgtgaccactaccatgagaaagtatcagtggtcgcatacttttagggttctactcttgattttctcattcaactcttttgaagggacatttcacttcaaaaaccctagctcgaggaagaattccaacaagacac

SEQ ID NO: 123779 - DNA, 1865 bp, Cannabis sativa
ccctttaactccgcgtcatccctgtttgtacaatgccctgtcatccccatgctttcctttcatactccgtccttctcgctacttaaatctaaatttttttgagcataataggtttctagcaagaagtctaaaaatgtctcgttgtcgaagcctcaccctgttatggtttcgatctaggaatttttgaagttcgatgagtcaatctctaatattagattttgaatcgatggtggtggaaagcggagaaagagacaagatgttgaacaaagagcttgcaaaaataataataataaaaaacaaaagtggtcgttaagcatatcaggaggggcagtgaggttgttcattggcctccccatcaatagagtttccatggccatggatggtctatccacgaagaataagaagaagataaaggagagagaaaaaaaatatatctctctttagatccaattggttccctcccttatttattcttatgtgtgtatatatatacatattagtttatatatgttcgagaacagaggttcttaattactatgtcaagatcatagaacgagttttggtcaggtgggtctagttcatgtatccccttgagtagcttaactccaattatttaattactttgattaaattaggtttggactaaattctaatatattacagtgaagaagatgctcaaatgtgtatataggatgtttcttaggacaccttttctagattttgttgtgacattaatgaagagacttctctacgctcgtatgtttctaatccttaatttcttctaatatatttttgctttagattagtgagtggacattagaagttgatgaggtgaagctaaaataattagttttgtttgcaggtgcccatgatttggttcgtgggtgcagtataagagattttgttttattttctgatggccttcaacgttaatggtagatgaagacggagactatggctgagaatggggtgggatgagagttgtggctggggatgggtgaagaagacgaagaaaaaaaagaaaacaaaaaaaaatgaaaaaatagttttatgattttaaaataatttttaagtttttttattggaaaatttacatcccagtacatttatttcattcattttataaaaatgtgatggtttcaatttcataccaaagtgtaccgtttttaatttaattcaatttttttaaaaaaaaaattgaaaaagctgactgagacgtgtgtgatgtatcctgacgtcatcatatcacgtccatcacgtcttctttgttgcaggtttcaactgttcacgcgtccaatttttgcagctataattcaaattgcagtcggtttttaaaggtttatattccatattttcttttatttttatatattaattatcaattttatgggttttaggtgtttgtgtaaataggtaaagtttctttataaataaacattttcagtttttatttgctctattttccttttttcagagtatatgggtatgggttagggtttcatcttctttggtggtttatctcgtgtttattgtaagttttagtgtattttttcttattaggagtgttttgagtgcatccttttcgtttatcgttctttggtgttgtgtttctgtttgattgttgagggttcttatcatctgtaagcctaaaaaaatagttaaatctcgttctttaatttctctttctcattctataaagttagctgttgataagaaaaaaaatagaaaatgtatctgatgatgaagatcgtgatgattatgattgttctggtggatctggtggatcatctgatggtagccgtggctctgcattgcaaaccaagagaaaaagagttgttgagaaagtgaagaaggaagatgttcga

SEQ ID NO: 123780 - DNA, 3645 bp, Cannabis sativa
gccttatggcaggataaatatatataaaaaaagaagataaaaaaagaagtattcaaacggatggagtcgtaggctctttgtacaggtcttttgggctggttagagctggaagatcagttgtctgagcgagggccatgtctacatttttaccggaagtaaaagtggtcgcctcagattctccataagtgacctgagaagcgcaatactcgagaaacatggctttggaatcacccaagtaatccaagttttccatgggattagccttccaaaatacataaaaaatctcaagacccgctgtctctaaggcatttaccttccctccgagcctcgccacttcagctctctgctgctcggcctctaacttgtacttctcaacttcagcctcaagctcctcctccttagacttcttctctgcttctaacctatggaagacagttcgaagaacctccctttctttttggaggctggtcacttctttggataaggaggcaatggcagcttcaagtttgtcagaagcctctaaatctttagtcagctcggccactttcttctcggcggcaagacgtttcttgttgacttctcccagttccatttggacggctccaagttgaactctggcttcgtcggcatccttcctggccaagtccacttttgcctacatggtgttggacatggcagtgttctttgaggcagtcgacttagctcgggaaacagcatatgccatcttcagaccggtctgcacagagaaataacattaaaatctgagctaaataaagaaggacaagaagaaactgtcaggaaagactcaccctcgtaaacttcttcacgactcctcccatcaccagttccagagaaaggtcattgtcagctcccgccagtggctcattcacctgagggaccgactgagctatgtagtgggtgagcatatctttgcctcttttagtctctagatgcagcactggaggtggggcaggggccttgatttgcttagatccgcttttgaccagctcggatctgccctttcactgctctggcctgtccgagctccctccttgagagtctttggacttagtcacctttggtgcagaagggtctatgacagttggttcctcagagagatcaataactgctttggctggtgccttctctctggacagtgttgtctcaccacctctagacttctcggccggaggagataggccagaacttcctccaactctcttgttcaaggctttaagaattttctgagacatgtctgtgcgaaatgaaaagcaacatggttaggaaaaagcatgagaaatatgaaagcataataatcaggaaagttaaaggcaagatggagtatcttgtacttcggcaaaagcatcttcccgagcaaaacctgatgggtcatcatcatctgacgagtctctttggtgctccaggatggctttcccctttcttactacaggagtggatggaagagcaggtagactgggctccctgacctaaatcgcatgttcgataggcctgtgctcgaccgaaattttcttcttccttttgagcggagtcacctactcttcctaaacctcgtcttcttgctcaagatgctcctgagcatactccttgggtcctgcacctcccttcaacttagcttcatgcttgagttgaatgagttcattctcctcatgagctccctcagcccggatagcactggatttcctcttcttctccttcacaggatggggaatgaaatcctttgggtagagcctgtactccataaagttttcctctaagctcaacaaggtgatatttcgggcagcacccagcagctgagtgatcctttgagctttatctctaagagctagcgtgaagggtggacggtaatatatagggatctgctgtaattgaatataggtggtgcccatgccatccaccatgcaatactcgtcaacgaaattccaaattttgctcacggccttgtccccagtgcccgccagccacttgaagtctggctgagaaaagtagaagtatcctgaccttccttgcttgggagtagacttcaagtcaaaaaactagctaacctcacgaggagaaggcatacccaacatttgggtggcatagagaacgaacagagcagacagatacttgatgcccttgccagtaaatttggtcggacaaagatggaagaagtctgccaccttcctaaagtacgagtgcaaaggaatcagtaccccttttttggaatgagcacccgactaggcacacatcccttttttcgggtttgttgctcgattttttgaggcaggaacatagtagtccagcttgcccagataaccggacggatctagatcctgtaggcgtgccttagtgactttggacagagggctcatccacccggcacccaaggcaccttgcctcctgtgaggaactgcaacagtaagctcctcagtgtcgtagtccactccttcgaccaggacatcaccgtctgcgtctactggatcaccagcctcgttgtatcccttaaagtttggaggtccagcctcctcctcttcctttgcctcgaaaggactgccaggacggatatcgccctgttcctctatcttctagacttcagtgtccccttcatgatccccctcctcctgaacaggcggttcctgttcgctgctgggtaaggtagcgtgctgggccacgtgagggtcagacgtgttgactttacgcattgtctgtttagttcgagccatcatcctctggctggacgggaagattgaatttaaatgtttgtcgcttgaagagggcagactggaacaaagtcgagggttatcctcgtatagaagttgaagtaaatccttgtcgatttgttgttcgcttccccaaaactcacccaagttcatctacagaagacaacacgcgagatcagtgttttgtcaggatatcgaacaataaataggcaaataggccgaccaggagtactcaacagatttaggaatggaaatattcgacaattagtcaaaaccctgaagtttcaaatttttgagacttagggcaaaaatttcacgaagctttgaataagcaagttgaaagacagacattgtgcagtcaaaaggcaagcataatgaatactgaagtcgcataaatcattgcaaagaaaaatcgtagagtttctaaacctagagttttctacctatcttatacatcaagtttaagatcgcattcagaaattaaatgtacaaaataaaaggagaaagaatcaaaaacttactcactgatcgacgtctagattcagtatacgcaaagttgttcggatagctcttgtgaaaatttcacgacagacttgaggtgaaaattcctctctttttgctttgaacttgcttaatgaatacattggtaaatatgagtttatgaacaatgctaagtcatatttataggcagaaaaacaaaaaggggtaatcatttcaaatgcctcagatgcctcagttccccccaaaagcaaatattggaaatgaaaagcaatcaagtgtaaccgtcaaacgtggtgagcgaaaatcagatttttaagcattaattgcgttagaacatttattagatgaaaaccaaagagacgcctagtcagcctcacattgaatcgcgaacagacgcacgtgacacgtgtcacccatctaaacg

SEQ ID NO: 123781 - DNA, 587 bp, Cannabis sativa
ggtcacctcgcactattcccacacatgtcggtgtttgaaacttcagggataagtgcttaatgaaactaattgcccctagtccaattaacgttggtcggcccatcagtatgttgtaggctgatggcacgtcgacaacaagaaagtgttgcataatagtgttggataagggtccctcgctcacggttaatgagagctcaattattccttggctggcgatgctgtcgcccgtaaatctgcatagatttaccatccaaggttttaatttggcttttttccagccccattttctttagtgtatccttataaaggatattcactaaacttctgttgtccaccagtaccctttttatccttttcttggtgagctggatggtaatcactagcgggtcgacatgagggtatctcacatattttttcatcctcctccgagaacacaattagaggttcctcagtcttagccttcttagaagatttcggagcaaataacgactgctcattcttaacttcctctccctatctcttttgagcattgttactttcctcggcgagatgtggccctcccaagataaccagaatgtcctctcctt

SEQ ID NO: 123782 - DNA, 1539 bp, Cannabis sativa
agagagagaaggctattttctttccaattttctaattttaggctaaaaggtataaactaatgtatagctaaataaattaaagaatatctttagattataacacttcaataaagttcactaaaagacaagggattaaatggccaaaaagaccattttacccctcacaaaaccaaaaagcttctaactcacttaggggtattttggtcattctactacttcgaataattcctaacattcccaatgtctaactaagtttccccgctactacagaaatattaaaatgtgatgccaatgaccaaacaccgtgttccgatgttgccgggcacaaaacatgcaaaaacataatattctatatatggcataaacaatacaccctaaattcaaataaatctccataaaatgacaaatcataattaataatctagtttcataattaaaccctaattatctgttaattctaaataaaactaagcggtctttacacatgatatattagaattgtcttatgtgtttattgtttttaaaaccaaagcatgtaaactggctaagattaatttagaattaacttggtaatttaaaatgattttaaattataaattaaaaagttaatttagatttgatgattacaacaggaaatttatttataatttgaggcttttattataaataaattaattataattattaaagtagttaatatgtattaattctgagaattaataaaacaaatacattacccttaaatagtgagtgtgagaaggagtacatgttaatgtaacctacgatctccattattggtcaacaccaagtgagtatagactggttttgagacgaatttgttttcatccccctaaagaatgtatgggtctatactattgctcaatgttgatctcttgactaagataaaaagaaataatgtattttagtgtgacatcgacccttaaggcgacacactaagttaatcataaaattgaaataatgggttacactcataaagtgcaactaagcttcatagtggttagttgttaacttggtaaaaaagtagtaatttatattttgaaaaggaaatatgagatatttaagtttcaaaataataaagatgagaattatctcataggcttaatgaaattgactcgatatcgaccctaagatgatgatcaattgtcaaagagctttatcatgaaataacttaaacaagattttatgtattttacttttatacgctcatacatcacatttacagtaatttcaaaataatatttattattcatgaacaatcattatgttactatatttatttcagtcatgtctacaatgtcaaatccccttactactttactaaaacttgaaaaagctaaatggtgctaatttttataaatagaaattgaatttgaatttaattctagtttgtgagaattataaatttgtcctaattaagcagcgtcctaaggagcccactaccaatgcccgaaaaaatattcaagacatatatgatgcttggattcaatctaacagcaaagccaaatgtttcatgtttgt

SEQ ID NO: 123783 - DNA, 1229 bp, Cannabis sativa
ggatcatttataagctttattttcctacaagggtcaaagtgtgacctttgaccacccaagttatggatattacacatctgccacagcttaaggctcgggtcgtgacatgtattatgggacccacgtgttttaacatatcatgtgaattatttttgtttttcaccatgtagtacctataactattactacattttaaacctcctaattaattataactctcgggtcttataagtttataacttatcatttttcaccttaaatatatataatatatagttttttaatacaacaataatatttattataattacaatttcatctataataatttattatattaaaaaaaagtttcataaacccatatagtataatgtatcatacactttaactaaccaaactatgaatatttttattttttacttaataaaaatcaaataaagtttttaattttttttattttaggctttcaaaaagtgtaagtcctaagtatgaatttaacccgcttaattacctaaggccgatcctgaatataatagttgtatcatggtacgtgccaaaaaaaacatcttcacatgtatgcatgcatgcagaaactaataaaaatttgtacgtatatatatatagtacaattacatatatagcttcgagaattgtgtatatatagtattgaccacgagccttaatatgacatgtatgtcggtttgatttatttgccgaccatatgcaacaccctcaaattattaatagttgtattcttatatttatataacaaaatttgtaaattctacattatattatatatagtttattgaggatttttatttacaccatataataataataataataataataatatttatttttatatacatttatttttttaaaatttttttcttcatgttaaaaatatatttgattttacttttaaatatatattttttaagaatataaaaaaggaaaaagagaaataaaaaacattagtataaactaaaaatatttaaaagaagtgcatattaaaactccctataattgtatggcacatatttttcctaataaaaatgtattaaatatacatagtatataatttatcataatttttatatatatagcaccaccatatattggaatttaattttgtagtacgtactattctaaattaattaatgctgtcctttttattgtatttatttatgagaaaagtagtattgatattgaacaaaaaagaa

SEQ ID NO: 123784 - DNA, 2242 bp, Cannabis sativa
tttgcaagattaggtcaatgatgaagttactcaatttgctaatggatagttgtaataaatatggctttaatcgccaaaataaacatgaggctgatcagtcttttaaaaatgaataaagttggattagctgctattttagaaactaaagtgagaggtactaaagtcgctgaaataatggataatattttccatggctggaaatattactcgagtattatagtataaggtagagttttattgatttggttagaagtattagttttggtataaaaaattgaagagaatacacaatactagcattgcaaagtgagaatgatatgggtagataatgatttttgtcttacagtggtgtatggttcaactctcaagctaaaaagataggaactatggtataggctggggaacttgagtatgcctgttaaaccgtggttagttgggggttatttcattgcaatttttacaagcaatgacaaaattgggggaaaggatattagtgccaatgaaatgatagatgctaatcaatggctagatttggagttagtagatgagatgagatgtagatgttcacacttggaataacaattatggcaagagaatttattccaagattgatatagtgtttaagaatgaggattggattgatctctatccaaattatgtggcattctttcaatgggagccataatcggaggctgaatattacagtggcccagaaagctactaaaaaattattcatatttaggaaagttctatgcaaactttcacgttattcaagtcatggataaactactagtgttacttcgtgataacacaaatatagtttcaaaacagtaaagaatccataaccctaagaggagtaaatatatagatagaaatttcacaaaagcatggattttgtgactaaggaggatgtaatgatggagaaggatatatattacacttgatctggacataaagaacatgagattaattaaaatgcacttatagttttatattagtgcaagtgagaactttttggggttttatgccctaaataaaactcatttcaatataatcttatttactaattaataaaatattaaaaattattttatttgcttggttcacattattacattcatgattatatgtttaatatataaatcctatcaaatccctaacatatagttactcagaattatagtgttgtctacacagtggaaaataatcatgattatatgcttcaaactatttagtactatgatttatcagtgcactagatttacactgacgtgataatcaatgatgtgatttacttacacttggacaagcaggatgtcttttctagggcattaggaaagcaaacttttatcagatgtatcgactatacatcggactggacagatattgacagtggaaaagatatcataaatttaatgttatatcttttctaagtcaatgtcacttagttgatcttagatcaattaatcatgatccttagattgttaagctttagtttgattgtactatacgggctcttggacttgttcgttaccagcttactcgtagaactagcccatacttacatgttgggagctcggtagtgcaattgagtgggagcattaatcataaatatggaatctatagcttcaataactatttagaagtggaatgatgatttcaatagagcttggctaaacgatataaatggaagagctcatatttcaataattataatagtttactgaaatatcatttataaggaggtaagtctttataggataaaatacatcgaagagtaaaacggtaaatttgtctcttctcgatgtaaactgtctatagaggatcgttgattatttagactgaaacaatggataattcataacatatatatatttggtatataaagcgttttatgtaatcaagaatataattttgaatcaatagtggagtcaggagaaattaataagctagaaaatctacttggtaaatttcaaatctacttattaggagcttgattacataggctcatggttcttacattatctgagataatactaccttgtaaaccttattattgatttaataagtcacttagaattctaaaataagactatgtcttatttgagaattttcactaagtatgggcaaatttaagaagaaaataaaatatgagcttttttgttaattaagacaccttgtttgtgggtctaattaataaatatatttaaataataattttttgataattatttataattat

SEQ ID NO: 123785 - DNA, 1839 bp, Cannabis sativa
ttgtgaaaaattaagcaattttggataaaaaatgaaggagatgaatttttgaaaatcgcaaaagaaggagtcagtcattggagagatcccttggtcagcctatcattccgcacgcggaagggtgtccaggagccgagttttctcggcggatgctcctcagacgctcgcgcacatgtgaccatgcaatgtcccctacttttcctctgttttctacgagttttttggaccatgcagccccgtgtgcatggtgaaacaggggagtttgcatggtgtctgattttcatgcatattttgatcaaaaattcgttttttggcaaaataaaagccaaaatttattagatttttatgtagatttcattttttcaatttaaaaaactaaaatatcataataaaaaataatttttatttattttaaataattaaaattgttttttttagatatttggagtttactaatttcaaaattgattttttcacataaattttaaattatggtaagattttaaaaatttgttaatttctttagtatttatataatatttaattataagatcacatattttaatattagccatattttaaattaaaagatataaattcttatttctaacattaaaacaattaaatatatacctatattacctaatacttcagccaaaaccttgtagaataattaaaaattctatccttaaaagaaaatgactattttgcccttataaaacccttaaacttagaattaaccctagggtattttagtaaatccatctaaaccgccaaaccgacattataagttctaaactagtcctgaatacttccaaaatagtccatccttaattgtcgtaacatttctcaccacattgtcaagttctcacggtcgcctggcccgaaaatattttatttcaaaaatgatatccacaatacccacatatctcaacataatctctgtaattaataaattatgcattatataatcatttaatagattctcactaattgatccaagtaagatcataatcttactttattgcaaaataattacatatttaataaaatatgtctaattatttatcattttattttctgggatattacacgagtcatcattcaaatttgcaattgatggctttgaattcttcttcattttagtgtactcatcaaaccacctcagcctcttcttcgatctcttctccgttggtggtgaagttgtgtctaaaacttggaccttagggtcttgaatatctctaatggacgtgatgtgcatattctcaagtgtatggagaagatctgctacatcatcaggtatataatcatttgggagagtgaaatcatctccaggagactcatggtgtggctgtgactctacctctgcatctggccttctctaatcttccgtgagtgccattagggtcttcaagcaacccataatctctgtctgccctttcaaaatagcagtctggccttgcttcaaagcaatctgttccctttcaacactttctaattttgccaagatggtagagcatactagtttttgagcctttgatgtaacgacctaatgttaaggcacgctacagtgatgtctttgctaatcaaagaattttcttaaaaattgtgtcaaattaaaacttttatattaaatactaaactttataacttacaaaatcatttacaagtaccaggatcccgtttttaaacctttatacaaaatacataaccaggttgcacagcaactacaaaataagaacccaagatttcccgagaccgaacactccaggtcgcgctgccacgacatgtacaacctcatctcagcccaggctcactcgtgttcagctttcgcctttc

SEQ ID NO: 123786 - DNA, 1076 bp, Cannabis sativa
cgaaaataagttaagatgaaatttttttcatttttatgctttgaattttttatttacaaagatattttagtaaaaatgataaactattttattttagttattttatagtttatatatagttgttatgagatttttttttttgtttgtactttatttatagttattaaaatgttgatttcttattgtttcttaattaattttttgctttttgttaagaaaagcgtattttagtaattttaaaattttaaaagcatatttctataaataaaaattttagttcgtattattgtaaataaaacataaaaaatagtattttttaaaatttctcattttaactatacaattgcaaacaataatacatcatccacccagattgtatccacgaaaagaaaggaatttttacataaaatgctattttttgtgtttttaaacattcttacagtaacatagtttcatttttcatttttaccattttttaaactcttatacggttactatttaaaactttacatcatatacggtttttgattacttcacttaattgcctacacgttttcctcccatctgtcaattttcaatcacttccctgccagttaccactatctaacccacaccctcgttattatcaatatattttgaatttcctattcttcatcattctcatcttcctcttcttcttcatatggatcatcgagttcttactttttttttcttttttgttttctgactgttgtttctgtgtttttcctttgttttcgagtaatggctgttactcgatctcgttcgagttcattgtccccttctcctaagaaactcaaaaaaaaatctattaaacaatctaaattcaaatcagttgctcaaattacttcgaaaccccctaatcagaaatccaaagttgtggtagatgttggtgagccttcatctggtgatgccaagaaagctaagaggaagagaaatgataatgaggatgatttcattgttgttcgtcctagaaaggtatttttgatttttgattttttttgttttttttttcttgttgatctgttgttttcgtgtttttttttttaaaaaaaaaa

SEQ ID NO: 123787 - DNA, 2106 bp, Cannabis sativa
  modified_base (2029)..(2043): a, c, t, g, unknown or other
tgtgtaataaaaataagtttgtaagtataaatgtagtaataggcgtgtgagggtaattatgtaataaagtgtgtaaaaaggatttttcatgtaaaaatttctaatatttttctgatatatttttttatgtttttaggtcctaagaacatccaaatccgaaggcttggaagctccagattatggatatgttttgttatattgtaatttcttgaattttatgtaatttatacccattttgttttagttaagatttttatttatctcttgtgtaaatctagattaaattgtaaaataatttatatttttaggtataattcagtgtaaccacataaaaaaaatttattgttattgttgaatctaatacttattttgtagttttaaattttttaagaaaaataaaaaataaaatttattatgcatattatttatttaaaaaaatatgaaatggtgacgttctttgagtgtggctgttatcaggaaaattaataaaaagagaaaaagtatagatatagtgacgctctttgagtgtgctattgtctttaaagtatgacaaagtgagcttttaaaagtctacggtaacgcggggcgagggagagtctaaaatgttttagtgacctgtactaagtgtcactgaaaattacatttcctgatagccacattagtgacgcgcaatgaagtctcactaaaattctttagagtctctcaaagtgggtcactgaaccccattttgtagtaatgttaaaggtttattgtccaaggtaatttctgagtttcaaagtgcgtttattccgagacagcttatcactaacaatgtacttgtttcttttgaaattcttcataaattaagacgtaaacaacaaggataaaatggatgcatggctctcaaattggatatgagcaagtggtatgataggatggagtggtctgtcttacaatcgattctgcttcgaacgagtttctctattgactgggtaatgatgataatggaatgtctgtggactatttcttataacattattcatggaagagatgttcttgggcctattattccttctagagggatccgccagggggatccaatttttccatatctctttatgatctgtgcggaaggtttcttggctctaatttgtctttacgaagagaagaaatggattcatgggtgtcgagtggctcgtaaggctccttttgtcactcatatgctgtttgctgatgataacttcctatactatactgctataagggaggaggcgcaacgtgttctggagttgcttaataagtttgaaaaggattcaggttaaaaggttaatttgagtaagtcttctatatttttcagctccaacagggatgatggggttcgtcatgcgattctgtccactcttcacttgagagctgctgatgatcacagtttttatcttggtctattgattgtaactggtagaaataagaatgtggcatttggtttcttgaaggagaaggttagaaaatgcattcagaattgggatagtaagttacttttgaggaagggaaaggaggttttattgaaatcggtcatccaatctttctttcttaaactatgagtgttttcctgacccccccttaaaatttgcaaagatattgatcgacttatggggagattctggtggcattctaagtcttcccatggtaaaggaattcattagaaaagttggaacaagctgtgtctccataagcataaaggagatttgcattttcgtaatttgtggaatttaatttatccatgttaggcaaacaaggatggcaattgctgaccaatccgtcgtctcttgttgctcaagtttttcaagctagatattatccccaatgtacgtttcttgatgctgagttgggttttaatccgagttatacttggaggagtgtttttgaagcccaagaggttgttaaatttggagttagatggagggtagggtctggagtttctatacatgttcttaatcagacgtggcttccttccaaggataacctgttgggttttgtgccataaataaannnnnnnnnnnnnnnatcagatttactagttaataaagagcagaaataacattttatgttgcatcattcacatgattt

SEQ ID NO: 123788 - DNA, 542 bp, Cannabis sativa
ttagtgccaatactacagatgataataaggggaggatcgcggagttgttgggtgtgcctattgctctagaggggagtatgtatttgggtcttccaagttcaatgggtcgaaacaaaatggcggccttgagttatttgaaagaaaagttgagaaagcggcttcaatcttggggcttaaagtatgctatgagtgtttttttgcttcctctggagattgttagggatacggagggtatgatggctaagtattggtggaaatcgtctaataattcgtcctcaggcatacattggatgtcttggaagcggttttgtgggcacaaagataagggaggcatgggttttagaaatcttcgtgattttaatctcgcccttttgggtaagcaaggatggcggctattggttaattcggagtcgctcgtggcgaaggtgtttaaggctagatatttcccccatggttcgtttttaactgctacaattggtcctaatccgagttttgtgtggatgagtatcttggaagctcaatccttggtaaagaaagggacc

SEQ ID NO: 123789 - DNA, 2017 bp, Cannabis sativa
taatatttggaatgaggtttgtacctatttttctaacctctttagttctcaggattataatggtgacgttgttgacttgattctctctgttattgacaaaaggttaagtgatcaacaatacgatttttttgatgccccttttctgctaatgaagttaaagatgctttatttcatctctttggagataaagctcctggtctgaacgggcttaatgcttaattttatcaaaaaaattggtttgttcttggtgataatttaggtaaagttattttagatatcctcaatggtaatgctgatatgtccttcattaataatactttatcgttcacatccctaaaaaatcaaatgcttcctatcttaaggactttaggtcgattagcctatgctctaccttgtataaaattgtgatagacttgaatttgttcttggggatattatttctcataaccagcgtgcttttttatctaaacagctttttttggataatatttttattgcttaggaaagcattcatgctattactcataagaagcagggtaagttagggtggacaggcttaaaattagatatgaaaaaagcctttgatcgtgttaagtggggtttattacttctattcttaatcgttttaactttcctagtagaatttttagtttaattgtcgattgcctttcctctgttaccattagatttaacattaatggtcatatcattgatgaaatatttccttcccgaggtattaggcaaggctattccttgtatccttacatgattttgctctattaccttgttgtagtgggagggtttcaaggaactcaacttgttatgacttggaagaaacttgtgatagaaaaccattattagtttaaacaagcaatggatagtccttataaggaactaagaatcaaagccaagagaactatgtttaaaaccattcacatggagtcaccaaaacttttctattacaaggacaagaagggaagttcagataataggtctatttaatggacttcagcaaacttcccaattctagtatcataggtttgagatgatctgaacctatggcttgtagtataccaagtaatttacttactccagtacaagtaacttactttaagtaagatgttgaaacaattttctaatggctaactctaaaggaaatcttttgactcttagagatagattttatttatctaaggaacagttttaactattccaaaaaagataaaagccaaggaataattccttaagtatcaatagtgagaggtctcatgtatgcttcggtatgaattagactagacacatattgttcagtgggagttatgagtgggtattagcttaatccaagaaaggaacattggaagaccatcaaataaatcttaaggttaaggaggacatatgtaagtctattagggtaaagttatcgaaaccctttacactacaccaactcagatttctatatttgcattaatgctagaaagtctaaatttgggatgctgattactctgaaggtggagtagtgatttttggagaagtgtaaaaacctatctagagtctctaactctaccaggcagattgaatgttaaaatggcctagaaggctactagataattatttagcctatggaaagttctacacagctttttattgggttttgtgccctaactaaaatcctatttcaatgttatcttgaatttcattatcagtaaaggaacaaaattatcttattacttatttagtataatacttggttcacatgtttattccatgatcatatgcttgatatatgacttctattaaatcgttattacattgctattcatgattattgtgttgtctacacagtgaaaaaaaatcaacattatgtgatcaaactaattagtcccatgatttatcaattcacaggatttacaggtttacttacacttgtatagtagaatgccttttccaaggcattgacaaagtaagcttgtattgtgtaatgaccgctttagtaattttggattagtaaaggcaatta

SEQ ID NO: 123790 - DNA, 2095 bp, Cannabis sativa
acaattatgacattcttaacaattagttttataaaacatatcgtttataacataatttacaattagtcactaaattcttaaacaaaaaccacaagaacttaaaataaaactaatatttaaaccacataactctcatctaattaacattaaaatacgtgaaaagattatttataaagtttcattccttattttttttttctatttaaattaacaaagtatatatataatattcaaatgaaaagctaaaacaattatcctaaaaaaaaagtgaagggactaaaaaacgatagagcatggtttaatatttaattcaaatgatttttttcttattttttaagtaaaataataataattttagaaaaattaaatttatcctaaaactttacaatatgagagaaaatattatgtatcatttaatcttataaacataaaataaacaaaatcgctaaaaaataatatgaattaaatattataatatattaaaaattattatttttattaataatttttttctttttttaatatattgaatattgataccaaataaaagaaaagaaatattatcttctctctttcctaacttaccaaacaacataaagatcctcactttcttctttctccttcctaattaatctcatccattcttttctccctccctcttaacatagcctaagatctccctctaaaaaaaatgatttatcatacatgatcctggatatgaatatgatgttctatattttgcattaatgtttagttttataataagctctgctggtggcatttccaaaagaataaaataaaaataaactctgcgaccgtatcaactatcagtatccactagctagctagtgtccacgcttggaacacgtgattagcataataataataatatagtaagagaggagcgcccacaaaaggcgggctccatacccaacaaaaaaaattaataagaaaaaaaggcacaaagctcaacgtagcggtgtgtctgacgagtacttgacccaccaaagcggaactggaatccttgtgctctcttagtctttcaccgcccacagatactaaacccctactcctctcctcttcaattcattattattcctcactccataaataattctgtcttcatttagaatctaataatataacgacaagtcgttttgtctcactacaaccaaccaaccaaccacacgtgggagtatgctactggaccgcttacataaattattttgatttttcaatcttattatttctttaatttcgtttctgctgtatgcaatgaatcctgttagtggtcagtcacagaattcataacttttttagttgcaccaattcatacaaggatatggaccaataagaaatgcaataatttattgaaaaatttatacaatgcaccttttaaaaagaaatttattgatgcactgccgtatttttaaaaaaaaaattaatttaaaattttttatgattatttacataatacatatttagaatattctataaaattttaagaaataaaaaaaaaaattaacgaaaatataattcaaaaagtctattttacacatgtataaagtaaaacatgcttgtgtgtaatagaaatagattgtttaaatttattttcagcgtgtaaattttttttttaatttcttaaagtttttaatttttttaaaaaaattataacgtagacgtagacgattatgattataatataaaaaaaaattagattaaaaaattctctatgatgcgaaaacagatagtggaccccttttagagggtgcactgtagaagcacactaaattattaatattcatacacttttttataagaaaaaaaattatatctaacaataccatgtgaaaattaaaagggaaatgacattatatacttaaaaaaaacataaggtgtttttatatgcttcttaaaaaaatgtaaaaataataccctccaaacatctttaatcccaacaataccctccccatttcaaacccccactctccctcttacaagggctgagcatcggtcggtttggtcgatttttttctataaaaaaatccaaaattcggttttcagtttggattggtgcaatccgaaaaccgaccaa

SEQ ID NO: 123791 - DNA, 2534 bp, Cannabis sativa
attaattttaacatgatgaattaaagtgcatttggtaagagcaaaaattggcaaaaagttgagatagagaccaatagtcttcttgctgttcaggctatccgaagtgatcataatatgtcctctctctttgatttaatcaccaaagactgtcttgagttattgttgtctctaattgatatgttaagttacgttttattaaacgatcagcaaatcgggttgctcatgctattgctaggcatgctcggttttcctctggtgttgtagcatttttgagtataatgtctggcctgatttgaaggctctcttgtattcagaatgtttttaattcaatgaaaatatttcattttcaaaaaaaaaaaaagtgcatttggtaaaattttaattttaaattttttaaatcatatgttagagtagcatgcatcttatatatggtataatttttgtacacattaaattaataatgagagattatatatatttttaatatactatctttacattgggcctaaaaatacaggtaaactatcattaagagactacatagtcgaacgtaatatttgaaagaatctcataaagtcaattaggaaaataatttgtggatttttttaacaagtgaaagagccagcactagaaactagcacatggtggtcgaaagatccaaaatagaggtgaaagggagagataacaaaaacttttaattactttgatatcatgttagaatttagaagtttgtggttatgtaaggtgcatgatgttttatatataattgtcaatgagagaagtaacacatgtatcttattatttccacatattaacaaggattatttttaataccataaaaatatataaaaaaaaatcattttggattaccacttactctgagaagctttgggagctgcagttgcactcactacatggtgaagcagattgagcaggatattgtgtgcatatgaaggagtagggtcacttgttggcagcccataatcaaattaatggacaggtgtcatgatagaatttggtgagtacccaagtgttgcttgaaattgcacaataggcatgccactcgtttgggagcagtaggaaacgtgatacttgggaattacactctgaaagcatacctagggcctttggtaggatagtatcccctgaaagtcattatttgtgcttcttccaagttgatatacttttggactctattctggaaaattgaaggctagctggaccttcctattgaattcattctataacagagttcccgttcggattccaacttgcagtagagctaattgttattcgtcatctacttttttagtcttggaagcctcctcgttaaacctcttgatgaagctcttcaagatttccattggtagttgcttgatatagtcaaggcactaacttcaatttatctttctcgttgcaacaaattattttttaaaattaatttgcaatttattattccaacaatctacagatcttggaattttttgaaccattcttttgtagatcctcccaatgtcagtaagaaacataggcatttggcatcattgctgatcctcatgactgtcatgactttgttaaatctaaccaggtgatcacttggattcgtgtcacccgtgtacatagccatttcacgcatttaaatttttttgggagttcggcctctagtatgtttcttgcatagggctcccgatcctcattgtatgatttcgagtcatctcatttctaccaaagggagatccttgctatgtccttccgaaggatagcaagtttggccaggactccttcattcaagatacccctagagactggcacaactttttttctttggtcaaggcgtgcccttaggtctccatgtttggaattgagcttcgtaaatcgacagggtgatctttcctggcagaccccttctgttttcttggctcttgatgcacggatacactccttcgatctccacggtcctagggctagttttccctatgggaaatctacccctttgcgaacccttccctttcgggagatcaaaacaaagtttttgtggatcatgggccttcttgctcttcccaggcacaaccttagggttttcctccaatggagacctttttagagtgttgaaaataaaaaatcaccacaacagaattggatgagaggataggcaaaacagaatatgatgaggaccaccaccacaacagctagcattgtaatggaatattcatactattaggatagctgtatttcagttacacatttttccaattatgtgggatatttttatttttctatacgattgtatattctgctattgatttctcttttattccttttatatcctattttactctatataaatagcaacatttactctgaaattaatacatgctctaattcaatcccatataatatttcctagtttttctctatctttgtaggatcatgatgaagtcaatccttttgaagttgccacataccatgtgtaacgtcctcgcttcaagcctccattgggtccttacacctacggaatgaatggctcttataca

SEQ ID NO: 123792 - DNA, 830 bp, Cannabis sativa
ggattggatcggatgatgattttccaaatccaattactaattagattggatcggatggaaaaaaaagattggattggatcggatgcccacccctattattgggtacaactgatttttggatatttttaagagttattttttaaattatatgtacatattattttaaaatacatatatttttatctatataaattatttgtgggcaactctaaaaataattctctatgatctcctactactttttaattaaattttataattatatatactctcaaaaaactagttggtaataaagtatttttttttcaaaataaacaaataaataatatcacatgactattatttattttggacaatatatattattcataaaattggtttgaaatattgtctaaaatacacgtgtggtaaagaccattctatagacaactcttattgaagatgctttaatactacgcattgtagtgtagtagtaagaattgtctttactgacatctttctttggtaggttaagggttcgaaatccacttacaatccctcttgaaagggatttgcttggcccttgaaggcttaaagtttatttacaaatgacccaattaagaataactgaggtaatttactcaaacacactcatctttatttaaaatgagttccgcctattaaaagtgagttgccacataagtgtttcatatttgtgtgtaatttatatatgcatattattatggctaattaggaattttttttcttcgaattttaacatatactaaattatgccccctgaacttttaaggtcgttaaaaatttcccctaaactattgaaattgttaaat

SEQ ID NO: 123793 - DNA, 1309 bp, Cannabis sativa
  modified_base (837)..(837): a, c, t, g, unknown or other
ctcatgcaaagaggaagctcacgcttaaaagcatcgatttttctcttttcttcttcaaaccttttcacataatcatcgagctttgataatttctcagacccatctctgattttcgaaacgtgttcgagaaactcagaaatggttttgggaacgaaggctaatcctgaattattattcaagctcagttccataattttgatctctgtaactcgttctcaaacattccaaaaaaaaaaataataataataaagaaaaacaacaaaaaaaaaaatattgataagaagtaaacagcggtggttttatacagatgaggaaaatagggaagggattatagatagattcaagacaggaagattccacaatttcacaatcgtttcgtcgcgtaaattgagtcaactcggaaaaactcgttcttaacccaatcgttagtaaaaggcggaatctttggattccgtactgtcttgggcaaaaaggtaatttcgtaattataacttttaccatttatttaattatttgtgttggcttattgaagaatcaagattcttgattgttaggtgggcaaaagagaatcgctggcttaaagtgactgaaaagtcgttgacctacgcgtatttatgtgaaaccgttgagggtagtttggtcattcaagacttatttggtgttttttaagagaaattttattagatgattttaccatgcacctccttaaaagggatgtactgaaacactctctacttgtttcggcatccagaaaaaattttaatctaatttttttttcatattcatatgtgttatagctaattaagatatcgtacaaaattttaaaaaattcagaanaatttataatataaaaaataatgttcaaacaggctattttacacgcatataaaataaaatagtcacgcattcaacacactgcttgaacacaatttttggcgtgttaaacttttttgaatttctcaaaattttgcaggatgtcttaaataagcataatttacatgccaatgagaaaaaattggactaaaaaattatttcggatactaaaatagatagaattgtaccactgtattccttttaagggggtgcattatagaatttctcaattttatttacacccaaaaaaattttaaagattttttattttatataaatttatatctttaattttataaagttttttttaatttgtttcttttaatttatattcataaaaaatatacctataaaaaattatattttaaatattatgacaaaaaaatttaaataaaaaattatatgaaattttcttagaaaaatatatatatatata

SEQ ID NO: 123794 - DNA, 2295 bp, Cannabis sativa
aaatatgacccgaaacttagactaattttagcctaacaatcagctaatgtggtagctcataactttgcaagagcttctatattatttcctagtcgtcactttggtatggattatgttcctaccgaatttttacgtttttggtaacagattatgttggttaataaaaattattattttccattcaaaaaaaagaataatagtttgaaatagttatagtgtgaatagtaaaaaaaaatgaaaaagatagagaaaaaatagaagaagtgtttgtattttatttattttttaaaaaaataataaaataaaatttgtgagataatgcaaaagtgttaaaaaaatgagatataaaatgtacatttattatatatatttatattcagattatgggtgcacccttaatgggtattacccattcatgggtagtattatgaaaatttgagtttttatgcttagtttttctatctaattgaaaaaatctcttatttttacattatatgagttgagattgttccatcagctgaaaaaaaaattaagaaaaaaagtttttcggcaaaaaaaagttgaatttgacttaagtattttgtatataaacatatttttcatatagtgtaaaaagtaatatttttcgatattttttttattaagtagttaaattaagcatcgaaattcaaattttctttttattattcgtcgttggatcaaaatctaaaagcttaatatttttaaaattaatatttatagttaaattgtttagtaaccatcaatgggtaatactcattaagaagtgttccatgtttatatatataaagataaaaaaaaattagtttgagaaaaaaaaaatatatatatatatatatagagagagagagaggaggtcatcaactaacttaaaaaaagtcagccaaaattgactataaaaaaagatataaagaagagaaaaaagataaatttttgaagttttaattagtaaaaaaattgtagaaaagaagtaggaaaattataaatgtaaaaattattttgttaaagtataaatgtaaaatttaaagataaattattatttggtgtaaatacctaaatagcagctgtaatccaatggctaatataatatagaagaaaaggcacttagataatgaaatatattagaatagagattgtttcgccgtgttttcagttttcagaatttgttttcaaaagagaaaacagaaaataattttttgtcattttaaaaatttaatggtgtttggcataagttttttaaaactatttttatattttttcttactaaaaaagttcaatattttacaccataccatgacatgaatccatcctaccccagtcccgacctgaacctggaccccgactcgaacccaaactcagacccggacttggacctagaccagaccctggacctagacccgaacccagaccctagacctaaacccaaacttggaccccagacccgaacccaaacctggacctcggaccccgacttggacctagacaccgaaccctggacctagacccagacctcagacttggacccagaccctggatccaaactcggacccagaccccaaaccttagacccagaccccgaacccgaacctcgacccaaaccctaatcccagacccagacccaaacccaaacctagatcccaaacctagggctaggttcgaggtccttggttgggtttgggttcgaggtctgtgtccaggtcaaggtttggggactgagttcaggtctaaggtctagtatccgggttggggtcggggtctaggtttgagtttagggtctgggtctgggtccagggtctgggtccagggtctggggtccagttcggggtctagtgttcgagtctagggactgggtctagggaccgagtccagttccaaggtttgggtctagggtccaagtatgtgagcaaaaatataaaatataatatgttagaaaaaaaattattttgaaaattaaaaataatattttgatgttctctgtattctagttttttaaaatttagctaaacgttctctattaacttttacaaaatattttttttaaaaaaaaaaaaaaaactgaaatagttttaaaagtaaaaactgaaaataatttttaagatatgaaactaattaaacaatctctaatttaatattccgaatgttttattattttagcttatctattgaagttacttattttcaaaaagaaaagaagatgtttttcaaaaaaaaaaaaaaaaaataagaagatgttttgtactgaattatatagaaaagaagatgttttgtactgaatta

SEQ ID NO: 123795 - DNA, 906 bp, Cannabis sativa
tttattattaatttatctaacatggaaaccacttgatgctagctcaagtggccataagagagtgcgtgtgtgttggaggtcttgagttcgagtccccgattatgcatggttgtaatatgtaaacgtttaaatcaaaaaaaaaaaaaaaaaaatacttcacttggtttgaagtttaattttgtaatttttttctctataatataaagattgaactattttagctcatctattgggagtgctctaatattagctatatatttatattttatatataaataattggacttaattaaattaacttcttaattaattagttaaatatttctttgacgtcatgaccttttgaaatgctgaggtttgcttgctttgttttagacagccataaatttaggaatgtataaaccacaaatatcttgtggatggaaaagtcacatgcatgtttatatatgtagggggccatttttacgtactatttagtttgtctcaaagagatcgatgtcgttgtcgtccttcaatgttgctatcattgtcaccatcattgtcgtgtcccctcggtgactccacttccactgccatttgagtcttctctgtatcgtcgttatcatggagaggaagagagcaagagaggatgatgggcgctggtggccgaagaggtggcgggggctgctgctgggttgtttgtacaggaaggagagaaagagaaagagagggataggcaggagtgttctcgggctaaactaagaaaaaaaatatataatattgtagggtttcttaaagagatttttacgaaaaaatactggattttaggtcaaagtttacaattttattgccagatttttttttttaaaatactgtctttttataaaacaaccgtaaaacaataaaacaggacaattaaaaataaca

SEQ ID NO: 123796 - DNA, 789 bp, Cannabis sativa
tttgaaaatgcctagcttggatctggttgtcacttgatgcttgttggaccttcctggtgcatttaaacagccagctacaagaggcaaggcagcaggagaagagcaaattggtggaggtctagaatcaggtgctataatagagtcaagtgctataccatctggtgtagaagcaggtgctataccatctggtgtagaatctggtgtagcaatttgtgtgttggttcttaaagcttcatcacattcaataccctgagaagttgcatgaccagtaacctcttcacgaatattgtctctactccctgaagtgacatctacaacacagagagaagaagtacctgcaaccggttgcacctgaactggaaactgattgttagaaggacaaaaatccatggaaacattaggtacagatgtattgtcacataaagcatgttggtcaactgtaagaggattatttaaggcatgtcaagagtgaccaacagtaggtaagaaagcagcaggggtctgattgcttggttcagtgagatctctcatggtatattggtgtttgtaatgagcacacacaggaatcaaggcagaaataatagatggtgtctcagttgaatcttgaggagcagtagatttaggagattgctcatatgggaaagagaactcatcaaaaataacatctctagagatgtataaccttcctttagagtctagacacttatagcccttgtgattcaagctatatcccaaaaaggtacaaggtgaagacctaaactctaacttgtgtttattgtaaggtctaat

SEQ ID NO: 123797 - DNA, 2492 bp, Cannabis sativa
  modified_base (78)..(83): a, c, t, g, unknown or other
  modified_base (528)..(537): a, c, t, g, unknown or other
  modified_base (1560)..(1577): a, c, t, g, unknown or other
  modified_base (1711)..(1716): a, c, t, g, unknown or other
  modified_base (2077)..(2081): a, c, t, g, unknown or other
atatgcatctaagcccaaaagcaaacatataggctcatacaggtcaaattgatttggatgggccctatcatgtttctnnnnnnacacagatgaaagaaatacaaaatgtatctgttaagatatatttataagatctattgataatttgactatgattaaaatcagatcattagatttgtcaacaagttaatcatagcaatttagataaaataaataataggtttgttaaaaaatatttttgaataaacaatttaaataaaacaaacaatatctatgtaacaaattgtgaagtaagatattaatgtaattaaattattattttaactaaccaactcttttgaaaatttaaggttgtgaaaaacaacctaaaatatctttttaaaatttaaatttttaaactaattttaaaatatataggttttagttgaattattttttgtcaaattaaattaaatatctaataagataaattatttgaaaataaccaaacaaatattttcaatattattttctaatcttataatttannnnnnnnnnaataacaaaataaactaattttaaaataaatatggttaggtaattattattttaagaataaaataaaaaaactaataataattattcaaattatatgtcaaaatatttcaaattaagcttttttcaaatttttacaaaaatatatgggttatttaaatattttaaatattatttataaatgtctgataagtaaaatgatataaaatatcatttttctaagttataatttataaacaataaaatatttaataaaataacaaatttatgaatttgaagatattatggttagaatacttataaatgctatcttttaatttaaaatatgtcaaatattaaaatatataatcttataattaaataatatataaatattaaagaaattaataattttaaaatgtgaccataattataataaaataatcaattttgaatttaaacctcaaaatatcaaagaactaataatatctattaaaaaataaaacattattaattttaaaaatttgatattttatgtttaaatattcaaattaatattttattttgatatttattaatttgaagaaaaaaaatcgaaattgcgtgaaaaaatcacccaaaaatcaattttgggttgaaaatttggttgctacccaggacaggttgccggcagcctcatgcgcgcgctcatgagggagattgcagcctccctgatcgagttttctcagtcgtgtacaacatgtctgcgctcgggacttgggcttgattctgtttgagcgtgcttgggagcgagttcagacaaggtgatgtctgaggcatgcacgcgcgcacgagcaacttgtccaagtgactagagcgtgcgacgtgcacccctcgacacaccttgcaccaatttttaaaccaccataactttctcattatttatcggaatcgagttccgtaaaagccaaagttgcttaatttttcacaaggaatccaaataaattattgtcagaaagaaaataaatttattttcatggaaaaatttcgtaaatcacatacattcannnnnnnnnnnnnnnnnnaacatgaacacatccaaatcaatacaattaacaatattcatcgttttaaatccatattacatgaaagtaaatcattactatggctctgaggccatttttgggaatattttactaggatctaaatttactaacannnnnnttgattaacatcctaaatatgaaacacccaaaacaacaatttgagaagtgaaattgatcacttcaggtacctagatccactaaactccagcaattagtgcgatctatctcctatcaacacattgccaacatcaatcaactgaggagtcgtgggtggacagactctaccttatgcagttctagctagccatggaggagtattgggcagccaggccctgcccaatgcaggtctggctagccatggacgactgtctagtgtaggcctggccaactagagccaacacccatgcttgggagtgttcagccagggtctgtaattcaacacaggtctagccaaccttctgttgggaatattttaccannnnntagatttactaacaagtatgctgattaacatcctaaatattaatatctctaaaataatgaaattaaagacataagagttttagaaaaccttacattgattgcagcggaatattaatgactccttccataaatagatctctaacccttgttcctttatgtcgcagagtattatcaagatctgagcttggatctctttctctcctttgggttggttacccatgtcttccgcactatgattgagtacttgacttgctatttgtgggcatggcactctatcgctatgggctcactatgaagaacaatgaacgaggctcgaaaatcactatagaaggtgtcttttatctactagttgtctgacagagttataaactagattttggcaagttgaaagtgttggatgagatgagagca

SEQ ID NO: 123798 - DNA, 2006 bp, Cannabis sativa
  modified_base (39)..(45): a, c, t, g, unknown or other
aatcatgtgaaccaggcaacataaaatgttatttctgannnnnnntaataagtaaatctgattttattgaaatggtttttatttagggcacaaaacccaacattctcaaccacacattctgcttctgtcatctttcgctccaatcttgaccccgatggtacaacagccgacttcccttccctccaaaactcttcatttcttggtggtaactttccttatattggacatcaaggccaagtgccttttagtgataactcattgtttactgctaatcacggcttacctcgtgccattcttgatcgaccttcccatgatgaacgtactccgtatcatctaggagctagagatcacccaaataacctcattcatttctcttgattggtcaagaaaatttccagtcatggaagtgtgcagcctctattaacatcgttgccaaaaataaaagtttcttcattgaaggcaccatacctcgtccgcctccaaatgatccttctcgctccacgtgggacatttgcaacaacatggttatgtcatggattcttcagtttgtatctcgcgagatcgctgctagtatcatgttcaaaaccactgcttgtgagatgtggacaaacctcaaggattgctttaatcaaagcaatggcccccacatcttacaactcaaaacctctattggcaatgttaaacagggtgataactcggtcaccacctatttcacccaattgcaagctctttggcatgagctcaatgagtacgaaccaaatatcccctgcacctatggctgtacttgcggtacgatgcaaaaagttcaagattattacacaagaaccagatcattcagttctttattagtctcaatgagtctttttagggtattcgggctcagattatactctatgatccattcccctcactgtccaaggtgttctccatggtttttcaacaagagcgccaatgctgtcttggcaatactagcgttgttgctgctactttggccaaaaaaatcccaaacaactatatcggagtaagaaaccacagccaacttgttctaactgccttaaactcggtcaccttgttgataaatgctacttcctccacgattttcctcccgaatatggagacaggaaaaagaccaccaccactgcttgggaaaatcatgcctcggtgactcccactccaaacccctttggaactagctcttcccaacttcagctcagccaacaactgatctccctactcaatcaacaaatccaaggcactccttccaccagtgaaaatctccctgtggtttctaacgtcttcggtaatgacaattttttcctctttttttacggattgtagatagtggtgcaactcatcacatatgtcactctctttattgctttaaatctttaaacaaaaataatgttgctaacttggttacattacctaatggtcattagattcatatcaacaaatctgaaaccgttaaaatttctgaccaacttgtcttaacgattgtcttgtatattcctaaattcaaattcaatttattttctattaatgcttatcttgaacattgtgttaataaacttactttcacttttgaccagtgtttgatttagaatccctccctgactactacgattgggacatctaagaaagttggacaactatttttctttgaataggatcatcatcttcatactacgaatatttctgtttttgcaaacaatacatgtaatttgaaggaccccttgcattttcgccctcgtcatcctcctatgaacatttctactatcttaaataatcatttgcaattttgtgaaaacctttcaattttatgtgttctatatgtcattttgccaaacaaaagcgacttccattacatctaacaataatttttcaacttctgcttttgatttaatagatcttgatatatggggtccttttcatgttactagtattgaaggttaccgatatttcttaactattgttgatgattattctcgctatacttgggtgtacat

SEQ ID NO: 123799 - DNA, 727 bp, Cannabis sativa
tcattaaaacctcaaaagaaatatctcaaagagtaaaaaaaaaataaagtaccaaatctcattgataattagaataatagtttcgataagaaggataaaggtcatcacggaagaaatgactcactgactaactaatactaatataataaaaaagaactgtcttttctgtatactttccgcggttctgttgctaccgtgggttttacgcaatcgatcgaatcatataaaatgatacctttcacaataatacctaaatgagaatcaacacaacatttaataattatagcattaaaaactcatagacaagcagattcaatgatcaattcaggtatctcattctcaaacaaagatgcaatctttggagaatgacaaaagcattttgccacataactagaataagtggttgaggagggccacacaatcgaaaagataatctttcctatcatggtcacacaatatagctctgattcctatcttgtacggtcactcagacagatgactgtatcagtgttgaatttcaaatgcttcgataagtggtggatcccaagttagagaaaaatagacacgactgtggacagcagtggatctcgttccttataattgacctggccacatcgttcccaataattaaaggcccaagtcgttaatataagaatattttatttaaggaaatatatttctatttaaagaaataaatttctatttaaggaaataaataaataaatga

SEQ ID NO: 123800 - DNA, 1685 bp, Cannabis sativa
  modified_base (360)..(362): a, c, t, g, unknown or other
  modified_base (720)..(725): a, c, t, g, unknown or other
tttttttatttggactgtatatttgtttatttggctaattgaaagtatttttataatattgttgcttttattggttaaaactgaaaaaaaccctttataattttgtctttatttgtgtatatatatattaatattagtatttatatttctatttaagatatattatttatttatttctattttatttaaattcagtctttatttacgctcttatatagtaggcattgcctcctaattttttccattattttaatttttgtaatacttggtgtatgattcactgagaatgaaattctaaaaatcgtttggtaaaaaaattatcatgggttgaaattaaaattgaaaattctgacatcatgnnnccaaatcaagtaaatgtggaagaaaaaactcttattgatcattcttctctcgtttttgctaatcctccatcatgcattgtttttcttaaaacaaatgctacacattttgagctgaaaccttttatgattcaactttttcaatctttttatgggttagaaagagaagatccatacatgcgtgtgaaagatcttttcgaaatttgttctacttttaaattttaaaatttttccgatgaatttgttaggtttagacttttttcattctcattaaaagataagtctaaaacctatttaaattctctcctagcccgatcaattgctacttgggaccaattagttaataaatttttggccaaannnnnntccatgtctaaaacgaataatatttggatacaaattttcgaattttatcaaaaagatcacgaagaatttatgaatgttgagaaagatttaaagatttaaatataaaatgtcgataccatggttttgaaaatgggagattggtgaaatacttttataattgattatctccttcaaactgtcaaatggtataatcaatgcacactgaaaaaaatttacaatttaaggggaagaggcttgagagtctcttgagaatcaaactgtaaattcttaatagtggaattgccaagatccttgatcaaaagattccaacacacctaagagaggtagaatttacgatgccaaaaatgatgtagatttaaacacttcattagcaaatctaactgggagagttgaagctatgtcattaagtcaatccatgaatactcctatacacatgaatgaagttttttctctgtgttatggtacaagtcataatgctcagtcctgtccatcattacctatataccaagaggcattctttgaagaagtcaacactcttcaagcttatgagaaatcatctgatagcctcttttctcaatcctacaatccaaattggagaaatcatctaaatttctcttggagacagaaccaacctccaatgaatcaaggacaccaatacaactcacccaatcagagtcatccctaatctaatatgtcatattctcaacaacaaagaaaactatctttagaggataccctacaacagttcatgaaaaccacccaacaagctttacacacaagttctcaatccatgttaaggcttgagacacaaattggtcagcttgctaatgctgtagctgaaaggaaaaagggaaaacttcctagtgaacccattcccaatccaaagagtcagtacgaggtaagtacatctagacctactgaagaagctaaatcaatttctatccttaggtctagaaaaat

SEQ ID NO: 123801 - DNA, 2185 bp, Cannabis sativa
tttttttagttaatgatatatatatagataaatacagatggcttgggttatataatttagttctaaatctcaattaatttttaattaataaaaaattaaaacaaataaagtcaaaaaacaaaaaacgtgtgatgaaagatttggaataatttttttttaaaaaaataataaataaaaaataagagaactaaagaaaaaaaaaatagaggtatatattttatatcaattaaatatttatgaaactaataaaaaattaaaaaaatgagataattaaggatagaacaaataatactttttgagagattgtagagtgtcatgccacttcttcaaatctctcatttatatatttatatagatagattattaaaataatataaaattattaatttgtaaatttatgttaatataaaattattaatttgtaaatttatgttctaataaaatattaaaaatgagagaataaagaagagaagagaaaaataattttggagaaattttagagtgtcatgtcaccgtctcatatctcttctatatatagatattatttttaagatctaaagacgacaataatcctttaatcatacatcatcaaaaataaaaataaaaatcaattacttatgagttatgagatttttttttaaaaatatatatatatatatatatatttatatgaattgtgaaaataaagaaattaaaataataattatttatctcacttgttacattttattgataaatttgaagttataatttatttaaaaataaatttaaaaaaataatagaattaaggaaaaaaaataaataaaggtatatatttaatattaattattatttaaaaagttaataaaaaattaaaaaaaaaatgagagagataaggagagaataaataaggttaattagagaaattttagaccgtcacgttactgcctcatacttctcttttatggtttagagtttagggtttattattttttttttcaatttttaaaataaaaaattaaagtgtgttctgtaaattttattttcatttgttgattttatttaagtcatatccggagcggggtccgaggtcgggacttggggcgagtccaagttcagggccggggtcgagttcggtttccaagatctaagttggggtcggagttcaaaatattgattaaaaaaatctgtttaaaaaatgttaaaagtgttttttttttttgtttttgaaatctagattcttaattaaaaatttaaaaagtaaaaacagttttatagaacatgattttagaaaatattttttctttttctaattttaaaaataaaaaactgattaaataagtattaccaaacacttcctaaataaatagttccattaataatagaaataataaactcttatgatttcaaaatggggtatataatataatgagtaatatataattaatatgtcaatatttactattgcactccatgtcaattaaaaaaacaaaaaaaaaaaaaatatcattgtatttttaaaaaatgtgtccaaaaaaaactaaatgtatgtatctacatgtacaaagcaacacacatataaaaaaaaaaattatcacgaataaactaaaaatatacacaataaaaaatacacatgaataaaaaaaataactgaaaaataattgttcaaaaaaaattatggaaactatttaaaaacaactaaaaaataacataaaaatagcaaaacaagatgcacatacacacaacaaaaatattacctggaataaactgaaaatatacacgataaaaatgtgcataaactaaacgaaaactgtacttaaaaaatacataaaagcaactatagaatacatacacaacaacataaaaataactataaaataataaaaatacaactataaattaataaaaaaataagacaccaatcttgttaaaatatgcaaattattcaaatattaactctaaataaactacactataaattcaaaaaaaaaaaatatactacattttattaattatgtaaaagatagcaaaataaaggagactgctcttatttatttatttatttatttttgagagagagagagagagagttaaaataaatttgagagaaatgataaaagtaaaaaaaaaaaaaattatattttagtaaaagttaaaagaaattaattaagattttcttataaaatatgattaattaaagaaaaat

SEQ ID NO: 123802 - DNA, 1185 bp, Cannabis sativa
gggcataaaacccaacacactcaccggtacaatttgatcaaaatcatcagtggagaccaccacttcattaccatttgcacaagcctacttaagcatactttgaattaaattaccaatagtgccatcttgtcaagtgtaggctctcttagttccagagacaccccaagaggccaaggcctacaaggaaggccagatggggaggaaacggggagctgcaccccttttcctttatcaacatggacgatgaccggaggctcattcatggtgacatgagaaacgacacaaagaatgctttaaaaaccactaacaagagagcgagaactagccataacctcatgggacacaacagagactatactagaaggttgtccttcatcccgagtatgagtcaccataacttcctgagaactaaccaagccagtagtaggaagaaactagtttacaacatcagtaagatcatgattttgatggtatgacctcaggttcatctcttcaaaggggatggaattggccatatcaaacgggtctcgtttgaagaaagacttaggaagggccctaatgttatccttaaaaggcagcacaggaggaacacgaccctcatcacagtgtttaaggaaacgaccacatttagaaaaaatatgatcaaatctcccgcagaaataacaataattttggagaccctcaaacttaaaattaagccacttagtcctacccagcttcctaaagaaaacatgcatgcctctacgaataggctaggtaatgtcgaataacacacgaattcgaaggaagggacccaaaatttcaagcagagtaactttatgaatttcaataccaacatcttcaacaacaaactcagcaaggtcagaggatctaaaaccgaaagggatagaatgcacttgcatccaaaaggcaacaaacctaagttggtcaggctgaaggatatcaagaccttcaggattagcaaagaccattaagcagtgatcgaaatgcaaaggttggccctcaataaccctacgcctatccctgtcacacccaaaatgtgcaagaaagagcccagaatgatactcagaaaagttgatagggaatcgaacactacaagaaatgtcacttttaccaacacagttcgctactgcgctggtaaaagtaattttaccaatgcatttcgcaaactgcgctggtaaaagt

SEQ ID NO: 123803 - DNA, 751 bp, Cannabis sativa
  modified_base (294)..(297): a, c, t, g, unknown or other
atctattcactctccctttatgatggcatgacacgtggtttggtgtggtgatgcgctcttactctctttgtctttatttttatacctaagtttaatttttggctgtaataatacttaagctataattctgaaatttttgtaggtacttaactgttaagtgttaagtaaattatcacgtgaccattcttgattggtccaagtcattaaagttttattttttaaaaaaaattaatttaaatataccaataagaaattgacacgtggataatgacttaatatttaacggttaggtannnncagagttccaaaaatataacttaactattattaccgctaaaaattaaatttagatatttatttgtaactgggagttaaacttaactatttataccgcaaattactcttatttatataaactctgctaacaagaacttgactatatttagtgttttttggtacgccttcgtgaattgtatatattaaagagtaatttgctgaataatttctttaagtggtcaggtttttgtaactaaacctcaattctaaaattttggtagcaacactccttaaacttgtgttctgttagccgtttaacatttccatccatttttagttgttaattgtcatggtggaatgtctacgtagacatagtgcacacgtgacacaattttattggttcacgtaaataaatatttaaaaaaataaaaaattaattattttaaaaataaaaaattttctttttctttaaaaa

SEQ ID NO: 123804 - DNA, 2694 bp, Cannabis sativa
tgtattttgatatattttgtataaaagtttaaaaaacgggatcccgacacttttaaatagttttgtaaattataaagtttaatatttattataaaagttttaatttgacatgtttttcgaggaaaaaactttgattagcaaggataacactgtaattgaaaaagcacggtagcgtgacttaggatttgggtgttacaagtgtattcttataattttatgatttatttttattttaaattaatttattataatttactttttcattttaaattaatttattatacttttttatttttaaatattaatttacgtggactaattaaattgtgtcatgtgtatattgtgtccatgtggacaatacaatgtgtacacatggtagttaaacatgccagttgacatgaaaaaataaatgaaaatactaaactgctaacagaatatgggttttgggagttttgccatcaaaatttgagttttgggggttaatcactaaaaaaagtgatagtataggggttatgccacaatttagacatcataaataacactatgttagataagcaatatattgtattaattattacatctaataattttaatataatataagttgtattatttaatacgtaacaaatgatctgtattagcttgtattataatatttacaaagatccggggtcaaccccaatctccgacctagatcaggaccgagacctgtaccgggaccgaaacctgaaactggaaccaacccaaacccagacccagaactagactcggaccctgaatcgggacctaggacctggacctcagacccctgacccgaacccggacccaaacctgggacctggacctaggactcaaacttggacccagaattgaacctcggacacggcatctgggacctaggattgggacccagacccaggccttgaccaaggctcaggacccagacctcgaaatctgcactcagaccagacacggacatgacctagagtcggtgttgggtcgagtttattagaaatatactataactttacacaacctattaatacaagtcaatatcaaacatactattgtattaaataacactaatacaatgtaatacgatccaacacaatataatacaatacgacataccaaacgagcctatattatcgagatttttgcaaaaaaaatatccaaaaaaaaaacaatatcggccatgaatataaaaaaataaacttattttgtttgcaaaataattttaaattgaaatgtccatagagtatcataggggtatccatagagaatcgagggttcatagcatatcaaggggtatcacgtttgcagtagattttttttaaaaataattattatgaaaaatagcatatataaaaagaaaagtactatatatttatatatattttgttaacatcttatatattaagcttatgtatgatacaatcagggccggccctggacctaggcggactaggcccatgcctagggcccactccaatccagggcccaaaaccagccagctatttaaccctttaaaaaaaatagacccacaacacccatttcctccagcggcccagcctagcccaatcacccacttcctcagcccgtccaaattccaaccacatatttattgacgtgaaaaaaaaaaaaaaaactgaaaagtcactctcatctctctctctcactctctctcaagtctcaatctcaatattccattctttcccaccaagctccaccaaccctccctctttctctaaaattctttctcttctcaagactctaattttccaatatctcaaaaaaaaaaatcacatttacaatttacaatttaccaactatcctaatcctcctcatcctcaattctcaatccacatcactcatcaactatcaatatacaatattataagaaaaaagcattcttttcaatttctatctccttgtattgtaatggtaagcttttaattttttaaagttaatattttattaatttttatgatcaattgctatatttatttaaagtaaaaattattgacatattatttaaattaaaaattatttacttgttgttatttacttattatcttgtagtacattgtcatcatatatttttatatattagtaggaaagtgttagtgggtgggcttcttaattaattaatttcctttttaattattattttgtttgctttgaaattttcgtaatagtatagcgttttgtgtattttagtatttatatattgttattgttgttgttgatgttgtataaatattagagataaactaaaatgaatattgaattttattttcctagctcaatttcactattgattcactcatagtcacaaatcaattcacataaaaaaatgatcaccatttgattttcattgtattgctcatatattgatatagatattttattttatttgcaaaagaaaaaaaaaactcctttttagtagttcccttttatttctagagttatgtgacttatatcttgtattttttttttttatgattttgatataccatatattttgctatatcatatattttgtaataataagataaacattgtcttttctatgtcatatttttgtactcatatcattaattttgtttgcaatttttatagggtcctattagaaattacaaatacaaatcaggagctcaaaaaagaaaagaaaaattaaggaaagaagtcttg

SEQ ID NO: 123805 - DNA, 737 bp, Cannabis sativa
attattaaaaccatgaaatacttaatttatattaattatatatgcataaataaaggctaaaaatgcacaaatttgagccttaatcagggcacaaaataaatcagatagtaataatatttgaaatatacacaaaataataaacatatttgagtttttcttaacacgattgcgagttctccggcaaaattattgataaaaatagaaaaatttgcgacataaataccatatgttttcaattttacacttaaatactatatttttttttggcgaatttaataccaaactttgtattttaggtcactccgttactactattctgttagttgtgactaggtgtacacgtgtaaggccagattaaatccctatttttttttaaatatttaattgaaattaaaaacttaacttaaaaatattttaatgaattaaaataaaaaaaaaaaattaaaaaggtaatacgatagggttgaaacaaataaccctaaatcttatccctcttctccctgctgccttcttcaaaaaaaaaaaataaaaaaaattacagtcggtatcggttgaaacaaacccagaaaccaactccaaaccaactctaaattcctccgaccttcctgtgtttttttttttggttcgaagaacacacaagagagaagatgaaagagcctctaacatagaaagtatggtgcaataattgcacgttacagtggtgcaataattttggatgttgaaaggagcctctaaca

SEQ ID NO: 123806 - DNA, 1715 bp, Cannabis sativa
  modified_base (1342)..(1359): a, c, t, g, unknown or other
attctttttcatctctagaatatccatgacttctttgaatcatagtttttccagaggtaaactttaattccacatcaccagtatcagcaacaattgtaatgtgagagtcgcctagcaacactttcttatcctcagtcgtagcaatgtatgtcttaaacataacactatcatagcagacatggcgagaagtgccagtgtctacccaccacccttctgatccaccaattaggttgatctctaaaattatagctgtataagacaactcttcaatcaaattagcatggggatcagaactagacctgttccgatacttatgtgccatatgacctggtttgttacaaataaagcacaaaaatggtcttgggtcattcttattattagggggtcgctcctgtttttttggttccttggaacacaattttgattattattttgagaaaaattgttgcgctttggagcatacttgcgattttgattcttgacatttttcctaacgggtttcaaaatcgcaatggatttcttaaagttgttgtttgaaacaacaagcacttcttcttcctgatcttctttgcgagcctcttcttcctcaatgcgaaggcgagtgataagactttctaaaaaaaaaattttgttttgtgcctgagattatttttaaaatctttccaaccagaaggcaattttgaaataataacagtaatttagaattgttcatctaaaacataccttcaaaattatttcatgagtaattttttaaagttcatgagactgagcctccactgacttatcgttagtcatttggaatttgaggaaggggctgacagtgtactccttagttccagcctcctcaatgtcgtatttccttttaagtgcgtcccaaatttccttggtaatttttccagagttgtagtagtcatacaaatcaacagaataaaccattcacaataaattttttgcataaaaaatcattctcgaccaagcttgctaaatcagtagtttgcttctacttttcatcatccttagcaatatcacaaacaacaagtttatcagtagtcagaacataaacaacttttttcatattgaggaaaaataatattttttgtctccatcttttaaaatggtttccttcaaaacgaaaaggtatattaatatcaacaacaccagaattctgatcggttttcatagcaaaaatagatcgtcttaaaattattggaatggatgtggtagaaaataaagaggaacaaaattaccaaataaaaatttgggttgagtcgaggacttggtcgctctctttaagactgttacgaaatttatgaacagtacgcaagtgcacgtaatcaagtannnnnnnnnnnnnnnnnnggtcgaaccacagggaattggattgaataacactagactaaatttatgattctatttggcaaactaatatttttcaagattagaacagaataaaaattcaagaagcttaagtagacaaatagaaattaatcaaaatgagaggatatggaagagaatcctgttgatatgtttacccaattgttaacgtctaattactatcccatttcctgttgtgaaagacagattatacacgttaacctaggtctaatcagatcttctaggttctaaatcacatgctctctaaataatctcttagttataatcacatgaaatcagcattaagcaataatctaaattgtcacataagtcatgcaaat

SEQ ID NO: 123807 - DNA, 581 bp, Cannabis sativa
atattattcttaaataataataaaaagagagagaaaatattattttaatataaaataatatttattttaattttaatgaaataagagataaatgaaaattaattaattattatttgttggtaaaataaataataaatcttatttgtggtaaaattgataaattaattttaggcacgtgcaagggacatgtaaaagtccatttagtttttatttgattattttatttacaaaataaaattatttaaaatgataattaccttttaattatttatattaaatatattataggataatttatttaaattaaaatataatataaaataataaagtatataactgaatacagttattcagttgtatgatatttattttgaatttcaaattaaaataatattatttttttatagaaataaaagaattttaatttattattatatatatgatatatatatatacatattaactaactaatatataaatatatatgtatatgatataccagaaaaaatataacgtaatgttttagagattagtttttacattctctctcaaaccctagacgccactctctctctctctct

SEQ ID NO: 123808 - DNA, 1698 bp, Cannabis sativa
  modified_base (1165)..(1178): a, c, t, g, unknown or other
ttttttagccactccttggccccaatagttgggggtcacaccatagcctatgttggccttaaacatgtcttcatctctaccagggaagaccgaaatgaagccgatcgaacggtcatcgatgcatatggagcggcgccaagggtgaggaatacaaacttcttttatgaaagtcaacgcttcatcttttgaggtcaacgtgttccatcgaagatgttgagtcacttgatcatcgcctgcaaatagcatcaaatcatccacgtccgttagattgaatggacggagtgtgacttttgatggattgatctccatatactctcaccaaagacaatatacctaataatattggtaagagttgaaagaaatatagttctctatgttatactttaaaaatacagctttatcaaactttgttacgaaattgtgcatgactttacttttattaaatcagatatgctagtaaaatgtatcagtataatatttttattagtgtaattaaatattgaattctatataatttttttttattatttatttaagcgtttatatattacaattatgcataatttgagactcaaactcaaaacctttaatacacacaccttctttgagctagcctcaagtggttaaattctatatagttaagtaattacaaggtactactataccactaacaatactttattaattatattataatgtggagtaggttctcagccattgaatctttcatataaatatattcatatataataatgagtggaattgcaaagaaacttcagttcttggttttatcattaaattgtacaataatattttttcgatttataataaaaaaaaatgtatagagagcaatgggtgttcatccgattgaggtgaattgttgattttatattttgaatctaatctaatttttataataactaaaatttaatatgcaaaaagtgttgattggattaattatttaaaattagttattttttactattgaattatttaagagtttttacaaaaatattaaattttgattaaaagtctataattttactgtcatatggaatttttttacaaaaatactatctttttataaaacaaccgtaaaacaacagcgaaataattaaaaaacaaccgtagaacaattttgaaaacttaacacagtacacagtannnnnnnnnnnnnntatttttgaaaaaaattccgctccaaagtaaaaaagtaaaaaattgaaaatttcagtatgtggtgtaaaaccctaagagatttttataaaaatattagattttgggcaaaaatgtacacttttattgcaaacaaaatttttacaataatactgtcttttttataaaataatcgtaaaacaacaaaatagaacaattaaaataacagtggaacaactaaaaaataaccgtagaacaacagtaaaaacttaacacaatgtacagtataaaaaatacacattatttttgaaaaaaattccgccccacagtaaaaaagaaaaaaagtagaaaattttagtatgtggtgtaaaaatcctattatttaatatttattaaaaaatattttttttcttcatataactaagaaaataaaacaaattgttgtataatatctctaacaataaattaaaataaataaaataaaaaataataaagtcaaaggaagaaaaaaaattgtatgtaaaaaaatataaattttatttt

SEQ ID NO: 123809 - DNA, 2516 bp, Cannabis sativa
cctaatcaggtgagcccgtgccacaacttggcaccaatatatcacatcgtctaattagatgagcccgtacctactcccggtacttatcatatgtcaacgtccatacttatgcctgatacatcgtcaggaagaaacccaacaatggtttcgatctatgccataaccagatatttttatatcactggcgcccgtatctacacgtcgccaggagaaaaccctgcaacgacttcattctatgccataacctggtaattttcatatcactgacgcctgtatctacacgtcgccaggaagaaaccctacaacaatttcattttatgccataacttgacaattttcatatcactgatgcctgtatctacacatcgccaggagtatcacaccacctaatcaggtgagcccgtacttacgctcggtactcatatgtcgctgacgcccgtatctacatgtcgctaggagtatcgcatcacctaattaggtgagcccgtatatcacattcacaatatcatcacattatcattacttaaccaataaatattttcattatataacaataataatcatatcttaatctcaatatcaatcaattcacaacaatactaattgtattacaattcaacgtaatatgcagtacaatatacttttcttacctcaagttctggttcaggtatgttggccaacctacttggagtacgatcgataatctcaggccctatgtcataacaatgataaaccaataattgtttatcccaaaacactgcttaacagttgcaaaggacaacttagagtttcctaccaaactccgtagttcaaatacactaaaataaaacttatattttggctcttaaacataaaccatatggtagagcatgtcgcaagcttcgaaacggtatatagaacgtccaaaatagacacccgggtgaaaagttatgataaaaatacgatttcaggtctcactggaatttctagaaacggtagaccgtttttgggcaccaaaatctcaaattttgcacttaccgaaatacccctgaaatctatccaaattattctaaacttcacaggacacatatataccatatatacaacagtccttacgtaacagaaattaaaatcgatcccttaaacggaaaacaccattaaagcttggacctaagctttaaaaagttctaaactcaatttctaactcaaaaacaccccaaattcaacaagaaaacatcggaactagtcccatgactacccgagaataattttttaaggtcagaaccttcataactattctaattcacaaaatccctatatgaaactaattgtgttaaacttaaaacaaaattaaaccttaccttaaactttcacgctctgagaattcgcaatccccctattactggagttagatcactaggtttcagattgaaaattgaaaaaaagaatataaaagggaaagggtttcattcaaggaggagaacgagggtttgtttcattttattttattgttataaatttataacatattatatatataatatactgatacgttaaaattaataataatataatattaatattaatataataatattaataaaaattatattattcataattatcttatcatttcttaactgctaagaaatctaaatttttagggcgctaagtcaaattccacatactcctaattatcgcaatacttatattatcaacttatcacaatatttccaccaattttatcaattaaactcgttatgacatttttggctccggatcgagttttccaagtcgtcaaatctaaaaatatttttattccacatatagctcatattacattcactaatgctatatcgtaatttatagattacgcttatttgcttacttatagcgaatttaaaaatttatattgaattagattaataagattataatcccacttattatttgattaactcataatataaatacaaactctaattatttaccattaggcttatcgaaatattacattttctatcttattgatttataaactaaccttgataatctcaagtaagctttgttctatcttataattttaactgtttatgtgtgtaaactttgttcttggttttcacaatgaattttgtggtgaagcaaaactaagtcgtaagatttatatcttcactaatgtaattactttgttacatttcttctactttgctattatttaatttttttggtttgatttgaattgttttgttatgttttttttattaaaatatataatacagaccaaatataatcaaatgggacaaaattagatttggtcaaatttgtaatattattttagggtgtacaaaatctggttactattttgcaactccaaaatcaccctaatgttagggtaaaagatgttacacaatcataattttgaattttatgacttacattgggttgtaggtgttatgaggttatttggatagggaaatttacaaaaatactagaattcgggttaacttttacaaaaatactgtcacacggaaattttt

SEQ ID NO: 123810 - DNA, 987 bp, Cannabis sativa
tactctcccatctaattatacatttattcatttatatattatttaaatacaaaattaatattgtcagtacgtgattactactattgattatttaatcgaattcgtcaggacaagatgaagaatcacttatagttatttgctaataataattacgtgaaaaatgctaaaagcggtgcaattgaataaatattaaatatatataatttaatataataatttttatagatactattaatatgttgtaactaatagtgtctaatagtaatattttttttaaaaaaataaaaatactaaaatatagtattggtgcctattaccatataatataataccgctattgttataattaagtatcgggtgaaaataattttaaaaaatatcgttaactaatcgtaaaacaatacctatagaaagtgttgggcatccctattcactgatgcccaatattaaaagatacttataatacctaacacccttataaagtgttactaatataaatatagaatctcacttatttaatttaataaattttacaaaaaaatcactaactaatttataagaaaacatattatagtactagacaccgtaaatatagcaatactcatatttatatatggaagctatttgataattaagttgtcactttatatatatacagtttttaatattatttattaaaattaatattgaaataaataaataacaaaatactatatttttgatatatgaataaattttgtaatctaattttttatatataattgtgtatattatactattctttttaatttgatattatttactacgtcaataatagtattctaaataattagctgacttgcataatatttttgaaaaaaaaaaaaaaaaaaaaaagaattagcaagtatgcaactaaactgactgttaaaatattatttttaacaccatataactaaactatatatacatatatatatagagagaatgtaagtgtatatgtattat

SEQ ID NO: 123811 - DNA, 1468 bp, Cannabis sativa
caactttaggggttgatcaagcttgatgtaagctttcttttgtgttcttgaagatttaagggtttcaaaattaggttaggttttgatgaatttggttctatttatgtcaatattgctagagcttgttcttaggtttaaattagagttgttacgttttaatttcatgcttggatgattgttttagcgtgagttgagagagttagagtttaagaactcaaaactcactcaacaatagtaaaattgtgattatgaggttcttgttgattctcaatgtttggaattgttctttttaaggtactaagctattctagaaagtttgattaaatttggaggagttttgattaggtttgaagtgtaaaacatgagttaagctatttttgcaaaaaaaaaaaggcatgccatttttatagggtactataaaaacagtggatcgattttttagggctgaacccagaaaaatggtagaccattttgggatgagaaacagttttatttatctgattatcaaaatagtatacaattgtgatgagataatatataagacaatatatatttatagagttacggaaaggacctagctacataaccctaattggactgggcctggtttcaattaactaagaaagccacactttacttcaactacactttacacacaatatagatgccaaacccgttaattattgatcactaacaatatgacctaacacaacaaaaaaaacatataataatcaacatattttatttaaattaataaaaaataatgtaagccaaaataaaaagtctaataggactccctaatctagatgctaaaactcttgttctttagcaccctgcctctttgtgcttgagacggggatgcatgatctaagataattcatttttctgattgtaagcatttggtggatggtatttattgcaacaaggcttcaaattggagattcaaaatccaactttctactacatttctgcaattagtgttttttcatcatgtcatgttatctagatttttgttggacttttaattgtcttggagcttgagtgtttccactatcttgcatgttttggaggttggtctccttttgttttgaatagatcgtttcagttaacaaaaaaaagacaacaatgcaagacaaatcaattgcggattagttggtttactcaccatagatatataaatatatatttaagaaggttacttattattactatattatatatatgctattttgatattattatattatttgtatacatttaaagtaatttatcacattggacagtatacataatattccattttgactgaggatgaattttagatcttttaatgtaactattgatctaatcgaaatatattaatacactatatagtcttacaatgtattttttttttttcaataaagactgttatattaatcatttaaataaattgtaatacaacagacaaaattgaaggtagacaatc

SEQ ID NO: 123812 - DNA, 1034 bp, Cannabis sativa
cgacattgagattcaacgttaaggcaggggaattattaattacttactgcccaaaattgagctttaagcgccgcgacatgcccctgcagtgttgcagcgtgcctcctgtttttgaaaaattcctgggagcttttaatagacatgggtcgtgatatgctcttgcaatgttgcggcccgcttgctttaagtgactaattttagagttttaaccctattaaaaagctatataaagaactcttttaacactttcaaagcaacaatggagagaggcaaaaattggaagcgagaaagcggctttagagactttcatcaattatttttaaagagttctttctttttttctttgttttcttatatatgttctaatcaattgttgttggttatttacaatgaatatgagtagctagactttcaattaggattattaataaagattgtttgacacctttttagtttaatgtaatttaattcttgttccaggatctaattttgcttcagaaaaagcataaccttcacttggtgatctgatttgtatcatcagtagacgtttgctacactcatgggcggttaacattcgtattaggccctttgaatactcatctgggtatgagctaggcagactatatttgaactccttcggatccgggaaaggcatcacaccttcctcgttcggaaagctaaggcaaggccaaggggacatccatatatccttcagtctagacttgttcctagtttcatgaagcctcccgcaacaagattgtagtggggggttttaatcaaggaaattatgatataattctttttctttaaatgacatgtgtcacatgcttagaaacgcggataacacatatataactataaaacattaattaaattactaataataagctgctaatttccatgtcaaaatatgcgatcattatacgtgtgattatatgctcatccttagacactaggctgagcatatgaggcttgataaatccttaagagcatttctagagtttccctaagtgtccatatgagggaggaaatga

SEQ ID NO: 123813 - DNA, 1087 bp, Cannabis sativa
attttacttctaaaagtactctaatattaagcaatcctaaatattgttacactagtcctacactttattatttaatatattatttattttaatcataaatattatattaattgtatttaactttttaatttatatattaataaattcaggaattaaattgcgcttcacgtggtattacttaacatttattatcttttgatattgttatttatttttattttttatattgattaactagctagtataatataaataagacattttgatgtttgaactttagaaaaaaatcaatataaaaattgagtagtttcgagtctcccgattccacaaaacaacatatttgagaactggtgcaactttactagaacaaaggaattgactaagtgatatcaaaatatcacttaagtatcaaaaaatacatccccatcacgttttcccactcacccagcgtccagattgacatcatgtgtaacctggaggctggttgtcaacctgggcccttgatgtcaacctgggggtgagtattagagcagtctttagtaaaacattcataactcactcaataaagatctaattgacgcaattcaacttatgttttgaagctattttaatgctttatcaagtcatgtcttacactccaattggattagaaagatatcaagtctaaattttatcctcaagagagttacgaatttaagctacaacttacccgaaatgggtcccgcagacgtgactcaagctccaaaaatttacaaccaacctccggagtcaattccaccattagatcatcatcaacggtcaaaaatagcttaaatgtattttttttatattttattattattttaatagtatctccttccctataaaaagagagcttacttagctccatttccatcgcgacataagaagtgaactactataattttgtttctctttaaattatttacttaaactcattatccaactcgtcaatctagcaagtaagttgttatcccaattttttcactctgacatggcatcacgtgaatggtgacacgtggagtccacttggaatatctgctcgggaagaatggtccgagcaggacat

SEQ ID NO: 123814 - DNA, 1207 bp, Cannabis sativa
tttaagaaaataatagagtttgtactgacgaaatcagagaaaaattacagtttaacaaacattgggtacttatgccgctaaaaataaacattgggtttgtgccacttacaaacttgaaactctgagtaattatgccactaattaccgtaatatataattagaaaattacattacatacctcttttaagttgatgcctttaatttttaccctctctttcaaaatctcttatgtttacctctttttcaatcattctaccaattttactcctatgacttcacaaaaattttcattcttctctaatcaaaagtttgcctcaactttttcaaaaacctacacatccatctacaaagaatacaaatctattatgtttgaaattatgtcttagttatgtgagtgtgtgaggataatttaggcacaatactcataaaaagaagtatatttgaattaaattttatttggaggtaaattcgattaatgtatataaaaaaagtatttttcaacttctcccatacataatactccaatcatcaaaaaaatgtaaagatacatataaataaaagttttttgtatgctaagataatgtatgaatatgtcactttagatccctagttatctaaatgatttgctccgattagtaataagtagacaataatttgataagagtaggggccaatagatttctgaattaggaaagccctgtgtatttgtgattcacatcataattaactaaattttatctttttttttttaaattaataaatattgggaccattattgtaatattatataaagtattgctattgaacactagtggtgcctattactttctataggtagcgctacatgattggttagcgatattccttaaaataatcaagatcccttgttaaaaaatagtgtcccattttatgttaaccagtctaagtttgacacgtcaactaatttaatttatattaaatatgttaactatttttgttgacataattaaaggtttaattttttaataaataaaaagttagttgacctattaaacttaaattagtttaacatagtatgggacactactttttaacagggattttaagactatatataatagtttaaattttgagataattacataaagtactatttttttgtaaaaaaaattacattttatgtttaaagaatttttttttatacttttacgatttttcatagaaacaa

SEQ ID NO: 123815 - DNA, 1519 bp, Cannabis sativa
ttttacatttaagattttttatgatatttgatatgctatatttttataaatctaatatccaaatccatatcttatgacatttcttcttatctataataatttttctcatattttaacatatttagtataattgagtttacatgctatgtatatcaaaactttgatttttttcccatatttttgtaaatagtactgcaatctaatccaaattacaaaaaagtttcatatttaaatttaattacaacataattgaattggtgtaaataggtggacatgtatcaaataagtcacaaatcacccaccacaagactaacaaaaagaaaacacaaacaaaacaaaactagaaacaacaactaatcaagttcaacatcttccacaaagaccttcgtgtgagccatagactccaaaacaaagcaagacacatttagcacttattcagtcaaattatgagcattgaagttccccctccagtcaatctttatgattccccaaaaggagggtttgttcactttagagattaatatttgtctcaagttcttgaaactagacatattcccacttattttctacaactatcatgacccctttgactctcatcaatgagtgaatttgattgaggcactcgctcagtgaacaaatatttatgtcacgtcacaataagtactgattgaacctttaggcacacgttagtgtcaagacctcggatctgcactcaatgcctagggtcaggttcgggtcctgaggcttcgaacctcaaaccttggtcctcgaattagaacttaaaaccgaacccaaactagggatgcacatttttctattagaatagggacctgcatgaactcgcccctaatggggcgtggattgggattattttgtcccaaaatattaaacaaggcgaggacgagaatgacactctttgccccgacgggaacttatttaatttattaattatatttttattaatatttaatattttatattatataaaatgtatttatatttttttagtatattaagtgttatttttataatttttaaagttgtatttttgtacaataattagtatattaaataataaatgatgtgtaatttagtaattttatacatttcatgacaaaaaaaaaaaaaattatacatttaaattttaaattaattttatttttatattaagggaattttcgttctttatccgccccataagaggatttcttaccctatttctgatggagaataaataagcaaggatgaatgaggataaaaattaaaatccttaacgggaataaggacatgagagtagacctaaacttagatctcaatctaaactattattaaatggaaaaaaaattgaaaactgaatagtgatatatgaattttgaaagaaagaaaaaacctatgaattaaaagtattttgggttggacaattataaattttaaatatatattcgatagagaaccatttttttttttttttgaatcaaagatgattttatttaaaacctttcagcaattacaatattat

SEQ ID NO: 123816 - DNA, 619 bp, Cannabis sativa
  modified_base (565)..(566): a, c, t, g, unknown or other
aaatttttaaaatgacagaaaactgttttctattctcacttttaaaaacacaattttaaaaactgaaaactgataaaacacagccaaacaagctctaagtgtatgatgaaacacagattgtacaatgttaaaactgcaaagagaaaagatgaactcctataaaggacaactaatttttcgaatctcaaattgagtgatacgaattgatgctctattttttttattagcctttgctgttttgtttaattgtaatcattttagttgattaatgcaattttttccttgatcaaaaaaaagtttgatcactgacaattaacttaataataataataaatttgtatcaatcttctctctttttttgtttttgtttttggagaattgtataaatttagattcaacatgtgaatatagtgtcataataaatgaataagaccattattgtacgagaacaattaatgaataagaccataattgtctggtacctatttaagcagaaaaacttagcttagagcatcttcaatatatagggatacgattttgttccgtgatgtactttcacggaatnnattccgtgatgtacgacaaccgttagatggggagagttatttgatctgagggc

SEQ ID NO: 123817 - DNA, 742 bp, Cannabis sativa
tactaatttatcttttgaaagcataacatgtgtatttgtctctttttatgaaatttgattagttgcttgctctggaataacttattttttgtataacttcttcttgtttctttttttatccggattttttttttttaaaaaaaaagaaggaggcgcttgtgacttgacttgtgggctaagtaaatttagttcttcatttatttggtaaatatcaacatttactctaattgtttatgataagtttccttttaaagtttaatatcttattcattgtattttatttatttgttgatcttgaaggaattttttctatattaattcgcctatttttggaaaatattatggtttattcttgtttccttttattttttttaagaaaaattaaggggaaaaagaggtggacagtttcctctttgttagtgggcatggcagtttatttttgtttctttttcaatttgtttcctttcttccttcacatctttatttaaaccaattcatttgtcatttaatctctccatcttctcatctacccaattactcttcttgttggtattttgtctctttgtttctcaattccttttcaaaatttcatggctaagacaaaaaacttagggcatccaagtaagattgtggaaaccgcaactactccctcaaatgattcacctgggccttcaaaatcgcccctactgctgcactacttcataggggtgttcatcaaaccgcccaaaccgctcaaattgcc

SEQ ID NO: 123818 - DNA, 749 bp, Cannabis sativa
  modified_base (48)..(49): a, c, t, g, unknown or other
tggtcacttaattttgtatcacactttataatagcatatacattatanntatgtgcccacataggatttttttaatccaacagaaaacatttaggatatcatagcattgtagttattttaaaagtaaaatctccaaaataatgtaggtgagagagaaaatataatattatatttaaggatgataaaagaattattggccaaatattacattagaccatcttcaaagtgtaaaatttggttccaaaaataagttattacaatatatagttcacaaattaattttatttttaatgaaaatatatataaaaaaaatcaacaaatgtgttaatttttcattgaaagtgtaattaaatatataattaaaatgtaaaaaatcattaaatacattaataagtaataaaaaaaaagtaaataaaaaagttaaaatgaattattgtataaagtttggcttatgctataatttgtacaacactagggaactaagccgcgctttgcgcggtgttgcccaaattttataatcttttcatacatatatatatatatattgtacttattaagtgatataatctaaaatataatattttgaaattagaaacataatttgttattttgaaaatatagtgaaagatagcgattttgtgaaaaaatttagaaatagtggaacaaaaaaattacatgtatttttataagaaaataaatgaaaaaaagtaacagtttctgaatttaataaattatgcttatgaccggtg

SEQ ID NO: 123819 - DNA, 543 bp, Cannabis sativa
aggacagtttttgagccttgcgcaaatcaactttgtagcagccttgtaaagtacattgcaacacgcaataggtcgatagtctctaaccaggtttgggcacttagtcttgggaataagcatcaaaaccgtgcatgttatcttcatttactatatttgttctgcaatatattcattttctttgtttattataatcttcataatgttagagagtcttatatatattaatgatatgtaaaacataattaatatgtacaatttataaacttattatactattaataagttttgagatagaacaatctacttatatcctatttatctaatttctaaaccaaacttccaacatgggcgcccacaagaaaacctcctaacatgaatttgatttaatccaaaaatattcactacaaaaaattattagttttagtgacaactttttggtcacaacattaattttttgtgacaaaatatgacttttagtaacaacaaaaaattatttgtgactaaaatatagcatttaggcacaagttgttactaatttagttt

SEQ ID NO: 123820 - DNA, 1621 bp, Cannabis sativa
ttttctataagtacctttacttgttatttgatatctgtcacttctctttgatgtgtactgctctttaattcattcctgtaaatttgctaccacaaattaaatatagatgttatagaaataatcaaaataaaacataatttaatcaccttattcgtaaaaatggtggctcatgtaatatgtatgaaatgagagaagaagaaaaaaatgctaatacttaattatctatgagagaggaagaagagaataataatacctaattatctattttgaaggtttttaaaattttttagtttccattttttttattattataaaaaataaaaagaaatatgtgtcttagaaaataattgcctttaagaaaggaaacaaataatttttttttttgaaaatacatataaatatatatatatatatatataatatataaagtaactattctttattttgccttctcttctttccactaaatttaaataaacaaacatatataatatatatcatttattacacaatatgttttatttggaaacaaacaaaatataaaaaagaagaaactaaaaagcccaaaccatttacaagttactcaccattactaaaacatgtgggggcaccatatagtatataataataaagaatggattatataaatagaatattataagaattggaaagtttgggggccatggcctctatagagtatcaaatagatccgcccctgtttatgtgtatcttatgtggcacttgacaaatctatatgacatttaactgtcaaatagtcattgttttaacaatattgttacagaaggaacttttgctgcttttttttattaggagttattaggagttacttaattaacggagaaaatgctgttgggttttataccctaattaaaattttatttcaatataatatcttgcatattcattaatcaataaaagaaacataattattttattatttgtttaatgtattgtttggttcacatgtttgtttcatgatcatttatttgacttataaattcatcttaatctttatcacattattattcataattattgtgttgtctacacttatactcacactttagccactatcaaaactgagctcatgttgtctcgaacatttgaacactccaggtctaaccgtccagatatgtacaatcttcactaagctccgaactcaatgtggttcaactttagtcttgcctttacatacacatgaaaacatatatgtgagttgacaaactcagtaagaaaagcacaaaacataaacatatttttgacttgttattaggcccccatacacctaatttccatgaatctattactcgcgtccaacacgtataactgagtctcaaacgttcttgactatagtatgaacccgatagtttgagtcaatcattaccctacccccgctacccatatgatactaagactagaacgttcgtacgataatactattaaccatgatatcagcctatactcagtactctagttgtattgatgcgatagcgtcaattagtacttatgccaaacatacatccatcaatgtctaatataactctacgtatactgatacttctatttcagtataatttaataggcattcataaacatgcac

SEQ ID NO: 123821 - DNA, 2085 bp, Cannabis sativa
  modified_base (29)..(33): a, c, t, g, unknown or other
  modified_base (2042)..(2054): a, c, t, g, unknown or other
attgaacccatttcatatgatgagagttnnnnnggtcttgggcgctgctttgctatgtgctattcatggtgctattgttgaaaacacttttatttgaagatggtgatgatgcaaatatattctgtgcttttaacccaactcaaggtgaagaaacttactcatccgtttaattcaatatctacataatagaacaaatttatcaataatttttttctatttcaatttaataattattataaaatattagtaattaatcacaaagagtcacatttaaataatatcttacatttttttttattaaaacgtttgtatgttatattaatgtataatttaagattcaaactcaagacctctaataaacaacgaaatctcttataaccacttgaaataacttcgaggggttgatcttacctatttttgttagtcgttgaaaatggtagttgacagaggatatgaaataagaatgtaattttgtaagtagtgcatggggcaataattttgaggattttaagtattcatagaaaaatgcaaaaggagcaaaaagtgaaaaagatggtcgttgtggttccaaagaagcaataaataaagacctaaatgaggtagaaatgcgtgacgcgcggcgagtggttgaagaagtggacgcgccagagtggatggaagaagaacaaagttatgtaatgtaagtttgtgacatgtgtcagaatgggacccacaaggcatattgtttgtgtggtattggtgtttcaacgtgggtcccactcaaatacaatagaatagacctctttttccttttccttttcctctttctatttctatttctaaaagtaatactcaatacaatactcatgcttttttcccaataatatttataggtatggtggacccacttatagtaattctaacctagcatttctttttcttttgttattgttattaggtcatctcaaatgttaatagtattaaattaagaagtgaattcaaggtacctaaaccacttgaggctagctcaagtggccatagggggtgtgtgtgttggaggtcttgagttcgactcccaaattatgtatgatgtaatatataagcgtttaaatcaaaaaagaattcaaggtacctaaatgataaaatgttcatttttataaataattatattaatttataaaaatataataaaaaataaaaaatatttacaacaaatcattttaacatttataatcattatacatatgatttcaataaaaaaataacagtaaaaatattttattttacgattttgttatagtgtgccattttttgattgttaagtgttaattaaatctgttaagtgacagcttataaacacgtaaagatatattactttaatttatttaatacatagtctcataatatgtcgacacatatttatgagttgacatttaatgaccaaaaaaagagtatgactgcaacaaaatcataagatctggccaagtcgaggtgagaaagagaaacttcaaagaatggttaggtctcgaggcttagagggaggctaaagggttggatttgtaagatcagaaagttagtttttttggttcgtttgggttgaaggtggctagaggtgactttctgaagctgttagagaaggagaacggaagagaaagggagtgtgggtggaaattaattagggttacaagaagaaaaatgtaaaagaaagagaagaagaagaaaaaaagaaaaaaaaaatatttttataatttttaaattatattttaaaatatttaatcaattaaaattatatagatcactaaaaatttatcacgtgtacacttgtgcatactgtggcatatctaccatggcacttagcagagtcttttgaataaaatgggtaagtagctaacagatatgagatttggaggattttaccactaaaaaatcagtttaagtggttaagtgtcactaataatagaattatgatagtttgactgctaatatctcccactaaaaattaaccacgtgtacaatgtggtatgtaacgtccccgcttcaaatgaatggctcttatacacgannnnnnnnnnnnngctgcttcatggactgacgactgaccctaca

SEQ ID NO: 123822 - DNA, 826 bp, Cannabis sativa
agagaaattaattatatgatgacttcgtttgctgaaaatatgattggaggttttgatgatgaggaagatgacgacaacaccgtttggacggttcagatcatatcgttttagcttttaagaaaagtaagagagagagagagagagtgtgtgtgtttaattgtctatttactttggtggtggtgtggtgtggtggtgacgggtggtcctgaccccgttaacagtgacgggtgaattagggaatctacaaacggggaatttgacggcgccgttatatataatagagatctaatagtaggggctggctgagaagacgagacagagcaaggccgttgtgacttagcgccgattattcagctaataagagagcgacacgtggacacgtggccctctctgaggttaattgttttcggagttaggggcccaccgtagaaaatgattgcgtaggaagaggtaagaaatagtgatattgaaaatataattaaatataaataattcttttttttacagccaaaaactagaaagaaaaagaaagggtccgtacgtaggtgagtgagtgatttaacaaacaaacccagcggaaggaacggtttctaacaatatcaaatattttactttgaattccgttttggtggaggtaccggtctgtcttaaaagtaattatttttgaaaaattttatttacacttcaaacctttcaaaaaatattctattttaataatttattttttttatataaaatttaaagaaattttacggtgcacctccttacaatgaatatattaatacactcttatctattttagcactcgaaataattttttagtcaa

SEQ ID NO: 123823 - DNA, 873 bp, Cannabis sativa
tattactaaacaactttttttttctttcaaaaaaaaaacactattttttatgaattttatttactaaacaactatttattacaatgacccataaaaggataaaatttaagaaccccatgactaataagatactgacattttttaaaaaaactgatcttctttcaatttttcagtagacaaatctaaataaaggtaagaaatgagatcaaagaaagagaccaacttttttataatcaaaatgtaaatataaaattgcatattaaggtagagaagagattgcatgtaaggaatcaacttcaaagtcacatgtgttgataaactcctagtagggactgctaagacacatgtttttgggaccaccaactattaaaatttgtcatccaatccatctaaaagccttaacaatttttactttatttactttcttttagaagcaatttggaatttcattggtagaattaatttctcaatcctcatacgaaaagaatcttccaaaacaaatttaaaacaaactaaaaatataaaactagcccactccatagaattaaatatcactagttgataacttgagccacacaagccacatggttttagaattttgcaacaacaaacaagtgattcatcacctttattattttgtatgtttaaaattacagcaatcctattagttactttatccaaggctagaactaaggcttactcagctcataagccaaattttttatttttttatttctgcaaatatacatatttttatgatattttttgaaattactatatttctttaaatacgagtccattttttaaaaaaaattatagtaaatgacctaaacatataagggaaatttgaaattatatgcataatagggacta

SEQ ID NO: 123824 - DNA, 1357 bp, Cannabis sativa
  modified_base (1326)..(1330): a, c, t, g, unknown or other
tttacgcaggattctgggctgtttgttgctagtttgctaaagcccagcccatttacaataataccaactattatatataattaaatagggtatttttttaacattattttgggatctttttatttactactttttttatagagaaaattacaaattttataggtttttatattatgagaaaaaattacaaaaacatagttgtatggaattttaaaattttttacggtttttaaaattttatttacataacaaactgtatttttatgttgtattttattgttgattttttattatttgtatatttttttttatgttatttgaatgttatttatctattatttttatgtggttttcttatatttttttgttgttgttatggacaacaaaaaaaactttaaacataaaaatgtataaaaattatcaaaaataatattttatgtaaattttcataaaaataattgtaaaaaatattgagagaatggggactggaatattgaatcttctgtttccggtaagatatatagtattgacactataattatttggtatcttatttatatattctgaaagataactaattttgtataatgggccttacaaaaaattggtataatgggctttaaagcacaggccaagttcatgagatttctgaattgttatgaacacttgcaagacatattaatttttttagagaacatatgtcatatttattggtgctttattagtttatggactaaaaaaatatattttattgctaagaaactaaaataaaaaaacttgagtagatatatattgtgaatttttttatttttttttcgaaagattgtgaattatgttttgattaggcaaagtgaactaaaatcttaatttagtacatttttacattattgttatacccaaaattcgactgtacttcagagagtggcacgtgtcaatcaagtggaatatgaaccaccaaatataataacaattatatcatttaatgcaaaatagaataactcattaaatatagaattaatagagttcataactcgctaactgtatagtctaaggcgaggtaaggatacacaaactaacaattcttgtattaacgagagaccatcttatttcggaaggcacaatcccgaggaaactacgggcaatgtatagcgagacatccatctcgctacatataaggaaatattgatgagatgaatcagctgttgaaacacttagcgtatattccatattataataactgtaacaacttggaaacgtgtaggacatgattgtctagtttgcgaggccttatagtcaaagagcagttcttaagtttgctcagttcannnnngctcatgccattgctagaaggcatatg

SEQ ID NO: 123825 - DNA, 1021 bp, Cannabis sativa
  modified_base (947)..(976): a, c, t, g, unknown or other
tatttttgtaaaaaaaaaaaaaattttttgaatgtaaaaatgtaattattttacaaaaaatagtgcctaatgtaattattccttaattaaacgcttataaaaaggaaagaaatgggttagaagaacataattatgaatcctacaagtacgtaaataaaaaattgcaaacgtaaatcataattaaaaattattatatttcatactatgttaagatctttatattttttttaaaaaatctaaaatgaaaaaagaaagaatagattattccctacagttgtatagatattttaaagggtgttttcacttttgtatttttaatgaaatttattttcaaaaatacgttaatattaaaaactaaccacaattagattatattttgcaaaaatacgtggttgggcttcttctctaccttgtcacgtatatcttgaaccaaaaataaagaagaaaaataaacaagctctggagacaacaactgaacctccattatcgccattttccgagttgcgccagtcgatcgacccgttcccaaatcatcgcgtatcctgaacttaaaaaagaagaaaacgaaacagagctccgttgcaatcatcgcgaagttgtcggagcttagctctctgacccatccccaaatcatctcaatgtgagtttcaatcactcaaatctctcccgtcaaatccaaaataaggtaagaatttcaattgggagagagtgtttatagtaatggagatgtttatggaggtgagtatcgaaagggtaaatagctcctgaattgcttggttgtttttctttttcagtcataacatttcttttcagctactacaattgaaaaatcctctgttcttggatcttgaaaacctaaggtaatcataatatttttattcaattatcacaattggtttaacatttatgttatattgtatgttcaaattgttggaaatattttaccnnnnnnnnnnnnnnnnnnnnnnnnnnnnnnattaacatcctaatatgaattccaaaacaatgaaataaacacata

SEQ ID NO: 123826 - DNA, 1261 bp, Cannabis sativa
ttctagtattatttaaaataagtaattatttagccacatcatttcttttctccttatttcttatgttaaatactgttagtcgtttaattagtatttcttatttcttatttcttacatttgttaaatctgtctaattgtgaaagatatcttttattaaaaaataaaaaataaataaagtaacctccaaatgcgccaaatggcgcgtcaaccttctaccactagcaagtggaccctgcctgacccatcacactttatgctgaaaccgtataaaagaaaaaatatgtcagttaaagtaaaaatgtaaatagataaagtttttagttagtttgtgtaaatattcctccataatatatgtacttatttctatgttctcacttttctaaacaaaaaattatatatcaaactgtgtcttgcttgggtatgttgcagttgtgaaattttaactgtttttttaaaaatttctttcccacttttttctgctttcaattttttccttcttctcttcttgcgataatgctttaactgatgtgttctgtattggttttttttcgcattttcttcctatgtcgtgatggatcccctcttataatccctggatttaacattaactcttactgaagaagaaagttcagttgttgttctgcatgctgatgtcgtccctgcctcggtaaacacctctagccacatccttattgcacgggtcctcactgataactatgttcatcaacctaccttctatgatcaaatgggtggccattggaagggtagatttcctacaactatatctgaatatggagatcgtctgttcaaagtttcttttggatgtgcaggtgataagtatcgggttctgaacaaagaaccttggcatttttaaaaccacctagtagtcttttgctctccaaatactttgcagaatgtcacagtgagcaacttgtcaagtactcctttttgggttcaaatttaccatctgtcgttccttagcaagtctaaaatgcctgttactgccttggagaacatcattgggaaatttagtgatgtccacgaagaatcccttgatgagggatggggacctttcttaaggattatagtaagacttcctgtggacaaaccacttctaagaggtcgtatgatcagtttgccaaggatcaaagacgacttttagattgattttaaatatttgaacgattaccaaaattttgctttgaatgtggtagggttggacatccctttgaaaaatgtgtggctttcatggagagaatgg

SEQ ID NO: 123827 - DNA, 1501 bp, Cannabis sativa
aaaaactgttttctattctcacttttaaaaacacaattttaaaaactgaaaacacagccaaacaaggtcttagtctgtggtaaattgcaacttttctttaatttttttttttcttaaaactacataaattcatttgcaatgatacatgtatatttaattaacacaaaacaatttgtatcaaatattaatcataaatatttttaagtagatattatcacatttaattatataattaaaactaattacatatcataatttttatttgtaacttgataggtgtgagtgtaacaaccattactcaaagtaattacttttactcataagtaataagtactttttctttttttttttgaatgaaaagtaatcagtacttactatatgttaggggagattatttttctcagtagccgccggctccttttatttttctaattatagcctttgaattaatagatatctagtatatttataccttattaataattttcttttcttaataacttttgaataaataattaattaaatatcagaaccctatcagaattcccttatttttaatctacagtgaatattggcttaggacactttaaatgtatagttattatttagagcaactccaactttattaattttttttaagtgtttatatacaatttgaaatttgatcgcaaaattttctacacatatgcactttctcatagccctctattggttacttaagctaacctatgtagttacattttttttttataagttgaatttagtgcatataggagtactaaggtaacactatatgtcattgcactgttttttttttcattatttaatatttatatttataagattaaataattttttatgttgtatataaattaaaatgtgaatacttttaattataatttaagtaaaaaactattaaattttgtatattttttataaaaaaaaattacacaatacaaacattttaaatttaaacatacattaaaattaaaattaaatacactaaatatcatattcttattaattaatagtacacatattttatattacgtcacaatagaacattatacttacttacacttagtttctttttattagagagttgtgattggagtgaaaaatttaatgtataagttagagatgctcttagatattatatttacactttaacaatttatagacacctcaatatttaaaagaaaattactctcaattatttttttaattttattttacattgttttgtgttaatttcaataataaaaaattaatcttctatttcctggctcattttttttttcatcttaatatttaaaaaatatatgttatattttcagactctcctcttgatcaataagaaaccagaatgaggattgaaagattattattaataaatggactttgatgaagaattttaaatctgaaaatattttacttaattagggtttttaattagggcttttttcataaatgtacaacaaaaataacataattacaaaaa

SEQ ID NO: 123828 - DNA, 1011 bp, Cannabis sativa
tggttgaatcaccatatagaactcccaatatatcaataattaaagtaaaataagattatggcagtccaatatataataaataaaatgagactacttctttataaaatcccagtaataaaatgaggttccctacacttgttacattaaacaatctatattcatgacaaaattcccaatatatattcctaggagacatttaatcaaacaccataacaacaaatttatattatttagaaacaataacagccattatataaagtcatattttatataaaaaagtaaaggcatcaataatatatttaatcaaaaagataaaaaggaatactgattgaaccgataataatatataatattgtataaataatattaacaataacaataataatattttgaagataggatagcattatatatacctaattgaatgtggagttgttcgagtagaggtgaagagtagttggtccgctgctgggtgggggctgagaaagtgagagaagctgtcgatataggatgatagaactgacattggaactcatattaactccatagctaaaattaaattaaattaacgttttcattggagcactttaacgttcaatctccgtctctcccgttgactgcttcacccaaatttgatttgatttatttatttatttattcagtttacataggtcaaggtcatcaggagactaacgagatgtaattttcaagtttccaatggcttttttcccacattagtccccattctattaacttcttcgcatattagttcctatgctttattgtcttgtaaatcgatccctactcctttttttttttttatatcgagagaggggtattcgaacttggtatctcttctttgagaagtgtgaaatcactaggctatgtatatgaccaactctatttttttatgtttataattaaagggttgttcatccgatccaatccgtacttttttggtcaaacaacattcaatccgcactaagtgcggatttcattttttggatccaa

SEQ ID NO: 123829 - DNA, 842 bp, Cannabis sativa
  modified_base (37)..(61): a, c, t, g, unknown or other
ttttagaaagtttatatttagggtgttaataaacatnnnnnnnnnnnnnnnnnnnnnnnnngtaaaataattccaacaatatccttgaagtaaatacatagataaactaaattgcatcgtaaggagtcctaaccactttgttccacctatgcaccatcattttagagtggatgcatttactaaaatttacttgctagtcttcttataacacgagactagcttcttatagcatgagactaacttaggtcgagaagacattgcacttttagctaggggagagtcaattacgcttaaattaatggtttggatcttcctgatgtcttgcacgataatttgttgtaaaaatcatatcttttgctattgccttgtttgatggatattttgtttattttgtgtagatcaactagccaccttacagatggggctattggataggttcctgggtaacatccaatctaggtctaatgacattctggaggtccccagggaaggtaaaggataataaattaaagtttctaagagcagatctcagcagccaacacctctcgctttgaatccagagcctgcttctaaggctcctgcatggaaggcttgtctaatttcatcatcaatctgactataaccattctggttgtggaacctttgaggtaggtttctttggagagctctagatgagacaactctgatcacgaccgatcgtgatcaataagaattagtcaggcttttctaacagtggcaccagtaaaaaggcgagggtggagaccaaggagatgttcttgttggacatattttaccatgatctagatttactgacaaggacgtttcattaacatcctaatatg

SEQ ID NO: 123830 - DNA, 595 bp, Cannabis sativa
tctttttactgctgaaccgggtagatgggatgaggttttaagttgtgtaaaaccaaaggttaatgaagaacaaaatttaatgctcactaggccgattgaagatcaagaagttaaagatgcgttgttccaaatgcatcctgataaatctccgggacctgacggaatgaatccaaagttctttcaaaagtattggcatatagtggggtcggatgtgattgcttgtgtcaagaatttttttatgtcagaggtgatgcctaatgggatgaacgataccaacattgtcctaatcccgaagaagaagaaaccggatcaaatgagtgagttaaggcctatctccctttgtaatgttgttgctaaaattataactaaagtgcttgccaatagattaaaggtgttacttggcgacattatttctttgaatcaaagcgcttttattccgggaaggctgattacggataatataatggtgtcgtttgaggtcctccattaccttaaacgaaaacaagtgggtagagatgggtgtatggctttgaagttggaccttagcaaagcttacgatcgggttgattggaatttcttgagggctatgatggct

SEQ ID NO: 123831 - DNA, 1263 bp, Cannabis sativa
atgtttaattctatgtacatgtatatatagagtgggaacactttgattccagtatacttgattactgttcttccaaatgtgttagaccattgctgccaaagttgttgcaacaacctgccttcttcttcgaacatctctcaagagggctagttgttgcaacaacctgccttcttcttcgaaaaactctcaagagggctggtagcctagttcctgtggtatgccatccaagccaaagcaaaatggtttcccaacacctcctgctgaagcaacaatcaaaaaataagttccctatgttctccactatttgctcacataccaaacaatgtccatctgcactaatattgagaggaaagagcctctctttagtttgtaatctaataatgacaaccagccaaaaaataatcctatgtttcggagtgagaaagcaaccccaaacctctccatacgaagacataaactcttctttaggaacgagctattagaatattttctatatgtgtacaaaatcaattaatttgatttacacgtatgaagataagattgatttttccattgactgtatttaatcacaaattaaatgtgataaagataaataatgtatggccagttttgatttattaaatatttcagttactcgatttaatttttagaattaattgtcaaaatattgtgataattaattgtgacagaggcctggaaggtctcacctatataaatatagggtctcggtccccgagctcactactctgtgaaaacacagtaattccatctaaaaagagtagagagagcttgaaagcccaattacccacactaatcagtttccttttcttttgcagatcaaagctcatgtgggattgaagctcaaagaatcaatggttcgaatactctgcgaaaacacagtaaatccatctaaagagagtagagagagcttgaaagcccaattacccacactaatcagtttccttttcttttgcagatcaaagctaatgtgggattgaagctcaaagaatcaatggttggaagtatttcgattaatttgttcataatgcacatatgttcaatttattccgcatttcatacatgatcatatatgtttcatttttacataaatttctaacagttggtgtcagagaaattttttatctctgtcttggtgcatttgagtttatataagtatatgcacatatatatggataatttcttaatgggtattacccttactaaacaaatttgactataaattttaattttaaaaatattaaa

SEQ ID NO: 123832 - DNA, 969 bp, Cannabis sativa
  modified_base (826)..(828): a, c, t, g, unknown or other
  modified_base (869)..(871): a, c, t, g, unknown or other
ctggtaaaataatttccagcacctctatggtgttgatattcatatcgtttcccacctttcaaattaaaccctgcttaagtaaatcacgaccccatagaatgcttctccaggaaaaggagggcctatgaccaggaactgcctcaaggatggaggaattagggaaatagcgctttaaggatgcgactcagtaatgaattagggtattgaaagattctccaagcttgctttgcaagcatagcctggttaaaatgagttaaggaccgaaatcccaaaccccctacaaatttggatcgacaaacactcagccagttctttcagtggactttgcgagcctcctcagaggagccccaccaaaatttagagatcaaagactcaatttctttacaaatcttggtaggaattcgataacaagccatggcatatgagggaatagcttgaaggacaaccttaatcagtgtttctttacccgccctagagaaccatttatgattcaaagaatggatgacagtggcaattctatccttgagaaaagtaaaagcgagatacttcacacgggaaagacgttggggtagacctagatatttagtaataaaaggcctattttccaattgaaaagtactaaaaaataagttcctaatctcaacattagtatttggtgagaacaaaatagaagacttggcaaaatttaccatctgactagaggctttagaataagtggtaagagcactatgtaagtgttgggttttgtgccctaaataaaactcaattcaatataatcaagatttactaattaataaagatcagaaatcgcattttatgttgcatnnntcacatgatttatttcattattatgtttaatgtataaattnnnttaagtccagaacatatgtaaatatgtatatatttattcatatttatagtgccgtcagcataggagaatataatcataattatatgttcaaaagctta

SEQ ID NO: 123833 - DNA, 555 bp, Cannabis sativa
tttttttttttttttttgttggaggtagtgttacagttactagtgtaggtatgggtgtaagggctgtgttgtgaagggcagtgttcataaagggcccataacaatgccaaaatcttggaggattttctatttatgccttaaatagaatgatatttgatggttaaggataccatagcctaggtaccctgtaagttcaaagaaatttaattgagaaattactataacattacccttttaattaaattgtcatatttgagatatatagtaccatggtccatacacttttatatacaagcatcaaacactagtagtgtctacctctagacttgtaaaagtgatgtaaatttttaattatttttaagtatttttgaaataatcattctaaaaaagcacattataaaaatatttgataaacagttaaaaatgatcatattataaaaaagttacaaagaagttgctaatgctatgaactttgatttaaagactctataataaatttattatattaaaatatatttacctatttattgttagagattttataacaatggaaga

SEQ ID NO: 123834 - DNA, 938 bp, Cannabis sativa
tatagattagatatataattttttaataaaagaaaataaaaaaatatttaattttttaataatatttttattatttaaatattttttatgttatgaaccaataaacttttgatacgtgaaattttaagaattataaacagagcttttaaattgggtacttacgaactaacgagaatgtcgagcttagggaatataatcataattttttgagattagaacttatctgcatcaaagtaagttttttggggacttatttacatcaaaataattttttcggggactgaatgctacattttaatatcaacatgtgatatattagggaggaattaacggatctatgaaaaagagaaccaacgggcttaccagaatattgagcttgtggactattaccattcttttttaaggtttggaacttatctgcatcaaagtaaactttttgagaacttttactgcaattttccctttagtgtatgttgttgtacataaaaaaaattgggtagcatcgagccaccatcggttctaggtcctcaacctttacttatttcaataacagaaagacatcaaacctgcatcggatcatcatcggaccatatcttacattcataggtagcatcaaccatcggacctacgtcttcaacctttactcatttcaataacaaaaatgcatcgtacctgtatcgaaccaccatcactaacctccagattgcactgctaccgtacccatcatcggaccactatcgtatcctatcgtaccatatacaaaaaaatcatagaaaacacataagaaacaaaaaaatacaaagaaaccacaaatcatttgtctgttcgttcgacagtagtggttgtgggtcattggccatgcactagatagaatcagagagagggagggctgtgggtctcaatcacgcaacaaagagaactagagagagagagagaga

SEQ ID NO: 123835 - DNA, 1045 bp, Cannabis sativa
taaattacttgtagaagaaaaacaatgatcacaaaacattataatagaaatctgctgtaaggaaacagttgaaattgatttcaaaaaaaaaaaaaaaaagaaagaaacagttaaaattatcccatttaaaaaaaaaaagttatcaataaattaaattctaaaatgtattttgtttttcaattaaatttccaaagttaacgaattattattattaatcaggttttttatttacattttaaaaatttattaaaaaattataaaagcactccaatagaatcaactaaattatttttttttccttcaaaaaaaaattattttttagggcatactctttcatattaatttgtattgatttcattaagtttttttaatttttttcttacatttttttattttaattttaataaaatttcttatataacttttagttcatttttttttaatatttaaaaatgtattttacttttattttactgttttttagaacgtgataaaaaagttttttttttctttaaaaaaacataagtaaaaattaaaaaaatatatattttacataaaataaaataagaaaatgcggtgaaaagaaaatagctacttttgtacatattaattgttttgaacaattgtacacacattcaaagtcatactttcaaagtcattcttggcgaaaaagttacatgtatacatcacaatattataaaggggcatatacaagatgtaattaattgatccaatcagaaccgatagccaaatattaaatatgtaattgtgatcagattggattggatgttatttttgaatatccaattagattgaaccggatgttgaatgttgtgtctaaaaatctaatacatcaaacatctaattaaactaattagtattttcatttagtttggatgagtaattagattgtataatgttatacgtaacatatatatctattctatataaattgtgcatatataacataatttttggtttatcagaaattcatgggtactttttatttatattaaaaataaaatgttttattattaaaaataaa

SEQ ID NO: 123836 - DNA, 618 bp, Cannabis sativa
gataaaagtttctctctctaaaaaagggaaataatatcgccgatgctctctcacgagaagagccttcttgaagaaatgctgaataagcctgatacatccatggaaaatctccttgctagaacgtcgaacctcacagttctggacgaagaagggtgggaaatcaatcctaatggagggtctgaagtggcttccttctgtgctatggggagattttgttcaaatcgtcctctgaatcgcccccttcttaaaaccattctgggaagagtctggggagtttcagacagagattggggcgtggaaatcaaactttccaccaaagaatcaagcttcctggttttctcattcaaatcctctcaagatttgaatagaattctatccaagaacccttggttcctcaataatggctttctaattgtggaaagatttgatggaattccacatgattggaacaaggttctcactcgcttccctattagtgggcgaattatgcagctgccaacccgatcgatcacactgggcaatatggagcgtctggccagttttgcgggcgaggtaattgaagttcaaaaggttgatactagggctgtacaaaaaaatttgtaaaccgcctaaaccgaa

SEQ ID NO: 123837 - DNA, 1328 bp, Cannabis sativa
ttgtttttggttttagataattctattcaatcctgttttttctaattattgtttgtgattttgttaatcttttcattactaattgtttgattggttaaagtttaattaatttataattttcccacagttataaataggggtatagtacaaatttttctaatattttgtactcattaattatttctccctatatatatatatattatgtttctagttctcctcattcgaagttgctcccctaaatatatctccaaattaacatgtaatgtgatttgtgaccatatctagcaaaaccaatacttgaagatttgttgtgatcacatgaagtatctctagggtttattaaaataataaagaaaaagggagtaatctttttatttcatatctttttctcaaattttctttaagagagtcgatcaatacattttttttttctgaatgacagtcaacattttttttttctgaatgacagtcaacattttttttttctattcacacgcttttcctcaaaagataatgtgaaatcatcaaaaaataatgtcattttatgaaagtaaaaaataataataataataataatgtttgatgtgagtaagagtacacttaatttgaagaattgtaaagtagtttttaccaaaaagtgagtttgaaaattaagaaagaaatgtgtgtatatgtcttcccttttcaatttaatgtatatattatgacccattgaaacaagtgcaagactgtgtggacttgcatggaaatgcaaacccataggaaaagaattaaagaaaccccattgcttctttagtggtcaacaaaaccaattttcttaattacttttaatctttggtgggggattaggtgctcctaattaatattccttcttgaaattttcatccacttcattatggttaccacattttaggacacataaatagtatatttacttagggtttgatcaattattggatcattttgatcatcatatgaatatatcttgtttagagggcgtgttatggaaaatgggtcaatgtttattgagatgggaagtaaagttggtatcttgaaatatgtgtactctcatcaaactaaaagcctatatataaatttgattctctacgtggaaacccaaatccacaaacttacacaactcttcacattatagaagtcaccactctatgaccaatggtctataatatatattgtttatgtataggttaattaagatttctgcccttgaactttgacatgtaccaaattatgtcccctgaacttttaaagttgttaaaaatgtctcctgaactattgagattgttggatttaaggacttttttcta

SEQ ID NO: 123838 - DNA, 2588 bp, Cannabis sativa
tcaaatcaccgagccacaaacccaaagaaggggatgtgtgcctggtcgggtgcccacaccaagcaaggggcaatgttgcctttgcacccgtacttcaggaagatggcagactactttcgcctctgtctgacccagtttactccgaagggcattaagtatctgtctgccctattcgtccactacgccacccagaagtggggtgtgccttcttcgtatgaggtcagttggttttttgacctgaagtctacccccaagcaaggcaggtcagggtaattctacatctctcagcagacttcaagtggttgacaggcaccgttgacaaggtcgtgagcaaaattgggaattttgttgacaagtattactttgtggaaggcatgggcaccacttatactcagttttagtagatccctatatattaccgtccacccctcacactggctcttagggacagagctcagaggattgttcaactactatatgatgcttggaatatcactttgttgacctcaaaggccaactttgtggagtacgggctttatccgatagattttatacctcagcctatgaatgagaggaagaggaagtccagtgctggccgggctgagggagctgagcaagagaaggagctcattcaactcaagtgtgaggataagttaaagggatgtgcgggagccaagcagcatgctcgggaggattctgagcaggagaaggagcttattcaacttaagcacgaggctaagttgaagggaggagccggagccgaacaacatgctcaagaatattcttagcaggaggatgaggctgaggaagagcaggaaagatcgcgcaaaaggaagaagaaacttttgaccgggcacaggcccatcgaacatacgatccagatcagagagcttggtctacctgctcggccatctacccctgtaaaaggaaaggggaaagccgttttggaggagcaagaagactcgtcggacgacgacgccccatcagtacttgttcgggaaaactcccctgccaaagtgcaaggtacttcatcttatttttaaccttcttaattatcatgccttcacatttttcatgctattttctaatcatgttacttttatttcgtgtagaagacatgatgtctcaaaaaatgctcgaagctttgaagaagagagtgggaggaagctcgggcttatctcctccggccaagaagtccaagggcggtgagacaaccccgtccaaagagaaggcatcagctgaagtggtcattgacctctctgaggaaaaaactattgtagactctcctgtcccaaaaatgactaagtccaaggattctcgagcaggtagctcagacaggccagagtaggcgagttgcggatctgagctgctcagaagtggatccgagcacatcaaggccccttctccaccacccatactgcacctagagaccaaaagaggcaaaaaaaaatgctcactcactatgtgactcggttgaatcctgaggtgaacgagcagctggctggggcagacaatgacctttcattgaagttggtgatgggaggagtcctgaaggagctttcaagggtaagtcctttctgatagtttcattttttccttcttcacttagttcaagtgttaatattctttctttgtacagaccagtctgaagatggcttatgcttattcccgagctaaatcggttgcgtctaagaatgccgtcatttccaacactattcggggggaagtggacttagccaggaaggatgacgaggaggcccaggttcagcttggggttgtcccgatagagctgggagaggttaataagaagcttcttgctgctaagaaaaaggtggccaaactgactcaggatctaccagtcatgccctccaccgaacagctcgaagccgacattgcctccttatctaaagaagtgaccagccttcaagaagaaagggagactctccggactcttttccgtaggttggaagaagagaagaaagccaaggaggaagaacttagagctgaggttgagaagtataagttagaggccaaaaagtagatatgtgaagtggagaggcttggagggaaagtgaatgccctagagacatctggtctcgagatttttttatgacttttggaaggccaatccctaggcatattttgaatacttgggcgataccaaagacatgtttctcgaatactgcgctgctcaggtggcctacggggaatctgaggcgaccacttccacctctccaactgatcaaaatgttgaagtgcccctcgctcagaaaaatgatcctccagcgccaactgacccagtcgacccgtataaagagcctgggactccagctatttgaatgctttctttttctatctttttttatctgttcggccataaggccttttcttaaagacaatgtgaccgaccaagcggtctttaaacttggaatttattttttatttttcagacaactagctgaccgggcagcctttaatctaaggtttgcatgcttttattatgtttaatgaatttcattctctgtttataattatcgtgcaattgtgtttattttattcttaccaaatgctttgtacaggtataggtg

SEQ ID NO: 123839 - DNA, 1559 bp, Cannabis sativa
  modified_base (380)..(385): a, c, t, g, unknown or other
aaacaaagagtgaaaactaaccgaaaatacgacccgaaacttagactaattttagcctaacactatgccaagttttaagaatttacactaagattatatttgattgagaataaaagagagataagatttttgtggatcttagacacaagtatacatatcattaacaataatattcaggtaagtgagattgtttccacgtggactgtagtgaagtgccaatcagttgaatttttgtttctattcggcaattgaataaataaaatttaaaactaaataaactaagcaaattaaataaaataaacaaataaaaggtttaacaatagatgtgaaattagacatatgatttcaattgctttgattacccaattattaacactaannnnnnattcttcttcctcctatatgatgacagataaattaacctaatttcttttcagatcattaaggtcctaaattgcatgcccactactgaatctctgagatagatcaacatacaattcacgttaagcaataatctaaaagtcacataagctatgcaaatatattcctttcacatcaaaacctatgtttattcatttagagtattcttaacattcacttttcagatttcacattaggatcataaatcatgtataaggtgattaagtttaaagatgcaataaacacaaagatgaataaatcaagcaatcaaggaagaaataacaatgaactaatattaactcataaaataattccaaacaatacccatcgcatccctaaatagggagtttagttcataattaaatctataattaaactagacacatataaaacataaaaaatcaagagaagagaaggaaactagatggaggattgtcacagattgtccaagttcgctccaagcttcttatttttctatttttagggttctataatgtctatctccctataatccacgaccctctttccttaaaaaagagttttcagcccaaaaacgagaaaagatgaagttctccttgacccgtacagagtcagcgccacgaccaccaatagccttgctgcaagggctatagaaagttgaattcaaggcatttttgtggccatctcgtgcatcaccataagttgtgctcctcgcagccacaaatattagtcgcggccaaaatgttcttgcttcgacctctctcaggaatatatataactttcacatacaaactccaaatgagttaattcaagatgcgttagaaatttgaaaaagagatctaaaacttttatgttttgacttttttctaaaatctgatcagaacatggtcgaatttaagcttgaagttccagctttattttcttacaaaattttctctattttatagatcattgttttctgaaatttgaccaatttatctattccaagcgtcaaaattttggaactaaagaagataagtgtaattctattccaaaaataatatcaaaaaagaaaaacaactataaaaagtgacctgaaactttagctaaaaatagcctaacacttttaattgttaattatgagacgtgtcatattgtaacgtccccgcttcaagcctcca

SEQ ID NO: 123840 - DNA, 1684 bp, Cannabis sativa
tttcttaattttttagcttatatgagtttttaattttattcttctcatttaatagctttaagttttgatttcccttattaaaatttgcctttacagttttcgtagtttaaaattttaaatttcatttaattggtattttatttaataaaacctttcctataccataccattttatcacaatttatattgcctatttcttttacaaaacctttcccttaccattttctcaagttttctgattaactctttgttgctctaccttcatctctccacactcagcgaatcgcgatgtaggcattggaatcaccactacctggtttgatcatctttctcttttcttttattttaaatttttattttatgcacgtttatctaaaaaattaactttaaattttttttaaaaaaaggaactatttttaaatactagatgttctactcattctctctatacgagagacgcttcttttatgagaatgtatcatttttctgttgcatacaaattacaattatctatttctctctttcttctttctaagttttctcttaattagattgtaaaatatgatttaaattttattaatctctctccctttctttgcttgcttctctgttaatttgattattcaatatgatttaaatttaataaaaataagtctccatgaatgtacttaatctgccactattttatttattggttggatcctaaataatagacagatttttatattcttttttttttttatgaaacgagatctttatagttctgaatccattcttttattttttggcaaggtcaattatctatttattgaattgattggttatgtagtttgcaaatgatacaatagaggtttgttaggcaacacatgtttcagtatatttcttggtggtaataagtcttccaagaactgctaatatttaaagtgatataagtatccagatatttcattaaatctggcaggtgttatggtactgcaattttatttttcttctcatatttggttcagatttatttttttagactaattgatctacagtttacatattaaaagaacaacacattcaaggaaatgagtcaatattttctttttctttttttttttagtttaggaataatgttttatggccaaaactaatttatggctttttagagcaaaactaattaatggctgtaggattgaaattatttgtatgatagtctatattttaagcttttttggaaaaaataaattctaattttaaacaaacactctattggtgataggtacataaatctacatttgcatatttaaaaatgttcaaagaaatgagtaaatgctttcttctttcttttaatggacttaaactaatttgtgacttattagagtgagtttaattagtggactatatgattttttataaatataacttttttaaaaaaaatcttatttatttcttacaaaaattttactttacaaagcaataattttcataaaggaaaataacattcaacagagttagtacaaggaagaaacttattcatgaagtgaacttgaatgtgggttgtaagctctaacaccaattagaaggtggagaggacaatttgtaggtatatttgtggctatacaagaagattttatgagactaaaaattgctgaggtgattatataaaatttgttagcaatgaaattattttcataatatt

SEQ ID NO: 123841 - DNA, 1099 bp, Cannabis sativa
ttacggagattttattgaattctcatattttcatttaagttgattaagtctttggtggattgttgtggaatatctttaaattgggtaggagagtttaaatggttatatgctgtagtcaatgttagagtatttgaaaagggcaaagatagacttaaaatctctctcttcttgaaaccccaaagaaacccaagcatagtttagagtctttcaacccaattatttcttcaaggatttaagtaagaattaagaaagaaaacacttagaagaataaaagcaatcctagttccattccctctttgaatttcaaggtttaagcttgattttaattatgtgattttgggaaattaggagtttagctatgtttgaattgtgttagaaactgttaaagcttgattttagttgtttacgactagtttttaaaagtagtagcaattgtagcaatatttgaggaagtttgagttttatgaactcaagctttgctcatccatagtgaatttttatgcacattgttttagatgcttttgggttgtggttatctttagaataccccaaatactattcttgaaagtttggtagcttttggttaaggtaggagttaaatttggggcctgaaaatgggaaatttttgagcctttgctgcccagaaaaaggttccaggaggaagcttctaaacaaggtccttccgaaaatggtccttcaggacaaggtccttcaaaaaaggtccttctggataggggtcttctaggcagggttttaccgagaaggtcaattttagtattttggccacaacttttcacacaagtgtccattttagatgtttatactgtttcaaagcttgtgaaaagctctatagtatagtactttaattagggccaaaataagtagtttattttagtgtgttttcaccacgtagtttggtagaaaatcctagattctatttgggttttaagaagtattttagaatatacacttatcagttttactctattgtgacttaaggtagcctctgattgtgacagtcagtggccccgtgatccgtaaggggaaataccaggtaagctgtgcaatcccacaccgcctggggaaggtcaagtgggat

SEQ ID NO: 123842 - DNA, 920 bp, Cannabis sativa
gatcgatcgaacggttagggttaaattaaaccttgattttcatatatgatcaccggttgtcaggtcagctgatgatatggaaaatgtctctgtactttcaatattctcatttgtttattattcttaagattaattaaatacgtaatgttttgttacttaattccattgtttttttcatagtgtattaatgttaattaaatacgttacttcgttatactatatactgagcatatacatagttcccttcatttttactattacttctactacttttttttctttctttcaagatttaatcaatgggttatatatataccatatttgctcagaacagagtatcatattgtgtactgataaaaaatgatatcaatttccaacttgtgaaaattaagttaatttgagcttattatttgcacaagttggagtataatatctatggtatgattttcatgtatatctataaggtcctactgtcactaataatgtttttaggatccaacgaaactgagtgacaaatactaatgctcataaagattactgcaagattattggggtcggaagataccctacactatgaaaaaggcctaattcttttttgtgtttttttttttgagagagagatgaagtgtggaatgaagtgtattctagtgcccatttgatcacttttcatactatatttgactaagattttaaaaataacaaatatgtatttatcttcataattaacgatggagacatattgaattgatcgatattgatgtacacatatatacatatacgtagctagctggggctctttttttttttgaagaaaagcgtgcttatattaaacaaaaggggttagacctcgcggtcattacaaaataacgaattgggcaaagaggaaatagggacgacgccaaacctctgatgggaaaatg

SEQ ID NO: 123843 - DNA, 670 bp, Cannabis sativa
  modified_base (609)..(626): a, c, t, g, unknown or other
aggactataacttgaaggtatagtcatacatggagaaatgtactatcgacatctaattggttgtaaaaaccaaccatgaactgcacatcctaagtctgattgttttctaaagcctctttctcatattccatagcattatcccatataggagtgcattgtgcttgttgaaaatatgtaggttcttgctgactagaaatggtaagaataatagctcaaaaattggggaaagcctggagtaatcaagtatgtggtgcaagggatgtgcagtgacagtcatgttgttttgtaatgaaacagaaagagcattagtggagagaaaacaataatattcattcaaatatgagggtttaactgaatgcctaacaggtctatctgaatgcttatgagaacctgagcttaaattaggaccaagggagatagaaggagaagtatctgaaatagcagaagatgaatctggtaaagagaaaaaagcttgatactcagggggaaggtctgcagagttcacaaaaggaaaaatagtttcatggaatgtaacatcctggagtaaaaactttgttggtattgagatctagaattttataagctttcattgttggaaattattttacnnnnnnnnnnnnnnnnnncacaagtatgtttattaacatcgtaaatatgaactttctaaaac

SEQ ID NO: 123844 - DNA, 2339 bp, Cannabis sativa
aaaaaatataaaatttattttatagatttaaataatataaattcattactcacattctaaaggattgaacttctttatacaaaatcggtcgtcttctgcagcctattgaaagactccatagtcaactcttgccatccaaacaagtgagagtgattattgtgatagagacgaaaatagaaaataaaaagtgtagggatttttgggcttacggacggcttggagggtgtgctccgacgacggcttggacggcaccgacggccagatttggccaaaaaaaaaactattttggctgagagagaggccaaatatggagagggttggaggaaaatggtgaagcagaggcagagcttggagtccaagttaaccttgactatgagcattggattgttagtaatcaactcttgatgggttgcacagctccatgactgaagccatagcaacagaggtaatggggtgttatacctctgcttctctttggagagccctagagaatctccatggagctcattctaagtccaaaatggatggcacaagaacgaccattcagattataagtaaaggtaacactaccatggttgagtatctttgacaaaaaaaaaaaaaaagcctgtgaccgtttggcacttgtaggggacccttagcttgaaactcaccttattgctaatattttatctggtttggatgttgactatctccctattgtgtcttaaatcgaggctcgtattagtaccacttggtaggagttacaggaattggtactcagtttttctagcaagattgaattgcatcataacttgaatggcaaccctaagtccacagccttgcctaatgtaaatttggccaacagatctcattacactagtcgcgaactaggacaaacaccaccactgaacacaccatctagtcgagggaactactccaacaacagtcgtggtggtaacactagaggaagaggttgtggatgtttcaatagtcgagggaactactccaacaacagtggtggtggtaacactagaggaagaggttgtggatgtttcaacaacaataacaactcaaaactcacttgccaagtttgtaggaagtttggtcactctgttgctatctgttacaataggtatgatgatacctatatgggaacagaccctcacaacaatagagcacagggaaaaccaaggccatcagcttttgttgctactcctaaacttatcaataatgatgcttggtatgcagacaataggtccagcaaccatgtcacaacagatggaggtaatctaaaccagaaacatgaatatggtggcaaggataagttaattgttggtaatggttatcccttaaccagcactcacattagatctggtacattgcctacaaaagaacctcttacatcccttggtttaaaagatgtctgaggtgtccttgatattattaaaaatctcataagtatatctcaactaacaaaagataatgatatacaattgaatttgactctcacgtttatgtcgtgaagcacaaggccacaagaaagtactacttcaagggatgcttagagatggcttgtaccaattcagctctattcctgtgaagtttaatcagcccgattcggtcactaaactagtagttgtctactctgcaaatactatccaacagtcaaattttcttttcgagaatgatgctcggcatcaacgtttaggtcatccatctgataggtttcttcgacttgtcttaaactctagcaatgtaccagtttgaattaatgaaaaattaagtttctgtgatgcatgtcaatattgaaaatctcatgctccacctttcaaattgtttaacagtaaggccacaaaaatggttgaattaatccactcagatttatggggaccttccccagttaattccaacactaacttcaaattttacatccattttgttaatgactacagttggttatatcccctcaaacaaaaattagatgccttaaatgcctttattcaatttaaaaccatggctgaaaattaatttgaaactctttgaagaccctaccaaaccaaactatgtgtataaattgcacaaatctttgtatggcctaaaataagcaccaagggcatgttttaacaggttgaaaggcactttaattggctggaagtttaaaaaatttaaagttgacacttcccttatctattacaaggatgacaaaaaaatcattttagtgctcatctatgtagatgatataccttagtgacatggaacaatggagacaaattaaaagagtttatcattcaactcaacaagttgttttcactcaaagacttgtgggatctgttggaatttattttactaggatctta

SEQ ID NO: 123845 - DNA, 1280 bp, Cannabis sativa
accaggattcaagagcaacagatcaaaagatccagcaaccaaccaagtgtaggctaatactgaatctaatccttctagtgaagaaagtcacaccttgttgcctcaactcagtgtgtctcaatatcagcaattgctgaatcttcttgctaatcaaccgagtaatataactgctactgatcctagctcatcttcgaaagcaacaggtattatcttgtccaatcattatgttaatcctaaaaatgaatcttggataatagatttgggagctacgagacatatttgcaacaacattaagagttttcaatatatctgtcctatccctaaagtcaggttaattctacccaataatgagtttctttttgttcaacaaagtggttctattgttattaacaaagatctcactttgactgatgttctttatgcaccaagtttcaaatacaatattatctctgtgagtagtttaaccagctgcaattcgattaatgtcaactttactactaccaattttcacatacaggacaaactccatctgaaggagattggcagaggtagcagcagcaatggcctttacaccttggatactaccaaatctgagaatgttctatctgccacagctgacctatggcattctagattaggacatttatcccagaaaagattggctctattaagcaatcaattgaattatgttgttaatactctacataaacatactccttgttacatttgccctttgacaaaacaaagaaaattaccttttcctaataagaattcttttgctaataacagatttgatcttgttcattgtgatacatggggcccctatcatatcccatctgattcaaactacaagtattttcttactctagtagatgatcacactagattcacttgtgtttatcttacgcaataaaaatctgaagttgctagtattgtaccacaattcatttcttatgttcaaactcaatttcattgcactatcaagcgttttcgatttgacaatgcacctgaattagtgtttaaagatctctttgctaaacttggtatattacatgatttcacttgcatagaaacgcctgaataaaatactatagctgaaagaaaacatcagcacttattaaatgtttctcgtgctctctattttcaagctaatatgcctatcaagctctggtccgagtgtattatgacagccacttttctaataaactgcacccctactcctcttcttaaaactaagactgttggaaatattttaccaggatctagatgttgggttttat

SEQ ID NO: 123846 - DNA, 2141 bp, Cannabis sativa
ctatgaggccaaggaattttcctgaccctcctccaaactaacacttaagggggttgagcttcatgttgtactctcaaaggatcttgaagcattcatttaggtgttccatgtgcccccatcctttttggatttgaccagcatgttgtccacatagacctcaatgttgtggccaataagatccttaaacatcttatttataggtctctagtaagtggcctctgtgtttttcaattcgaattgcatgactttatggtagtagaagcccaaatctttcatgaaacttgtatgttcttggtctgatgaatgtattttgatttgattgtagcatcagttgatcaatccttggaagtgggaatcattgtttttgacacgcattattcaagtttgtgaagtctatgcactagtactggattagataccaagagcgggtagaaagcttcaatgatgaaatcactggcgcttagccttttgactacatccttcaaagcttgtgtgctccttatccagtaacctcctctttttttattgtacacgtcggaagtttggatctatatttagggcatgagtcattatagatgggtctattcccaccatgtcttcatgtgaccacgcaaagatgtcaaggtttttcgttagaaattttatcaaggctcattttatttctggcactaaacggttagaagagtggggttgatctccacttcttccaactcctctaccggtccaaagctttctacaggatccccaaagcgaggatctagatttgcctcccctctttaggatggacttgatttctttttgttgagctattaatatgaatcttttctttctttgcttagacaaagccaagttgtagcagcgtcgagcagattgttgatctctccttaggcatcccactttatgcgttgttggaaactttaggcataggtggtagactggtgttactgcatttaggtcgtataaggctgactgacctatcattgcattgaaggtcgatggcacgttgattaccaccaatatttccatatgtgttcttgttctgggacttgctctaactattagaggcagttggatatatcccaagggtgcaaggccttggccaaaaacgccgtacattagttgtgtatagagtgctagatctgttaactagagccccatcttttcataagttgatttgagaagaatgttggaagaggctccgttatcaaccatgaacctcacaactgtcatgttccctatatatgcagttatgaccagagggtcattgtgatgtaacctgacttgggcaacatctccttctgtgaaatatatggcaggctctccaagcttgaatttcttaaagtctctctcttccacaactaggatatcgtttttttgctcatgatggaggatccgagcataaaattctctggcttaacttgggtctgcctattatgacccctaggtgacccgtcgctggtggtggcattgggtctctgttctgaggagcttttacctgagtttggttgtttgtatataatgacatagatggggattatttttccttattaggatttcaatctccctattgaagtgtagacactcatttgtgtcatggacaaagtcattctaaaatcgacaaaacttagaggtgtccctcttactgatatcctccttaatgggaggaggcttctttgattggacatcatcttgagtagcagtgtaaattgtctcacgagttttggttaggagggtgaagaaagtgtacttctcctccttctccctttggttgcatggtgttggggaagtgttgaacttccattttttgccacagccttggtaagaattgttgttgttgcatttgactacattgttcttaatgttggaggcctggccggtattgctcgtgctggctgcatattggccatggcttagggttgcatggcactctgagcctatctgctaatgacctgcctccctgtctgggcttgttggacaacttcttcaaactttatgaagccatcagctcgctcgaggaactctttcatattgtttgttgagatcttcttgatatctttctacaatgcactcaacggtaagatacctccttgtatgaccgtttaataaccttcttctgttaggcctttgaccttactggcctc

SEQ ID NO: 123847 - DNA, 828 bp, Cannabis sativa
ttccaaacgcaacctaaatataatttctccaagtgatactcctatttgttcattctaaatttatataaatttaatttttttaataaacttaatttatttgaccattaatatccatgcttttaataaatgatgattcttcataacaaaaaggtcatcttgaaaatcaaaggaaagacaatacataaccagtatcgtacgtacatagaatatcaaaacttatctttttgtcatttattttcaaaacagaaagataaaaaattaattaattttatatttttctctcctaagtttgttagctaattaatatgatgatttggagatataaataatataacttaattattattattattaaaaattaaatttaaatatttatctatatttaaaaattaaacttaaatacttatctcgtaattaagatttattatataattttataaataaaatatatatttattatttatttatatatatatatgtgtgcttaaataaataaacaaaataaaatataaatgtttagtagtgaatagtgttgtatacacaagtcaaactttttgacatgacacgaaatcagcacgagcctggaaagcacaagcatgtctaggaacaaaaaaaatacggttttagttgggcacgacacgatgctacaaattagcacaacacaacagagaaacatgaaatgcatgatacgtaataaactagcttgaaaaacacgatacccaaaaaacacaacacaatatattaaaaaatcttaattataatttattaatatgaatttatcagttaaaataactacaaaacttaaataaaatactgaatattataatt

SEQ ID NO: 123848 - DNA, 1845 bp, Cannabis sativa
  modified_base (47)..(65): a, c, t, g, unknown or other
  modified_base (159)..(163): a, c, t, g, unknown or other
taaatgttatttctgatctatctaaataagtaaatctgattatattnnnnnnnnnnnnnnnnnnngcataaaacccaacagtaacaatatttgaaaagtaggttaagatatttctattttaaatagatatttacaaaatatcttaactagaatttaaannnnngttgttagaaaatatttaaaaaatatttaaaatctaacaaactcctttgaaatttaggttttaaattcaaatatcaactaatttttaaataatatctagtttatttaaatttaagttaaattaaatatccaataaaataatataacataatatcttattttgacaaatttagatattaatattatatttcaaatcttataatttaataaattaaatttaacaaaataaaaaatttgaaaaaaagaaagaaagatattttgatggttaggatattattttatttaaaaatatcttaaatttaaaaatgttatggttaggtaaccttaaaatatttattaaaactaaaattttaatcaagataaatatctaataagggaaaatgtcaaaactaatattttcttaattttataatttacataataaaatatattttaaaaataacaaattttaaaaatctgatatagttagctatttgaaattctaactagattatcttgttttattaatattttattgtcaaaataagatcattttaaattttatatataaaatatgtaaatatttgatcttataattaaaattaataaaagaaagaaaaaataattaaatttaaaaaataaccataaaagcaagtttgtgaaaaaaaatcaaattttcaaactcaaagctcactaatatctaaaactaataaaaattaattttattctgattattagatttttatttgaaaatttagattcttcacaaaattctaccaaaatttatattttgtttcattcaaataattattgaaagttgaaaaatcacaaaaataagatgacacaggagactatgcatttgcaatgcatactccctgcgggcgcatagagggctgttgggcatgacaattgggtgcatgcagcctcgtgtgaccgagaaaccttggcatggttgaggtttagacatcgcgtgtctgagaaaacttggacaggttccctgtctgaatctcaatcatgaccgagtgagcactaagctccgcgtgcgcacgtgcaccttcccttagatattttgtttttcaaactttaacaaaaaatcataactaatcaaataaaaattcaaattaagttctgtaaaagcgtaaattcattaatttttcatctactttcacgaaaaaatacttctagtacaaaactaaaaatatgtttcatctaaaattcgtaattcacaaacattcatcaaataagcatataaatcaacatgaacacatccaaatcatcacaattattgttttaaatccatatttaatgaaagtaaatcattaccatggctgtaatgccctgtccaacagggacgccatgtgtgtacttttatgaagttactctatcactaatttatataattataccaaatagtgcggttaattaaaatctttcaatttaataacaaatttttataaaagttaagtattattatctacgcgaacccccttttatcaaaatatttacattgaggactaaaagttcttttacaagataagtttatatttcaaaatacagtcaaaatggaacattctgtacaccgggtcgtggcaccgcgactaatatgtacattgttgctgcgacctcagactcatggttgctcgaccttagccttccctttacctgaatcatttagcacccgtgagtcacagagactcagcaaga

SEQ ID NO: 123849 - DNA, 917 bp, Cannabis sativa
taagtggtgagacattctggacgacgtgctcaagatgccagcttttacaccagtttgagaggaagtatttgggacataatttggtttgccggagctgtcggaagtcctttgaggctgtagaggttgggaatggtgagactgctaagcataaatttagggttagaagtgaaaggttgaagagtaagaatttggatggtgatgagagaattgcaggttggattccaaaatcaaaactaagtaaggttggattgggaaggagccaaatggaattgggcaatgagagagtgaagagtgttgaattgaagaaaaaagatggagatgtgaagaagggtgttggtggtggtgaatggagtggagggagattgaggaagagaatgagtagtgttggcgatgtcatggagaggtctcaaccaaagagggcaagaattgatgaagaaacaatgacactggctgaattacggtctgaaatcaagagcaaaacaagacaggaaaagatgtcgaaattgaaggtgaatgaagaaaaagagaaggcaaaaagacaaattgaagaaaaacagaaggcaaaaaaggagaaggaagaaaaggagagaacaaagaaggtgaatgaagaaaaagaaaaggaagaaaaggagagagcgaagaaggtgaatgaagaaaaagagaaggataaaaaggagagagcaaggaaggagaatgaaaaaaaggagagtgagaaaagtgagagggcaaaggagaaggagataaaggagagggctaagaaggtgaatgaaaaaaaagagagggcaaagaaggagagcgataaaaaaagatctgataattcaaaggaaagcaaagattctgagactcaaaggtgctcattgttaaagaagagcaaggacttacaatcaatgaagcatgggactttagataagattagg

SEQ ID NO: 123850 - DNA, 1898 bp, Cannabis sativa
aaggaccgataaatctagggctcagcttccctttcttcccaaatctacgcacccctttcataggtgatactcgaagaaataacgagtctcccacctagaattcaatatccttacgcttcgaatcgatgtagattttctgtctactttgtgaagtgagcaacgagatccaatcttttcaatggctttactagccctttgaaccaattcaagcccatggtaacgtctctcacaagtctcatcccagtggataggtgatcaacattttttactatataacatctcataaggtgaaataccgatggtactctgataactgttattatatgaaagctcaatcaaggggtaggaatttgctacaagatacctcaaaatctatcacacatgcccgcagcatgtcttctagtatctgaatagttctttcagactggccatctgtctaaggataaaaagttgtactgaatgctaacttagtaaccatagctttctgtagacttttctagattttaaaagtaaattttggatcatgatttgaaataatcgactttgaagcaccatggagtcttactatttccttaatgtataatttgacatactggtccacagtataggtcacccggacatgcaagaagtgtgttgacttagtgaatatatccactacaacccaaacagaatcatgtaacccagtagtcctaggtaaacgtaccacaaagtccacgattatgtcttctcacttccatacaggtattctcaaaggctggagtaaacctactagcctttgatgttcagcttttacttcctgacaggttaaacacttcgagacatattcaacaatatcacttttcatttctagccactaatatagtgccttgacgtcatatacatctttattgttcccgaaagtaaggaatatggagtagtattaaactcatcaagaatttcccttttaattcgatcatttgctgggacacaaactcaatccttatacctcaataatccacttagagttacagtaaaatcctttatagtatcagtcttaagtttctttccaagttcaatcaatttgggatcactttgttggccaatctttattctttatagtaaatcagattgtagtgtaatgtttgccaatttcctaaccacgaactcaatctatgccatattcatatcttcagccaatcttagagagatttgcattaattcatagatttgccttggatctttccgactaagcgcatctaccaccatgtttactttaccaagatggtagaggatttcacaatcatagtccttgagcaactctaaccatcgtcgttgtctcatattcaattccttttgagtgaagaagtatttcaggcttttgtgattagtgtaaatttcacacttttcaccatataagtaatgacgccaaacttttagggcaaaaactactgcagccagttctatatcatgagtgggataacgctgttcataatctttcaactgccaagaggcataggcaataaccttccctaattgcattaacatgctacccaagcttttcatcgaggcatcacagtatatcacaaacatttcgtcactgattggcaagctcagaactggtgcgataattaatctctcctgtaacttctggaaattgtttttcgcatttattaatccatgcaaacttacaattcttttgggtcagcttggtcaaaggggtagcaatcttggcaaaaccttccacaaatctcttatagaacccaaccaatcctaagaaacttctaacttcaattgctgtcttaggtcgtggcgaattccgaacagcttcaattttcgccgaatctactgaaattccttctgataactttgtgattgtgtttattaatgatatcctagtttattctaaattagaggaagaa

SEQ ID NO: 123851 - DNA, 774 bp, Cannabis sativa
  modified_base (78)..(107): a, c, t, g, unknown or other
tcgcgactgttagaagtcaaccgatcgaattcggggttcatggtggttcattgtcgatggaggattggggttcgtcgnnnnnnnnnnnnnnnnnnnnnnnnnnnnnnttttatttgttttgaaattggtctataattttttaggttcagttcttcaatggaggattgggggttcgttagtttcgttcacataaaactgattgtgaattttttttatttgttttgaaattggtccgtaattgttttaggcatttttcaagttgtagtgatagtattgtatgatttttttagctatgtaatattgatttaactgaaattaattttgtttgaataatttgtatacatatataaggcaatgcttaatattatatacttattttgattaattattttttgtaatattttgtataatatttgtatatttatttttttacataaatatattatttaatattatagccaaagaaaaattaaatatagccatactaattataaaaaattgtgaaaataaataaaaaaaaaataacagcatagatacagtgacgtgcgataagagtagctgttaatttaaaagtctgacaaccctatagtgacgcgcggtgagtgattctaaatgggtttagtgacacatttgtagtgtcactaaatactatctttccagtcacctacattaggaacacgcgaaactcatttttgtagtagtgatataattaatgaactttgaatatacattgaattctaccaatatttcaaaaaaaaaagacaataatttaac

SEQ ID NO: 123852 - DNA, 867 bp, Cannabis sativa
ctatttagaaaatatatagtttagctcactatctaatattaatacaatatgtttggttgatgatagttagtggtgatttcatttcttaataataaatggacggttctccattctcctaacaaaatatcttcaattcaacgtactctttccccaaaaaaaacaaccacgaaagcgacgtcgtttccatctcctaccgttcaatttttccaaattaataattacaaaaagaaatagtaaaataaaattgatagtatgaaatgaaaatatattttcttccttaaaataaaaactgaaaaaagaggttagtttatttgtttgtttggcaatccccatacttgtagcaactaagtaggtcccaccattttactctgctctcagtcccaatttataaacaaaattatctcatttttttttgtgttgggaaaattgttaaaatgagtgtatccatgatccacattactcattccaatcttttttggctataccatcacatgctagggcattattttaataattcaaaataattttgtttcacaattgctgattatttatttttaaagtaaattataagaggatttaatgtttctctttatttttataagtatgtgatataataagcttaaattgtatttgttagaaagttaaatttttatgaactactcacaaattataacaacatacattataaaatccaattttttactgttttacgttcaacaaagcatttttttttttttacatttttaggatatttataaaaataacacaaaaataataaaaataagatttaacaacaacaaaaaataacatacaaataacaaaaaataaacgacaaataaacaaaagtacaatataaaaatatattaa

SEQ ID NO: 123853 - DNA, 2282 bp, Cannabis sativa
tatattagactctgatcccaacctaaaccttgaaacccggacttggaccctggcttcaactccaaacctagactcgatccccgatcctggcctcagacttggacctgacataaataaaattaacaaatgaaaatgaaatatatagaacacacatttgttttctgctttaaaaattgaaaaataaaagttgttatagaacacatttttatttttcaaaagtataattttaaaaacaaaatttcacttgcatttttgggattaaaaaatttaaaaacaaaattgttaccaaacgatatttgaaatgccaacaacgattaaatttttaattaatcatagaataattgtggctacattttttatctagttttatttaggattaattgtggctaaattacctaaattttatgatatgttacccaaaatatttaacaagaaagtgctttagtaatagattttaaggtatattctatgaaaagtcatgtcccttgacatatgtatggtctctctattgtagagcgtttttggtcatttgcttgtttgttttcttttgtggttcttgaatgttttttccaaatttttgttttctctttctatgatggcgtctagtaatggtacaatgaaggaccttgaaaacagatgggatacaatctgtctggaggaagaagaggaaaaagaagagattctagatgatgtggaggatgatatttctgagtttgatgcacaatggagtttggcagggcaattactctcagggaagatctcagactataaaatatttcaaaacataatagttgatctatgaaagctaggcaagggaattacagtgtagatccttgagcaaaaccagttcttattccaattctaccatgagattgatattcaaaggattcttaacggtagtccgtggatttatgatcaaaagtaattgatatgtatattcaaatacatgatttataatctagctttaagatagatcaggtggtttaaaaagcaggaaagacatagacgtgttcaacagttcaaatccgaataattttaaaggcgtttggcatgattatctcaaagtaagagtttcttttcctctggaaaaaactttgaaaaggtgaatgaaatttcagaaatgagacagtaaagcctttggggtaagttttaaatacgagaaagttcctacgttctatttcatctatggtattataggccacttggagaatttccaaggaaaattttatgagactccattagaaaatattacaaaaccatacgacctcttcatgaaagctccaccaaaaagaaaaaatttccgtaccgcttctccatagctctggcaaagtgatttaggcttgccaatcaactccgaagagagtaatgacggggtatctggtgtaaattttatcctagatatggtgcatactgttagggagtaaatcgtgaaaaataatcaatataaaaatttccatgtcagagaaactgattgtccacatgactgaggaatgcaagcacaaaaaaattatggatataaatgagccagctattttggtcaaagaaaataatgctttgttttcttctaacatgtacttatccatttctaaactaaaaaggaagcgtgtgggtacaacaattagaggtgggcctactgagaactcatgagaagaaatagatcacgaagaaaattcttatgttgtggaattggatggtctttcaaaaaaatggggaaaaggtgggctctggtgttcaagcccaccaaacattattgaaaaaccaagtgtttgcaaatgccaataataaatactaaaatataaaactgtatacgcttgcagatgcagaatataattctgttactgcagaaactagttttgcagcgacaaaacagaacacacagaatataaaaatacttgcagaaaattaaatcacttgacacaagagatttgtacgtggtatcagtgttctttcaaacaatactagtccatgggaccacgcccagagaatgaaatcaattagtaaagtatcaaagattacaaaagaaattgacttaaacaaatttagactccctctagtgatttaccgcaaccctttgtaatccaccttgctaatctgatctatgaaacacaccaaatagtaaactcccttcagctattgatgtgtgcttacttcctcctaaagtaaggcttaaacaaatgttctcccgaagatatgctcacttcctcccgaaatgagacttggaaaaatcttctcccgaagacccacacttgttcaaggcttctcttcaacctattctatgaata

SEQ ID NO: 123854 - DNA, 1406 bp, Cannabis sativa
ataataaacattagtttaatctaacctaattctcatgatctcataataaaaccgctaaaaactaaaatttattcaatatgcattgacaattttattagcatttaaaaagaaaaaaattagtattttagatctatgattctttttctttaatctcatagctgaatgtatattaaattaattaatatatatttttaaataaatatattaaatatacataattataaatatattttaaaaatatataaatataattggatgaccatttgatgatatttgatcggtttggtcggttatccatatgatcgggtgtcccgtccaacaaccaatccgatctgatccgattggattttcaaaatttacatccgatccgatccaattatgattggatatctgattctattagatttgttgggattggattggatgactttctgcacacccctagtgtcaactatctacgagattgtattgcatttctaggaaaaaaatcgcactataacaggtacaaaatagtaccctgaactcaattttcataaaaaaaaaatataaaacttaaaaattgttcatctcaatgtgttatgaccagactgattgtattacatatgttcgtgttagaaaattaggctagttatattaaaaaaaaaaattaacgaaaaattgagtttagggtagtattttataccatattatgaaatatgtacatggtccaatttattatttaaaaaaaaaagagtttgatcggtaacttttactaaatataatattgaaaagggtatttacttttttcttttatgtggttacataagtagtttatggttgaatttgttcattgtaattttattagtattgttattaggcactttaaggtgcttaacaccatacagatgaggcacgttgtgaatggttaacggtttcttatattatttattaaattaaaaaaatgtgaaacccaatattaaattacaccaacaacactttgatatctcttataatgcttgacacttcaaactattccttaccatttttctaatactattaattatttatttttagtgtgttgtatcgacagtaaaataatgaataacacgtatagattcctttttctttgtaagttcttacattttatcacaactaataaatattttgtaattcattcgaaaaaatattttgtaattgtacataagaacttaaagaagtgtgttgtaaggcacaatacatttgaattcttaatagtctgaatatacccacttaaaatttgcatactacaatttataaatagttgaatttaaaattatgtcctccatattttaatttaaatataaaaacatttaaattttctatatttgtaaaatatgatctgaagtgcctagcagtgttaaaaatggaatctaaataattaaatttga

SEQ ID NO: 123855 - DNA, 882 bp, Cannabis sativa
  modified_base (300)..(319): a, c, t, g, unknown or other
  modified_base (769)..(773): a, c, t, g, unknown or other
aaaattcacccaataatttctcataaactaagaattctgttatatagctacattttatatagaataaataattaaaaaaacaataaaattaagggttaaactaaattatatttattattgcttgttgtagattttttttttctaagaatttttagggtgtaagccgtttgaagtagattagtttttagattaattaaagtaaaaaaatgggaaaaaaagaagaagaagaaaagagttgaataaaattattttaaagtaacacatataaatggatcttgtataataataataataataatnnnnnnnnnnnnnnnnnnnntaataataataataataatcaagtgtatagtttttttttattcaatttttaattttttaattaattaataaaataatattatatacttaataaaaaattcaaaaaataggaaaattaatcaaacaatatttataaacttaataaaaaattaaaataatgagataattaatgagagaataaataaaagtatttaggatgattatagagcgtcatatgaccatcttatttttcttatttatatatatagaagattgatatatatagattgatagattgaataattatttaatttaatattattaatttaaataatattttatttattatttttttaaatttaaaaaaataattaatttaagatagatatttttatagaaaatttattataataatagtaaaatattaatttgtaaatttatgctctaataaaatattaaaaattgagagaannnnngagaaaaaagaaaaatagctttagagaaattttagaccgccacgttagcgcctcatacttctcctttatatacatactagcaaaaaactacgtgcgaggcacgtatact

SEQ ID NO: 123856 - DNA, 827 bp, Cannabis sativa
  modified_base (510)..(512): a, c, t, g, unknown or other
agattgtacatatcgagacaattcgacctagagtgttggatcttcgggacagctagggctcacaattttgtagtcattgtgcgacatcttttgattatgtacagttgaaaattgtagatacgagatcctaaattttataaatgtaattgtacagttgaaaagtactataacacgcctaaaactaataagatgttacaactcaactttgtccaatttaatttcaaacattattaatgctttatcttcatatcctaatgtatctctattttttatctttgtgaatggaaatagtttagctcgtaacttagcaaggaattcattagacttagataaggagtggattgagagaataatttctcattcttaacttttgtattataactcagtacttgttcatcatttaattgaagttgcaatctttttaaaaaaaatacactactataaaaatagtttttctcgatatttttaaacagtcgttttaagtattctcgtcggtttctataaccgtcnnntatacgaccgtcgtaaaatgggcaaaataggtgacggtttaaaataatcgcaaatgtggacttcccgactgtttaaaatcgttgcctataccctattataggcgacagttttaaaccgtcgggaatgtaaaaaaaaaaagagagagagaaaaaaatacatatttttttgccattaaaatttgcattttaatggtagaaaaatctgtattttctcctctttttttttcctgcattagctttataattttatctaaattaaaataaaacaactaattaattttgttacaataacaactaactttaaaaaaatattaa

SEQ ID NO: 123857 - DNA, 2706 bp, Cannabis sativa
  modified_base (2630)..(2677): a, c, t, g, unknown or other
ggcataaaacccaacaattataaatatcccaagtattcttcttggcagtaggttcctgtcctagatgaggagaaagctcaagattgcatgcctcgagcacaatacctccagaatacttcccctcaggaagtcgaagaagtagcatcccgaggtagtcaatgtggttggtcacccacaatgcttagggtcgagcgcaatactctagtttcatttcgagatagtcgctataacttttacacttggaatcccctccttatagatcgtattacacataggtttgatagttggtatcccaggttccacgtccaaattaactatactgagtcatactatggtatagtcgagcagtacggtaccatgacagatagggcgagtcatttagacgcgagctgggatttagaaccaagtaattcctatgatatattcaggatcacaggttgtagggattttagtggatattatagtccttcttcctcgtcttctagtaattatggtaaattccttaggcaggaaattatgccccaatctccccttttacttgattttcaataaatgctaatactttatcttgtctcacagaaatgaatttcgagggtctcgtccaccgaaagggaaagaagaggttgaccatcttggaggcctcatcggggactcgaggtggaacccctaaagtggttcaagaagacaatgactaacaagaagcgagcctcccagaatgctaatctcgaggtctctgaaacagacaccgaggatcaaatccctcctccgatccctacaagtaccgacgagcctacccctaaagcgatccaagcttctgcctcctcgagccaagcactcaaaactttggctgtagaggctagaaaaactagctcagagtacaccgcagagtttagtgcgacatgctgtcgtcatttcaagtctttcctccccccatgaatgggatttgatcaatcatggggatctgggggaaatgctcaccaggagtttatctcagaacctctcattaaatgtccttaccttcatctgatgacttctttttccttctatccttcaaaagacttatgtatttttgtttgttggtccagacatctttcatttcttttgtcgcccagtggggaggcatggataagatcaagtatctaaaggatgaggtccagaacttgataggccagcgcgaggttgtggccaagcaatggaatgatgcctaactagagattactttccctactaaagatgtcgaaaggatgaagaagaatcttgaagctgccaagaaggaggcaaaggacaagaccgatgcatgcaagaagctccaaggggaacttgatgctgccaaggtaacacttgatagaaaagaggttgaaactcttgaacgatgcaacgtcattggcctccgtaccatttaccaagcttcgatggaaaatctggatacaagtttgttggaagaatctgaggaggaaatcatggccttctgttagaagactaataaggaggaagaagatgtcgaggcaacagcagaagaagaactgtctaaatttcctactatgtaggcttggtttttattaattttattttatttaggcaaatgaccttaaggacgagacaatggttttccccttgtggcacttttttaaagagaacttcaaggttggatggccaactttgttattattttatctatagtgaatgcttcgtactcttatatttgaacttaatatatatgtttgtttgcttatgttttcaatcacaacttaaacatttatattttgatcaaatgcaaaatactttaagaattcccattgctcatatttccctttgatattatttgagtagttagtgatctactatgtgcacgagcagttataatctgttctgctttagatttgcgagcagttatcaattcagctttgcataaatagttataattttttttttgataattgaatgagatgtattgtataaaaccaatcatttgtacatcctaagagcacctcaagaagaggcctcaatattcaaagctatttacaaacatgaatcccctttaaaaaaaaaattgctatgccgtttttcctctctttttttagtgcaaagattgtatccattctttatcatggttgcttattctcttaggttggtacattgtgagtctcatcttcaatttcctttctatcttttcacttatcctccttgccactggctgctcccctttccaaatcacagcatttcttgctgtccaaatatgataaaccaacgaagctacagcagcagcaagaacttgttttttacctcagctgagtttagatttttcgatccatttgatgatgtggggcaagctaacactgcttacactccatcccaaccactcttttagcctgttaaaacattcacctacatatttacattcaaaaaataagtgatcgattgtttcttgtccatcttggcataggcagcaatccccatccacctgtaatccaatcttcaacagcctatcctttattttcaatctcccatgcattgctagccaaagaataaagcaatgtttaggcaagcttagccttgcccaaacctctctactccaattaactttactcaaagaaggagaaagggttttgtgttggatatttattttaccnnnnnnnnnnnnnnnnnnnnnnnnnnnnnnnnnnnnnnnnnnnnnnnngaactttctaaaacgataaatgaaacaca

SEQ ID NO: 123858 - DNA, 1595 bp, Cannabis sativa
  modified_base (1538)..(1569): a, c, t, g, unknown or other
tattttcccattattaatatatatatatatttaattatatgattcaaatacatataatatataattataataataatataaaaaaagcatgaaaaccatgcatgcatgcatatatacattgtgaattaattattctttgcatgcatatatgtgttaccacaaagtgattaatttcttattatttggggtcaaatccaatccatttgtgctaattaattaataaaattgcatcaatcctctttgtatttttaaattatccttattgtttttgttagacacaattaatatatatttatattaatatgtaattaagtttgtaacttttttaatctccttctcctctctcacatcaaggctgtctctcttttttatctttaatttaaatcaaaagactttgtagctatagcccagaaataaagaaagaatattattataactgccgttcatccttttaagaaacagatgtaactgaattatatatatatatatatatttatatatattttatacaaaaattatcctcattcatatatgactatatatatatatatacttacttaaccagtttgtaaaaaggtaatatatgaaaacaaaggtttcgtttttcaaaaaagataaagaggaggacttggtgtatgtctttctcctttttccctttttaattaattgttgattttttttcttaatatataatttacaccattaatattacttttaagtatttggacaggtattaattaataattaatacatataattatacaataccaaccaaattatgttggttaaacactctatttttcaactcaataaatcaattttactgccctagatgacttgtattataaaccatgtatatatatgcactctctaattaattatattattatatataatgaatgaacatgatgcatggatgcattatgattgagtatgatgtagagcttaccctcaaatattatatagttgacattttaataatagacaacattaattacgtggtcttcgatttgctgccatatatattactatgcttacctaaaccaaagaaaatatataaataaaaattcaaataatgaagaaaacagagattgactatacatatagctaatatatatatatagtgcgatcttgtcttttaggttcatatatcacattattgatgcctgatttatcgcttattttgctatccaactcatatatatacatatttatatatcatataattaattccatgcttacttattaataattctacccatattattcatgaaaagtttcaaggtccactccattgacttttgcccctaaatcgtacattatgtaatatagggccggttctgaaggtaggcgagctagctgtaagtctcgagtccccgaatattcaagatttcaaaattatgaaaaaaaaaattataaatatataaataaaatattaaataaggaaaaaatattttaaacaatgccattacactaaaataatagtttatatataattacaatgtataatttaaaactctaagggctcgtttggaacnnnnnnnnnnnnnnnnnnnnnnnnnnnnnnnntatattgaattggattatatatcata

SEQ ID NO: 123859 - DNA, 622 bp, Cannabis sativa
caaatagtggcaaaacaaaaatttgggcacacacatcaaaatgtgtacaaaattttacaaatatataaagtgttatttatttaaaaataataaataaataaatccaaagtgtcatcttatcacaaacaccgttttgagggggaaaatgttatctacaccacgatctggactttggttatacatttaccaatcataaatggccaactcatgttcagaggctttctcttaaaaaatttccgttgactgacaataaaaatgaaaattatcatatccacgtggctattatggccattgcaattggtaatcccaatgtaactaactaatattatcctttgaatgaaaagggataagccttcctacaatcacttgcaacgcaagtgcgtgtgtgagacattgcttcaatgctattttttttttaaaaaaaattaatgtattaatgtattatagatcacgttaatattatttagtgattttacaatgtaattcttaaaaagagtctactaatacacttttatttattttgacatctagataaacttttaagtttaattttttttatattcatttacgttataattatttaaaatatcttacaaaactttaagaaatttagaataattta

SEQ ID NO: 123860 - DNA, 631 bp, Cannabis sativa
gattccttgtgaaaaattaagtaattttgttttttatggaactcgattcggataaaaattgaggaagttatgaaggtttgaaaatcgggtgccatggctaccgaagcttggtgtcgcacgtaccagaagcttcggacaaggcacacatccgcgcgtgtgatggggacaaattccctgtctgaagtgcacgcacgcctcgttcagacaacacccgagtgccccaattgatgctgcacctgactgaggtttctcggtcaaggaggctgcaactccttcactccgcgcgcgtccgaggcattttgcaacctggcagccagcacacctaaaatccggttttcatgggatttttttcctaattttgaattttgccaatttcaaaacccaattttaaaataaaatattatttttcatatatttaaacttaaatatcaatttttaaatttaaaatattatttttaatatatttaaacttaaatatcaatttttaaattaataatattaattttaatagattactataaattttttatattttgagttttaaatttaaatatttattattttattttttttttaaattatggtcagatttaaaatttgttaatttctttaatgtttatatattatttaa

SEQ ID NO: 123861 - DNA, 2755 bp, Cannabis sativa
gcaggtctggaaagtttggttgagtttggaaacgttttggttggggatttgatctttgttggttttctgggtaaaaccggttagccggttttacattgcaaggaggggattgaacctgtcacgacactgatcgagagagtacaggaacaagtagaactgaaagttactcgaggacgaggtccatgagtaggacgagatccgtgagtaactatcaccagtggcagccggatcttcgtaaccacttcaactagaaaaaacctgaccttcaccaacaactcagtgaaaagcaagaggatcctatccaattgggaattaatgaattggaggacaaattcaggaggcatcaagtaggggaataaggaaaacagtctagatattactcggacgaggaactcgaacctttccatccaaacattataaatactgaatttccttagggattcaagaaccctcacgtctcgtcatatgatcggaatacaaattcgttcatgcacttgaataattttaatactatcatgcgagccagtaatgtggcgaataatttacgttatattttattccccacttcgctagttggagcagcgaacagctggttcaacaaatttacccatcactcaattacctcttcggactagttgtctaaggacttaaagaaacagttccaggaaacaagggacaggtgacctgaggcgtcctccctcaccaacataaagtagtagccaggcgagacatttaaggcctagttaagccgttttagcacagctgctgcgagggttagaaacttggacgatagtacccaacttactacttttcgggcagggatcacgattgatcttaccactgttggaggcgagctatgggatgacctacagggttgcctagtgaaaaacatcagtgagttcaatgaaagagctcaagtggttgttcgaaaagaggaagcaagaaaagagatgaagctgctaaagactggctcaagaagtaaacccagcactgtctcgacaagcaccatctcgagcaaggctgaaaatccaagggcctcttgttcaaaaaggaaaggtaactctaaggattcagccaaggacaagaaaaagcaaacgaagcacgacaaatacgtgctaatttacaccgtttactccaagcttaatgaaactcgggaaaatatctatctcgcacatgagcacaggatcgcattccgtaaacttgagcccatgaggcatgcatgacataaaagggatgcaacaaaattttttaagtatcacaaggacatcgggcatacaacagaggaatgtcatcagttgaaagttgagaaagagagagtctcatcgcgtgaggtcactttcgacaatatgtgaaaagataaggcaacagacaaaaccagtcaaatccgcctaataacccaggcaaccaaggattacaacctcatcctcttgaaggagaggatattctagttatcctgggagggccacatgttgtaggggaaagtaacaatgcccaaaagagatatgtaaatgaagtgaagaacaagcagtctacttttgctccggaaccttgtaagaaagctaagactgtggaacctctgatcgtattctcggaggaagataaaaaacacgtgagataccctcagatcgacccactggtaattatcatccagctcgccaataaaaggataaaaaaggtgcttatggataacagaaattcaatgaacatcctttataaggatacactgaagaaaatgggacttgaaaaagccaaattgaaaccttccatggtaaatctgtgtggatttacaggcgacagtgtcgccagtcaaggaataatcgagctcccattaactgtgggtgaagtgcctttatccaccactatcatgcaagactttcttgttgctgacctcccattagcctacaacatactagcgggtcgaccaacattaattggactaggggcagtttgttcaataaagcacctatccctgaagtttcagacgctgattttgtgtgggagtggtgcggggtgaccaaatgctagctcgcaaatgctattgcatagagctacagaatagaaaggccgaccaccagttaatggaagttgtgactgaagaaggtgagaaaaaggatgaggatcctgatcctcaaattcaagatgaaaggaattttttgaggtcggctgaggaattggaagaggttgttcgagatccaggagatcccacaaagtgtgtatttattgggaagaacctggatgaataattaaaatagcaactaataagttttttaagggtgaaccaagattagttcgcctagagccatgtagatatgatagggattgaccctaacattatctgccaccacttgaatttcgacccaaattacccagctaagagacaaaagagagcactcaagtaggaagtggataagttgttggttaacgactttatatgcgaggcattttatctctcatggatatccaatcttgttctcgtcctaaaacaaaatggaacttggagaacttgtatacacttctcaaatttgaataaggcgtgcccaaaggattggtttccactaccaagaattgaccagttagtggatgcaactgctggacacgagcttgtgtcgttcatggatgcctattctagatataactagataaaaatgcatgtccctgaccaagagtgcaatatcctgataagtctaatagtaaataattagggtttatatttatattatgtgttaatcatgtaataagtgggattatgatccta

SEQ ID NO: 123862 - DNA, 1762 bp, Cannabis sativa
  modified_base (39)..(40): a, c, t, g, unknown or other
  modified_base (937)..(954): a, c, t, g, unknown or other
ttaataagtaaatttgattatatttaaatgagttttatnnagggcataaaacccaacaattaatcccaataaatgagtgaaaattgttgcttatttatttcaaagtattagtagcgagtcattacttccagagactagccctaatacgaaagattctctagccatctttttaataccgatgggaaaaactattactggtggatcatactagtgttaaacctatataaaaccccctcttcatccttcagaaccctttctccctttcttctccttctctttggttgcacagacccctctcctcctattttttacaccgtctagccatcgctttgccctcactccaccctcgctctatcctcgctccaccttcacactgccctcgatctaccctcaacaaatattttatgtttgtattcttttttataacttcctatagataatttctaattcattttatcactctcattgtcctcctccatatttttagtccacgacaccattgacattcaaagttaggaccatcatcgattgtcctcaatatctgaaccgaaccactggactgcggtatgtatatcaaatttatataattttttgaatgtagatcttataaaatattataggtgtaaatatatgtgttttgtagtaatactttttagtatattatattcaatattatatgtatatatgttatacccaaaatttggctggaggacacgtgtcaagataaagggaatgtgattgattccattactttttatggaataactcattaattgtgtaagtattagagtatatttgtaacctgctgactgtaaggtgttaggcaaggaatcaatgtacaaactggcacttagtatattagcgagaaactatacgtcgctaaatacgaatagtgaggcaccaaagaaagcaacacatatcaatcgtgaaagtcctnnnnnnnnnnnnnnnnnnctaagtgtaaaagtcagatcgactcaagaacaagtaaggggggtgaccgtctcaatatgggaagacttcatataacatcattgcgttagcatcggtgaggcttacaatcttgtcgagccagaagatagcattcaaacaaaccttgaagaattctttgacgataagaaccgcgatcaacaccaaacaaacatcatcgacctcagaaggaagaatgatctcaacttttgattaagattaatggaaccacgtttctgtattaaatcccacgattttagggataattgccataaacatattcaggtcaactttgtaattaactgtccactatgtaattataaatagtgataaacaagatcaaaaaagggacgaaaaaaatcatacaagagagttcctaaaaaacaatcagaaatctaaataagtttaactcgtgaactgtgaagaattttaactgcaaaaccacgtaaaaacccctgtgtttatatctttatttttatagcttttatttttttctgtgtgaaatcaatattgtgaggctcaaacttagttaacaaaaatctgcgttaacattttggtactttcattgagagcctctttgaaaaaagctcaaaaaaaacccttcgttcttttgaagaaaaacaacctctttcacggctgaaaatccagaaaatgttaacaccccacatgaggaaaccaatcatcacgtgggctctagaagatctaccaacccgcactccagaaggataacccgttctaggagggctcaacctaagggttgccccagtgcacggaccacacgttctcggagaac

SEQ ID NO: 123863 - DNA, 1558 bp, Cannabis sativa
caaatttattattaattgcaacattttaagtggattaattatatttaggtttaactatactgacctacgtggcaacatctaataatttgttattttttttttatttaaaaaaaaaaagtcacccaataatttctcataaatcaagaattcggattttatataaaattgatataaattaagcaaaaaaaaaaaaaaccattttaaaagtttataacgtaacttactttcatgaaattatacattattttatttattataaaataaaattattttcaatttattatacaatgtatataaatatatatataataaatatttgatacgtcaaaaaaaaaaaatatttaattttttttatttattataactcgctattgtggttaatgaagaatgatatattcataattattttatatttttataatattttagttaattttgaaaactaatcattattacaaatattaaaggtttgtatttattagtatttgtcattaaatcagtattagctattccctctacaaaatcaatacccatatacatattataccatatatatacgtaccataactgaattggtaaatctgcaactctagcaacagacggaaaatacttattccaaataatactaactctacaatatagtgtattgggctaaataatgagcaacattgtagagtcttaaactacaaacaatacgacaaaccagatcacagaatgatgaacataaaattgaaacaaaattcaaaataaaactaaaacttgaacacaaatgcttacgtggaagaggcaataaagatcagtgtgatcttgggcttaatccgcttgagaaaacagccttcaacatttgttgaatcttctttattgatgcgagaatagagttacaaagtttgtatcgaaattctcttctcttctcaatggagtctcggtccttacactaatcttcacttgagaccattcaataaaacacatgaaagagtctatttacaaccctccaactcactatttttcatctctatttctcatcttgacacactacattatgactaatattatatagtgttgtattaggtatagctagaggagtaactaacttaactgtgaaagattaaaactgttaaaatagttagtagaatcggttcaagggggtcaaacctcaacaatttcacctaatttgatcacttgaatcatctctgtctggcatacaaaagatacatctgctttctaattccaatgaaggttgtctccatgaggaaacaatgcttctttaattttgagtaagcttagaaaatgtttaaacttttcacttgtggtaattgttgactccaaaatttggacacaaactcctaaaccacaccctcgctagattagagacaatgaattataagttaaatgtatatataagagacgcacaatgaatttatactagttcattccatgtttcgggacagtagtggagctacgtctactttgagttttatatctcactaaatggattacaaaaaaaatggctaagtctggatgctctcatttttaaagagataaactagagagagatgct

SEQ ID NO: 123864 - DNA, 980 bp, Cannabis sativa
tatataatgtatatagattgttttaggctactttatatttattagttggtagatagagatatatagcagtaatagattgcaattgtcaagatattttgtaatataatgaaatgtggataatgcatgtattaattatcaaagatatagacatgttcatgagaataaagttattaacatcataataataataagtcccaatcctaatattattcattttcatatatatatcttaagagacttttcctatattcaaataattatacacacctaattcctttttaattaggtgaaaagggtgttatgaattttaatctttgaaacatcataattattaataatcaactagagtcctatgtaaaagctgccgactagaaattattaaaccctatatataaatatgattattcacgagtaataatattaatatatcattaagatcacatagagtgatgtattgactcaactacttctttctctctattttcatatatttgttaattatatatattattataggtcaaaaaataatttctgctacaattttctacccttaaaaaagaccaactatacaatattttctaggacaagtaaagattaggtaacagccaatgacatgtgatatatataaataaaagattcattaaagtacaactaatccaactttaattcactactttttcttattcatgtgtcccatttggatttataattgtcaaagattagttttcataaaatcttacacatacaagaaaattatacttattatatgatacatttttatattactttatttatcaattagagtatgtataccccatatcctttttgcatgtcacattaaatatatgctgtcatatatatcttcaccagccatataatatataaatttccaatatgtgtattgtgtaattgtaaatgagaggagctaattaaatttattatataatcataaatcatatgtgtagactttagtgcaataa

SEQ ID NO: 123865 - DNA, 1638 bp, Cannabis sativa
gtggctacccctacgcggcttagcgcgcaacggccatcactggagagtgaggggaggccatgctaaaaagcaatgggtactagctcatttacgggttcctgaacggtgaaatgttagaggaactaattgacaagttggctggtgagagtacttatcgagatgttccctatttcagtgtttgggtacaagttccaactctaagttctcgttgtacttgacagaattgtatgcacctttattgttatcttgtaacatggtgcagacctttttagtttggtccaaacatgcttactgtaggacctttgctgttaaggaatattcatcagggagtaattctcttacatagaatttctttcttttatgtatttgttgaagggtctggtaactctttatgggaagccatgcagctttgagttggcttggtcttctttctcttttgtcaatggatcctatgtaagatattgtttaccgctaggtcactatagaccagaagtatgaaagcagactgctagtggatcgggctggcgagggcgagactaggtggtagccacattggagccttgcttgcccatttagaggaggctatgactggccaagtcattgattctatggtcagccaacttgtggaggtgttggccggccaagttgatggctctatggttggccagcctgttgaggccagggtcggccagcctttcgaaggttaggccgatgctgcagtttgatcccgtctaaaatctattggctttgccccccggcataactatcgtaaagcctttgtgcacttttttcaatagctatttatcttctttattggtaactctccttagaggtggtgttgagataccacttccacgtgttatgttgtgcaggatttgacaccttacagtcatcccctcttactttctggtaagatttttgtttggaggtatgttgttgtaggtgtatccatattgattgtccagtaagtctatttcttttggaatagggatgcttagttctttgaagaactgagcaattagtaagtttgccttggttgtcaaggcacagttgggtagttgatcgagtgcgtcggctgttgtgtcgcctttgggggcttaccttttagtaaatcctttgagctgacttaacaactcaggtaggccatcttcttcttgtattgagttgtatattcacctaggacatagcctacgactagttgagagtcgtgatgcatgtctagttggttagctagcactttgtgtgctagcctaaggctagcattcggagcttcatgttcagcatcattgtcagaagttttgaaactgatcttgttacctcgtgcatcattttcccacagatgccctgggggtcatgcttgcatcgggcaggtggttaatgtacctcttgggttcttgctctcgcttcttctctggctcctttttttctcccaaactttgagagatatccttctatgattagccatgaagatgatgagagcttggcctttgctagccatgcttggttgagaggtggccttatattggcctgatgcttcaggtctctgtagaacctaccgcaactattgatcagtgtacacctttatagggtgtatttggaagtatgtccttagctttctagaagccaagagcaagctat

SEQ ID NO: 123866 - DNA, 789 bp, Cannabis sativa
gacaccttcatttgcgccagagaacctgtcttgggagcagtcttatgcctcccattatattggtgcgatccaacaatgtatgccccaatattcgagggaagattgggagggcatccgaggggttcccccactaggcctctacgagcatctattctgttcctctgtatgggtgatttttcttccttccattcttttgggtgtcattgtgtcgatgtccttacatttttttgacctctttccttgcttgactgcgcttttttatagatggccgcaacatcttaggagatgttttcacaaggtggagctcctagattttcttccaactaccaaatgctctgggcaagttggagtccgctaaggaggagagggatcgattgtctgccctattggcctctcacgaggcttgcattcaagagttggaaggtgagcttgttgcgacaggggaggctcaaaagcaagcagccgaggctctcgctgctcatggtgattataaactagcattcgacctgtcgctcgaggaagtcataagggagcccgacgatgcatgtacatagctttctgcagctactgatgagaggcacaaaaaggcaccctaacttaaaagtgctcgcaaaaaaaaagagactcgagtgtgccaagtcagtgaaatacaatctcgcgtccgagaattgaaggaggaagtgaaggtggttcgttaagggtcagcggtgcatgatagtgttgtagtagatcaagctctttataacgtatgccatgccaatcccaataccgacttcagcttctttggtc

SEQ ID NO: 123867 - DNA, 1844 bp, Cannabis sativa
  modified_base (29)..(55): a, c, t, g, unknown or other
ctgcacatcatgtttaaaaatcacgtaannnnnnnnnnnnnnnnnnnnnnnnnnnatcaagcagtgatcaaaattgtaatctacttaacgcttacatgggaacttaatatacacctatacagctattaatctgctaacatgctccatatcatgccttttgtgattatgcatatcaattaaaactactaaaacatgtaaaagcttaccaaattgtgaggtaagcttatctttgatgatgattgtacatatcttgacgatcttcggagaacaacctgacagctccaatactaaattgtagtaccttactacattaggcatgttgccgtgttttattaattgttgtgcacgcctttactaatcaataagtttattaaaaaacgtgaataattaaaattttctaaaataacttaaacctaataataaacataatttatataagtccaggttcccgttaaaacttacatatgtttgccaagatacctgcattacaaaatttgtcttcttatgactatcgaaaaggtgagcctaaactgtcctaaagaccctgaacgctccaagtctaactgtcttgatatgtacaatcttcaccattaggtttagactcatcctggtttggttctagctcttacctgtacatacacgtaataactgtgagttgacaaactcaataagaaaagcataattataaacatagacatatatctagactgtaactaggcacccatacacctactgacgatcttatttttatatacaaaaaatttcagtcaaactctactttcttttatcttatttttttgctgaaaaaaattttcttaatttttttgggtgcactcttaatggttgttattacccatgagtgggtagtattaagaaaatttgagtttgtatgcttaatttttctatctaactagaaaaaattctcatttttacattatatatggactgcggttgttctatcggctaaaaaaattaagaaaaaaaatcgataaaaaaaaaagattagtatgacttaagtatattttgtatataaacatatttttttatatagtgtaaaaagagatatttatatatatacatatatattttgaggtttttaccaaaatactagatttttggaaaaaagtttacaattttactgtcatacggaattttttacaaaaatactgttcttttataaaacaaccgtaaaataacaaaatagaacaattaaaacaacagtgaaacaattaaaaaataaccgtggaacaaccgtgaaaacttaacacagtacacagtataaaacttacatagtatttttgtaaaaaaaatacagtattttagaaaaaaaattctgtccacagtaaaaaagtaaaaaagttagaaatttcagtatgtggtgtaaaaacctctattttttaaaggtaaatagcggcataaatacctaaagttttgagtttgtaagcggcataaattcaataatttttttagtagcataagtacccaatgtttataaaactgtaatttttctctatttttgtatgtcaatacaagctccgttttaaatttattaaaagaaaatttggaaaaactgatatatactacatattcctgtccaaccaaataatcttgaatctgggttttatttgtgtcctatttaagacattaacagaatttgtactgatgaaacatgagaaaaattaccgttttataaacattacgtacttatgtcgctaaaaaaaattattgagtttatacgcttacaaacctagaattttaagtatttatgccattattttatatatttttaattaagtagctaaattaagtatataaattcaaatttctcttttattatttgttat

SEQ ID NO: 123868 - DNA, 1043 bp, Cannabis sativa
ttttgtcgcttaggtcggctgaaagaaagagacttgtaataatattttgtaaatatttttgggatcccaatttttgtaacttttagattataaagtttaacttattatacaagttttattttccttctatttattataaaagtttaaattctacgccatttttattagtaatcccgtttaggggattaagaattcataagtattttgagtagcgtgcctaattatttagggcgttacatatatatttatatattattaatctaatatatttaatatataattttataaataaaatatacatgtttattatttatttatataaaacttgagaaaaaataattacttatataaattgtatagaaaattaaaattatatttatatatctaatataaaatgcataatgacatataaataaattattttgtattatatagtgtaatagacgaaattataaatttgatgagtttttatactttttgtacagaaatatagttttttttttctcaaaaatattattttatgaaaaaattgaaaaaaaaaagttgaaaaatataagaaaatcagataagggtaatcatagaaataaccagttatcataaaagagtaatcaagtattataaggaggtaatcaagtactatacagatttttttttttcatttttttttaattttccataaaataattttaaattatatatttttgtaaaattatgctttgaaaatcataaaaataaaaattcctcgaaaattatataatttttgaaaaactataaatttaacttaattacatgtacttcttcatatcatatttgtttctattttcttttcttttcttcttttcattattacatttagatatatattgttcttaactttagaatatttttattaatttattcacacactacaattgacctttgatatataataaataaattccatctataaattaaactacaaaattttttacttttagtcacaacaaaacttatgattaaaagtaaaaaagttgggactaattataaattatcatttctatgtt

SEQ ID NO: 123869 - DNA, 604 bp, Cannabis sativa
tctgagaatttgggaagcgaccttggtactggaaactcgcatttttcctttcctctttccaactctaccagggaattctcaattcttttatgcggttcttgcgtagtgaaaaattccacaaatgactcgggtcattgcgcctagaattccttctaaaattggttcgtggtaggatacctgtgatcaacatatagatcaataaagactcggaggccttctccacctttgttatttcaacattaaaacacttaacataatcctataaagactcaccaacttcatatttaataatgtctaatgtcatatatggtggtttgtatgtcatcgtggcctagaaatgcgtaaggaacaagtttacaaaagtctcccaagttgatatcgatgcctcaggaaattggccaaaccaatcatgagcattatcctccagagttgcgacaagtattcaacatttcgccagttgtggcacctgatctacttccataattagattaaatttatctaaataatcgattgggttagtagtacctttatatttgagcaatttggatagtctaaagccttttgggagccttgcttgtcgcacttcttctataaaggacgacgt

SEQ ID NO: 123870 - DNA, 810 bp, Cannabis sativa
ggaagggattacatcagaggaggcaacgtagtttgagagacttgagccgactgccttgactaggcaagttttcccagcgctatacaacagccgcattttccacccctgaattcttttaagcaccctatcaattaggtgtttcgtatcctctgtacgcttgatcgatctgaagaggggaattccaagatacgttgcactcctattcatcttcctcattcctagagtttgggcaattacttgagcctttcggctggccacacctcgcgagaaataaacagatgactttgagaagttgatggcctgacccgagcaattacaatagtagtttaagcagtccaagaatgatttagcctcacggattgtggcttctccaaatagcatgatgtcgtcagcaaacatcaagtgagtgactgagtcacctctccttgtcaatttgaaacctttgagaagcccgtgatgctctttctcgagcagcagccttgacaatgtttctgccgccatgattgatagggcaggggataagtggtcgcattgtcttaagcccctctccggagtgaatttccctgctggtgagcaatttagcagcagctttatttcatgaactgaaatacacgccttaatccattccgtgaaggggctattgaagccgatctggtgtagcaccgttaagatgaagtcccaatccaatttatcgtacgccttttccaagtcaagtttgattagcatgaacccgcgtttacccttcctccttctcattgaatgtacaatctcacgggctatcattgtattttcagcaatgtgtcttcctcg

SEQ ID NO: 123871 - DNA, 2761 bp, Cannabis sativa
attatatatgtggtggtggtgtggtgtgtgatgttttgtgataagtacgtaggttccttattattgggtggctgacaatctttgctgaaaacatgcaatattgtctctttctttcccttatatcttgtctttaacacaatccaaacacacttattattattactaaataacctttttccttaattaaaatataaatatagtactgcttttacttattttagtggtggccggtggttcattaattatataatcacacgtatatattatgtatattaacatgtatataatcaccccctctccattcatcacttaatgatgaagttagctcaaatatttaaataaaaaaaattaaatatttattttttgttatttgcgttttcggataaatgacaatgtatactttcgaagtttcccaatcaattcacgagcctatttgccacacacaaaccaagtaatggatcggtctacccgaagccagactaaggcttcaggttcaattgtaactttgcctttataaagttggatctttttggtcccaaaatgacaactctcgtatccagagaagtgaagacttaaagaaatacaaccggacactttcaaggataatctcaaaggattagtcgatgaggtgttcgagaccaatccgacgtggcatccatgtgacatcagagatcccacaaaatcaagggtttgtcttctatgtcagacattagaaagacgcacaacacaaaaagctaaataacttttttcaacgtccactaccctgacatttactatacatgcaatcggcgacacatgggcacttatcaacaacaggttgtacgaccccgtaagagcaactgaaaaaaccctccaatttgagtttcactatgatggatttttcaacatgtaagtatcgtttacaagtaagactcgcaagagcgaggtcgatcctacaaaaattgtagttaattatcaaacaattaattcctaattctatttggtgacaataaaaataaaaaaagatgtaaaaataaagaaaacaaataattaaattaaaattaacaatgattcaattttagggtgattaatttcgattgcatctatttatatggtttaatataacttaattctcaaattctaatttttatgtgatagcgaatttactaaagaaacttatatttgggctaggacatttaaattttaaaacctatatatatgaaaatttactctcgtgataaatttaaatacacataagacattaagcataaaaatcctaaatgttatacaaatcatataggtactctcgtcctattcaaaatttttgtttatttcattatagcataatcaatactcacttctcaaattttataatgaaatcataaaatatttaattggtgatcaagcaattataaaaaattaaatatgaataaaatagatacacatagaaaattgggggagaactacatcacattaaaatcaaaataaagtgtcaaataatctccattaataccctaatacgaagtctagctactcatattcattaaaaataaataactgaaaacaattaattaagaacatgaaaaataaagtagaagaaagaactcgttgaaaaaataatattgaatatctccaaagctgtcttttgtctcttatttttgtcctcccaaagtcgttttctaaaaagttttgaaaaatagcctttatataactaaaaaatattttaaaaaaaccctatttttttgtagtttagattaggcgggtcgcgacacaaggtagtgccgcgatgcttaaagcacgatttttggcagcgagcttcctactgggttgaatgatataatattttggccataactctttcattatcactcagaattagacgattcaagatgttttggaaagatgaaagagatatctaaaacttttattcacaatattttttctcaaaggaaacgcatcatagtcataaattgacttgaagcttaagacttgattctcgattacaaacaaacgtgttgagcatctaaaacttagaatttttcaccaattatatcctagaactccaaattctatgataatccatcaaattcatctcatttaacatatttttttttcattttcaattcacattataaattttaccatttaaacctaaaacaaatagaaaacaagtgtaattctacacaaaatgaatatatcaattgaaatacacctctaaaatattttataaaatgtacctaaaactagcctatcactcacctaccaggcctaatatcaatattttaatgtattttaccttatcaatgggcttatttcacatgcaaaccctagcgagtcggggtttacctgaaaattggactctagtagcctataaatagggctttaacccttcatgcaagggattataaattgattagaattttgatcagaatacttgtgtaaaatactactctatagcgaaataacttaattgtggactaaatctcatcaacgtctcaccatgtaaaaatatttatcttctttacttctagatcatctttctttaagctcaatcaatctatttcttaattagtttctaaaattcccggttgtgtgttttttcatttacatttgagttgcttgattttcttatctactgattgtttagtgtgatcttaagtagtttaaattttcatcagaagtagtaatatatttttcttctttggattctatttttttttgggtaaataccattttggatcctgtgttttgtaaaagttaccaattggaccctgtattttgt

SEQ ID NO: 123872 - DNA, 1659 bp, Cannabis sativa
  modified_base (39)..(42): a, c, t, g, unknown or other
ttgtctaaataccaagctattgtggattgttcacgcaannnngtgactcttttaacccctagtggtgatttcattgtttatcgagccaacatgagtgcattgagacaaaattctatcttaagggcatgcttaggtgggaagagaaacttagagtgctatgggaatctatttgtgatcgaagatgggtctaggaatttagaccaatttccttggatatcagtggttagtggtttttcggacgtgtgtccaaaggattttccaggattaccacctgatagggagatcgagttttgaattgatttgattgccaaagctcaactagtttctatcgtgccttaccgcatgacacctgtagagttggctgaattaaaaaaacaattagggaagttaatggataaggattacatcatacatagtacttctccatggggagctccagtcttgttagcaaataaagctgatggaactctgcgactttgtatcgactatagaaagttgaatcagatgataattaaaaacaagtatcctctatcgaggattgatgaattatttgatcaacttggtggttcaaagttcttctcaaagattgacctgaggtcaggctaccatcaattgaggattagggaagaagatatccctaagactacttttaggacaagttatggacactttgagtttttggtgataccatttgggttaacgaatgtacctgctgcatttatagatctcatgaatagagtctttagacttttcttggacaagtttatggtggtattcattgatgatacttggtgtattctaagacacttgaggatcatgatgaacacttgacaatagtattacagacgttgagagattttcgattatatgctaagaaagagaagtgtgcttctatatgaatgaagtcaaattcttgggccatgtaatttctcaagatggtattactattgatcctgcgaagataaactttatcctacaatgagaaagaacaaagaatgtcactatagtttgaagtttttttgggttagcaagctactatagtcgttttgtagagaatttctctcatatttctatgcctttgacaaagttaacaagaaaggaagtaaagtttgtgtgggatgatagttgtgaagaagctttcagaattgaaggaaagattgactacgacatctgttctcactgttcctaatagtgaggaactatatgtggtactcattgaggcttcatatactggcttagtaggtgtcctcatgcaaaatttcaaggtggttgcctatgcttctcgataattagaacaacatgagaataattaccctatgcatgacctaaaacttgtcgctataatctttgtctcaaaaatttggagatgttatttgtatggcgtaaagtttgagttacacttagatcataagagcttgaagtatctttttacttatagggacttgaacttgaggcaaagaagatgggttgagtatatataggactatgatttcactttgcggtaccaccccgagaaagctaatgtagtagctgatgcactaagtagaaagcctcatggtactttggcatgtttggctcttcaggactctgaaaggaaaatcacaatgggtgattataacttgcaatactatgaaggggaagaggtagcttgtatctcta

SEQ ID NO: 123873 - DNA, 1196 bp, Cannabis sativa
  modified_base (1129)..(1147): a, c, t, g, unknown or other
gataagatgaatgaggttccatccaaaaaccaattggcaatgggaggagtagccaattcatgttatatatcacaatttatttccacacattaacaatatgggactaactcttaatagttcctgccgttttgtgagtccatgtccatggtggacgactgctatcagggttcttggggttcatcgttgatggctcaactctaggcagtgatgtggtggtttatttttgatgaatagtgttcagagaattttgtaaaatatattttaattgtttaattaatattttttttatttaacttaaatcaaatttgtatttgaaattaaattttaataaaattaattaatttttatttaattattaaaattaagaaattattaaattattattaattttattaattattaaaattaagaaactattgactaattattatttaaatttaaatatatgtatataataatatatatttaaattattattttttataaagtagagatccaagcccagtaaaattggactagaaatttaatatttttgcgggttttattttcacgtctagcaatgttggaatagaaatttttatctagtccaatattgttggacatgaaaaataaactttttatgtccctggatattatgtccaacacaaaaagggactagaaaagcttatctagtccaaccttaatggacataaaagaggttttttatagtagtgtcgtctcccttttaccaaccctgcgatcgtccccacgcaagacgtgtttgtttcaatccctattcttcgatgtaaggtatctttaccctttcatccttttgtaaaagccatcctcaaaaattacgatctctctcctttccaactaaccccaaatagttatcgcatagttctgggattctatgcgatgtatatggagtatgtccaagggcagccaaggatggaggaatttagctatttttacgatataaaaaatgtaggccacgacaacgacttctactgctttagtaaaggggcctattatgagattaatggggtacaaggcatggtttccaatataggggattggaaatttaagtggttctacgcgtttgaagtatgaggagttaggactgacttcatgttgggttttatgcccnnnnnnnnnnnnnnnnnnntataattagatttacttattaatacagatcagaaataacattttatgtt

SEQ ID NO: 123874 - DNA, 1280 bp, Cannabis sativa
cgggtcgtgttcgggtcgagcaccgttatactcgcgacacgaacacgacccacgaacacgaatggccacccctagctgggtgtagtgcccttgattccacttaagtttaatctagtttaaagttttagtatctaatcaaataaacttttctttggttagagactacaaaataataaaaagtagagattttttttggcgaactttcttatattttaatttgtatgtacataatctttttattttttttttattttagtagcaatactcttttactttagttctgtttgcaaatttaatataatagttgaattttctagttaaatgccaattaagacaccaattaggactgccacagtgtatatctatgtacacatgtcgtattttttttttgaacaagaaaggatctttattcaaactagcagagttttacacggaacaacaaccagctacaaaaccagcaagatgctaaacagcattaccaactttctattacattaattatgtgattgtccaaagcccccttctctctaatgttgcaacttaaaactctctgtttaactacctctttgatttccctgcttaaagacccagcagctttgcatttgaactcgaatacgcatctattgcggctcttccaaactgaatacaatgtagctaacacaacagcattcagaattctgtcgctcaagttgttcgaaggcctggacagccataagttgatgttgttcggccaacaaaagaccccacaccaggacataacttcctgaatcactctctgcgtgtggcagcaaatagtaaaaacatgcctgtgagtttccatcacagtacagcaaacagggcacatatcagtaggaataggcatgattttgctgattttgtctctcgttaacagctgttcattcacaatttgccaacctatgaacctgtgttttgccaagatcaatctattccatatattcctcgcatagtcagcactttgcccatggatcaacgagacataaaatagtttaggttgaaatttacctttcctctctgccatcataatatcagcttcaccaataaccgatcggagacgaaggagtttcttgtagtaccagctagcatcttgtttgaattcagcatcccaaatactctgacccttcaaataaatggcatctatccacctaacccataagttgtcttttttgcaagaaatggcccatagatacttggccatgagagaaacattccatttctttccttccctaaatccaatgccaccaaacttcttaggaaggcac

SEQ ID NO: 123875 - DNA, 861 bp, Cannabis sativa
  modified_base (28)..(40): a, c, t, g, unknown or other
tgatattaaaaaaaactaaaaactaaannnnnnnnnnnnnacgtgacttggcacgtaacatctctagtatatataaatatatgtataaacttgaaaaaaaattggccctcctaataagtttgcctagttttgccactgtctagctcgatatatactccatttatctatttctatcttttcttcaaaagttttaaaagaaaaacagagaaaaaaatataaaaaactccaatatcaccgaaaataggttataagcatcgaaaaatgatatgatatttgaaattttaattgtttttttaaaaaaatatttctaagactaatatctttattcatgtatttttttttttactattttgtaactaaatcttcaaaatagttaatcacaccaattttgtaagtattcatgttcacaatagtttcttagtacaaaatttatatttttttttttttgtttagttttatttttttatatatttaggtttaattgttatttaaagaaagagaaacaagtattttttttttttctaatggttagaaaacaataagtaatagtaggaagggatgtgagaatttttttaagtaaaattagtaaggaaaaataaattaaaaaaaaaagtttttataaagataatgtgaaaatgttttttttttaagataaaaggtaaaaaaaattgtgtaaagtaatatcaatttttttttttcttgctattaaaaaattatggaggagatatgctaacataaactaaactctactttcatttttatataccctactctcttatcacctttaaattcttaatctaagtacaataaaaatgttctcacccttcccatagggataaaataaggtccctattagaagtg

SEQ ID NO: 123876 - DNA, 1461 bp, Cannabis sativa
agagagagagagagagaaggggatgcggatgggatggatgagatgagctaagattttttttgttcagttcaaaagaaggagaaaattgaggtatacccaattgaaatttttggagcttgggtgaatgaatcatggaataattatttttctttagcttgtttcgaatgtgtttgtgggttaggttgtatgagaaaattagatttttttgtttatttgtttgtggatatttggggttttagagtttttagattggttcttttgagtaatgttgaattagttgagattggatggtttttcttaattggatttctatcaatatcaatcatatgtaattgtgctactttgatattgacattatgataatagagaagaagaagaaggaggaagattggttaggattagagtttcaagggaaaaaaaagaatatgaaagaaaaaaggaaaagaaaaagaaagtgaaaagaaaagaaaaataaaactaaaaatatatattttaatttatttatttgtatatttttaaatttttttttatgttttaataattaatattacgtggaccactaaaaatttaccacgtgtatacataggcaatcttctgtgtcacataactgaagtttttaggcataagtgtaatgagtaaaacggaacctgagttcagtaggttttaccgtcaaaatttcaatttttgtagttaagtgttgaaaaatgtaaagtttaagtgtcaatattcttttttatgatcgtggatgttatagttatttaagatattctgtaatattttgagaacttcaaaataatttacaatataaaaaacagtgtttaaacaatctatttcacatacatttaacataaaaaatcatgcatgcaaccgttgatgtttaaaatttttcaaatttctaaatatttttataccacacaactatacaaaaaaattagactaaaaattcttctaaaatccgacacaaatcagtacaccccttttttcatagaactttcaaaaatatattgactctttaaatcacctctgcactaaagtgtttgatttataatagtgcgataaaagtcatttgaaacttcacatatctatatatatataaaaaaaatatgaggcggtgacatgacactctaaaatctctccaaaactatttttttcttctttccttaattctctcattgtttatattttattagagcataaatctacaaattgattttttactattattctaataagttatttttctcttctctcattaattctcctatttttaatatttaattagaacataaatctgtaaattaataattttatactattttaatatttttttttaaaaaaaaacacactatatatacactgttgctcctaaaatcgcccaatgtacgtggaccaatcaagaagggacacgtggatcaaattactcgggaagaactgctaagtctttgtatgacaccaggaagc

SEQ ID NO: 123877 - DNA, 1028 bp, Cannabis sativa
  modified_base (29)..(44): a, c, t, g, unknown or other
  modified_base (879)..(909): a, c, t, g, unknown or other
tattgatatttaaatgatagagattacannnnnnnnnnnnnnnntttagggcataaagcccaacaggtctatcacttgatcccagtttaagtgttagggtctttgttcgctcaggtgctgacttggccttccttttagtgaaatgtactatcacttgggactggttttgtccacgtaagcatgcaacgccatgaggacaaaaattagaataataatatggaaagcaaaatgttgcctagacaagacaaatatatatatcgaagcttaaggtggcaaaacaactagacatacaaacaaacgccataataatactcaccaactagacatacatgttctaaatagaccatcagttatggaccctaattagccaaaggggcaacaatattctagctagctagaaattcataactcaaatcaccatttactaccatgcaaagacaaacagtataaatgcaaatttttactacccacatagatcaaacacaaacacaaacatacaataagtaaaatatatttacttacctaatcactaaaataagaatgaacatccatgagaacatgaaggacaaaacaaaaatattcagaaggaaagaatttagaaaacttacctcttgaatgcttccttccaagactccaagtctcactcgaccaagagctccaatagatgtgagaaagaatgatagtaactccccatatttatagccaaaaagagatagtggatgaataataaatgtcactcatctagaagttgatagtaatagtaatatatgaaagggtaaaactaactattgggtacaaggtactatcattaaatgtcaaatagtatattcatttatatttaattaatatatgcatgttatgttggaaatattttaccannnnnnnnnnnnnnnnnnnnnnnnnnnnnnntaacatcctaatatgaatttctaacacaatgaaataaacacataagggtttaagaaaaccttacatttggtgcagcggaatataatgactcattacgttcagatttctagcccttgatt

SEQ ID NO: 123878 - DNA, 1635 bp, Cannabis sativa
ataaaatagagatctacaaaaattaattgataaatatatagaaaacttattatatgattttaaaaatattgtcattcaaagtcaatgtcatcaccgtatatctcacttagtcgtcactacattcaaagtcgttatcattatcatatcttatttgtagtcatcactattgatcaaaataagtttgctctgtacatagaataaattatatacttgctcttcttttttgttttgcttttattaagtttcttatttatttaaaaaaaaatatataaaagcaaaacaaaaaagaagagcaagtagaaatggtctttgtgctgataaaatttaacacaaactctaatgctctttatgtataatatttataataaatttttatctcctccaactaatcaactatgaaaataaccaaccaaaataaacacaattacatatatgatgatggcattgctatacgatattagtgatgtttaactcttggtatcttataactggttagcgataactttaaattgttgaaatgaaaatcgaaatagggatgtgaatgagaatcggaataaagttatctaatatttttattcacattttttataactggtaccttaattccattcttattccgattttttttcatatttttatttctctccactaaatgccaccataattttcatactcgaaattgggttttgtaataaaaaaaaaaaaagaaaaatataagcaatattttgttttgtttctttacccacttgtataaaaacaaaagaaaaaaaaaagtagaaatgataataaataatcttctttagttacaaatcacgtgttagtaaaacttggttggcaaaattggcttttattaaaaaaatcttctttagttggcgaatcggtctccttattggagtccatatatatatattgcctacacacctagtctacattattaattaattgttgccctaatagttttagtcataagaaaactttaaactttaaaccatccattccatatgattaattattaaatcactaaattacttcaaattgtttggcaaatagctggaacacaatttttatttattaaattataacaaaatcaatttattaattaatcatcatcatttaatataggtttacaaaaaataaattagatgggtggttgtaacttgtaacccaataaattcagtcttaccatttaccaagaaaaaataaaaataaaaagtaccaaattggtgtacttttgttctatgatgccagctagtacatagaagacattccattgactttgtgtagaagaactagtagtagtaaattgtttagactactatgactagtgtatagcacgtatgaaaataaaccaactagaattattaaattgagaaaataaatttattgggattccatttaataaaatacaatgtaaattaaatttctatataaagtatataccatatagttgctcaattataaataaaataaaataaacatatttttttaaaaagatacagataaacattgtaataagctataagaatcactacaagaaatccagcttttaccggcgcattgttgcgccggcaaaagtacactgactgcgccggtaaagctttgccggcgcagttgtgcgccggcaaagcttatctg

SEQ ID NO: 123879 - DNA, 1303 bp, Cannabis sativa
  modified_base (1133)..(1134): a, c, t, g, unknown or other
tgttcctttggagtttcctcaagaaagtttttaggattcatagtcaacgcgaggggcattgaagaaaatcctgaagaagttaaggctttgatagatatgccatcaataaccaagcctaaggaattccaggccttaacaggaaggatggatgcacttaacagattcatttcgaagtcaactaataagtgtctacaatttttcaatatactgcgagggaacaagaaatttgaatggacagaggaatgtgagtaggcctttcagagcattgaaagtcatttggcaacacctccagttttggttaaaccagtaactggagagatattactcctctatttagctgtctcggaagacgcgattagtgcaacaatagtgcaagaagagggaaaccaccagcaacatgtttattatgttagtaaaaggtttctgggcgtagactcgcggtatccccctcttgaaaaacttgccttatgcctaatccacgcatctcgcaagttacgaccttacttccaggcacacaaaattaaggtgttaactgatcaaccattgagacaagttttaacaaaactagacgcttttgaaagactgataatatagtcgattgaactaggcaagtttgacataacttatcaccatcgaacatcccttaagtgccaagctttggtagatttcctaatagaaggaataactccagaggaaaatccgcgtgttgactgagacgcggacacttagaggttattcgtggatactgcatccaacaagtagggctcaggttaggtgtgatattaatttttcctgaaagatttaagtttcataatgctttgagatttcaattcgacgtgtcaaacaacgacgctgaatatgaagccttgattgctagtttgatgataccagaagcgttgaaggtcaagaatctcatatgtcatagtgattcgcaattaatcgtaaatcaggttctcgaggaataccaggctaagggtctgataatggctaagaatctagagagagttcggaagaacatggaaatgtttgattattttaaaattgagcatatcctgagagaacaaaactctaatgttgatgccttagcaaatctggcctcacagaacgacttggatgaactaaacttggtttcnntggaaatgctaaatgagccaagtatatgtgaaaaggaagaaattaagatgatagataatgatagataactcaccagcatggatgactcctataattaactatctacttgttatagtgagatttttttcacctagaaactcgagaccagactcctgtttggaggacacgt

SEQ ID NO: 123880 - DNA, 1638 bp, Cannabis sativa
ctatttatagctttgtcatttggtgtcaaaacagacagttaacaaacttaattgtcaagggtaagacttaatagaataaccgaccatatatctaacatgtcctatttagaaaaactccatgccttaaataagataaacgacccaccatattgtacaaacaccgtgcctcaaataatgtaaataaaaatataatttatcattaaaaagataaactattattttaaaataaaataaacgacatgtcttatttagataaacactgtgcctcaaataagatatgttaaaatataagttatcattaaaaaggtaaatcattaacgtagaataaagtaaacgatatgtcttatttaagtaaactacgtgtcttaaataaggtaaacaaaataattattaaatatgaaagttattaccttaaaataagataaacaacttgctttattaggcaaattttttgtcttaaataagataaacgatttgctttatttaagtaaataccgtacctcaaataatgtacaccaaaacagatttatcagtaaaatgtaaactactaccttaatataaggcaaaaaaaagtattaaatttaaagtaaaataatttatcttttttagagattaaagttagtttctcaatattcccacgacgctcaaatttaaagaaaaaaaaatatttataactattaagtattaatttcccaatattgatataattgctacccgatatacaagtttacatgggagatatagaaaccacttgtcaatcatcaaagcaaagtgaaccacagtaaaatacttataatctcttaaaattaatgcacttcagttgaatgtttctcaatcatctttacactaacaaatctctctctagcttcattttccatgtacttaagaaaatatttgcattgctcgttcaccatctgtctgcaatcccaaagtagcaaaaaagagattacaatgtgttactattctatactattaaatgagaatgagactttttatacactgacataattttaattgaataataaaagatatatacaaatttaatgtgtcatatatatgtactataagagatcaattttgtagaaaaaaactttttaaagtaatagaattttattttgcagcttggtaccaaactatacatacatacaattatgtttcaattaaatctaatatgaaaatagatttggttaattgatttaaaaagtaaaagagatatttctaaatttttcatgagaaaattaggtggttaccaacttttacttattttaatttttattatatttttcatattcattcatgataacacggggattctagtcctcaatgtatcattttaatttagtttctacaataaataaaaataaaacacaactttttgtacttataattattgtctcttctcaaaagactctaaaatcaaatttttattcaagagaatagaagttaacaagacaaattttttctgcaaacatacatttttagcaaaagcaactagagattttttttttttttttttctaatcgtaaattttttttgtaacttttcctaatgcaactaatctcaccaaattcagcttaaaaactttacttcagtacaatttcataaaattcatcaaaatttgtggtttttttttttttt

SEQ ID NO: 123881 - DNA, 1400 bp, Cannabis sativa
ataaaatattcatttatcagaatcaataatattattttatttccttaattagaaatattctaatacttcctgcataagatagatgtctacttccccatatatttagtttaagtttaatcttttgcactatgggatcacaatcgattgctttccactttataggtcttaagctaactcccaaatattttagtggaaattcaccctcaccatattgcaccacatttaatattttttgtgtttctcctcttcggctgtcccagcaagatatatgttggacttggctaaaatagctttaagcccaaaataattactaaacaattgaataacatcatttagataattgaacgcgactagattacctttacagaagatgatcaagtcatctgcaaagcataaactaaccaattttaaatgtttgtaggaggggtgatacctaaaactctgctgatgagtttgatattagagcaacattataaggtattccattaccaaacaaaatagtaacaggaaaattgggtctccttgccgattcacgtttctattgggttaagagaaaattagagataatgattatgctattagcaatggagacattacaaataaattatagttattacataataatagaaaattttcatgtttttattatttacttgatttgatcataccgatctacttttcaatttacagatatgttagtgaaacacaaatattttttggagattttttttcttctgatattataattttattgtatagctttttggaggcatatcttttttatgtatgtcgcaacattaatgttgcaacctataaattagtttagtatacacttaggataaacaataaaattttttagataggaaaaattctttcaccctggctttttgacattttttttttctctaacttaaaacagtacttactctttcaaacaaatgaagaaaaaaaaaaatacaaatagagaaatatatatatataaaaaaataaataattaatagcagtaagaaaatcaaggaaataaatttaaaaaataattagctcaacaatagaaatttctatatggaaaaaaataaaacattcaaataataataataaaaaaaactataaaagaaaaaaaaaaagagagaaaattaaataattttatggatttttatactttcggtgtaaaattatgacttttttttttttctttttaaaaaagttattttatgaaaaaaattgaaggaaaaatttaaaaacatgagaaaagcaagtaacggtaatcaagtatcaacttaaggaaattatcaacaaaaaaaaaaaaagtatcaacttaaggacggtaactagttatcttatactgttttttttttttttgactatttacaaaaatatgggaaaataaagataagttttga

SEQ ID NO: 123882 - DNA, 864 bp, Cannabis sativa
aataaatattaattttatgttgcttataaatttaaaattttgtatatttataccgctatttatctttatcattattattattatttataaagagtcccgcctttcaataacaaaacataaatgaaacttatttttataagctattgtcatcattatctttttaatgtaaaagagagataatagaatgggtgctttcatctcatggcgtagatttaaaggatttaatagcattaaataacatgttgtggaggacatacttgtcttcgacattaagctaacatcattgcatttctagctattgttagtacgaatttaatgggttctaagaaattgcttttgtaacttatattatatatagtgagagagaaaacagtccaaacaaatttagcaagatgtaaacatgatgatgaatggacgcacccaactttgtcatattatttatttgagattggactattggacattcacagctcacaactaactagtgcggtaaatacttgtcgtaccataaatatggggcgtactgtatcataaaagatataagtcatatcgtgccataaaaaatatgactcgtgtcatgatgtgccataaaaaaatatagtcatgttgtgtcgttctataaaaaattataagccatgttgtactatgccatactcaaattcgtatcatactttacttagaccagcccattttcttatagaaaaattgccacatatacaattatttcttttcacttttataaatgaatttatttaactataatgtttattgttatgattagggtaattagaatttttatcccttaaattttgataaataccaaattatgtcatttgtgtttgaatatgttttaccaggatctag

SEQ ID NO: 123883 - DNA, 622 bp, Cannabis sativa
tgaaatgagttttttttaggcataaaacccaacagtttcaccctttggtcttctaaaacgaagcgaaaccatcacttgaaatttagtgcaacattggcctttcctcacggaagacgaagtctaccacataaaattcaacatgactcttgcatgtacgtaatttttcagtgcgagaaagatcactaggggtttgatacgtctccaaccctccttctctgaagaaaaggactgcttgaagcctgtcacacacccagtgatgtttaaccctttggtcttttaaagcaaagtcattgcttgaattttagtgcaactttagccttttttccacataaaattcaacatgactctcgcatgcatgtaatttttttgtgcaagaaatatcactgcgggttcgaatcgtctttacccctccttttcaaaagagaaggacttcttgaagtctatcacacaaccagtgatattaaaccctttggtgttttaaagcgaagttatcacttgaatttaagtgcaactttagcttttcctcgtggaagacgaaatctcccatataaaattaagggttgagatgcaaaatggccctaaattgtgtaactaagttagtaaatgtccactttttaaaaaa

SEQ ID NO: 123884 - DNA, 736 bp, Cannabis sativa
tttatatgtgtttattttatcgttgtagaaaggtcatatttagggtgttaaacaacatacttgtgagtagatctataatcctggtaaaataatttccaacaccaccttcgtcatgaggtgcctttcttggaattttcgtgggattagtaggcccacgacggagagaactcttcgaggtttaatccatgagacaaatacagagttggtgtttctctctgaaacaaaggttggaatggaggctatgacagctacaatgaatcgtttaggatttgcaaatgttattgggattccatcggtgggtatttgtggcagtttctgcttagcttggagacatgatgttatgataaatgttcatgaagtttttgatacggggtttcatgggataattccggaaacgcgcgggttttgtcggtggcatcttttccccatatattgacctccttatgcagaaaagaaggaagaattctggagatggtttacagtgaaggtggctgagtgttcggagccgtgtgttgttctgggagatcataatatcattttggaagaatcagagaagatggggggaaatagattatctagccgtgaaggggatctgcttcgaaactttctacttgatactggaggggtggacttgggtttccagggggtgaagtgtacatggtacaatacgagaagaggcacaaaaaatgtcaggaaaaggctggatagggttttagctgtaacgccctaatgctaa

SEQ ID NO: 123885 - DNA, 1775 bp, Cannabis sativa
agatgcaacacttaaaaccttgtcatactcctataacaactggcaaatccttatctctcacagatggcaagctgatggagaaactgactaactacagaaatctaataggagcaatacagtatctgaatcacacaaggcctgatattagctatgctgtgaattctctaagccaattccacaaagctcccacagtttcacactggaatgctgccaagagaattctaagatacctcaaaggaaccagcacacaaggtctgcatctcagtaactgtgacaaactgaatctagtgggcttttctgatgctgactgggccaacaatgttgatgacggaaggtcagttggtgggtattgtgtctaccttggtgagtcactggtttcttggtcttcaaagaagaaatctgttgtgtcgagatcaagcacagaatctgaatacaaagctcttgctcatgtaagtgctgagttaacatggattgagtctttactcaatgaaaccagatttcctcttcctactcctcctataacctggtgtgacaacatgagtacaagtgctcttgcctcaaatccagtttatcatgctcacaccaaacacattgagattgacatacattttgtgagggtcaaagtattgaacaaagaatttgaggtcaggtatattccttcggttgaccagatagcaggctgcatgaccaaacctctctccaactcaaggttcctctacttgattggcaaactcggagtgaaaaactcaccctttcgtttgaggggtggtgttaagaaagttgattacttattgtccattattaatcccttgttaatcctctgttattctcctttttatttactggtttattaattgtaaaagggtgtacggattctgttttggttgttccctttggctccaacactagggccacatgtcacgttgtaatttgcttttgtaatcttttttcagaatataaatagaatatgttggttcttagcctcctttgagctgagaattgtttttcatccatttcagtgcataatttaattctcgagatcgtgaagcaaagtgatcactcaaaatatttttacctattctttttttaattctctcattttttattaagtttctaaatatttaaatttttctatatatatcgtactaattatttaaaaataatataccaacttaccaactaaaaatatctctgactagacttaataaaagtctacaaaaattaataattatggttcttttagaaagtggtaaattaatttgcttagttcttttttaaatatacacgtattctaatgcacttttttcttttttttttcttaaaaaatatgttcttagtgatattttttctttttttgtcttgtactttatagaggctccataaagaaaaaatttaaactgaggttacctctatttaatataaaatgctatatacatatcacatattaacttatgtatatatatatttacaattatttgttaatatatatttatatatatatatttgattttgtttacgcatataattaattagatatatatgaagtccttatataaacttatataatggccgtaattctaacttagaaaatataaatctgattcaagcttgatactagcctccaagctctaagcctaagtttgataactctcttactcactctctctctcacacgctcatacaagctatctctacacttaagatttgccaaacccgattcctactttgtatccttaagggtgctatatcagattccacctatagtgatttgaata

SEQ ID NO: 123886 - DNA, 1037 bp, Cannabis sativa
gaaaatagtacctgagagttagtgaaggaataaggtaagttggaaacgaagacggtagatggactgtggtcggtcttggctctgtcatcgccaccatctctgctcttcttcttccccatggcgcttagagagagagagagagagagagagagagagaaaatagctaaaacccccgaaagagagagacggagggttttcttgtgtttcagagaggagaagggagcctgctatttgggccctttctcggcccaaacccaaatgagtggttgactgggctcaagcccagcccattatcttacaactcttttggagaatgaaatgtgtttaattttgagaaagttacaagtttttattatttatttttttcaataatggtttttatttctggcagattttttttcatattatgtattttttttattaactgaaagggaattacttggtgcaaatgattttcctactcttaatttttttttacaatctcggcgatcacgtgtcagttacaagatcttatacctcagtcagtcttaattaggtcctccgtatcacctttacaagtctctcattgtctcttttttttaaaaaaaataaataatcaaatatttcttcttttttttgaatatatttttttcaataaataaagactcaaatatatacttgacaattgaaaaagtaaaaaatcctataaataggccaacatgacaaacttttgaatgcttttctaacctgtaaatcctattttgataaataattacattaaaaacaatataaatgttaatatttaattgtataaatttttaaatactcgtaaaggcttttatgtaaataaattggtttttctttttaaatttttatataaaattttatttttcctaaataagtgtgattaattaaatattttagtaacacccataagtttaatggtaagaaataattcaaagctcatgagagccctacattttttttcctatcaaatcaaagggcattatattgtcatttatataggtgttatacaataacctctttgttaatattgt

SEQ ID NO: 123887 - DNA, 1784 bp, Cannabis sativa
aaaaatatatacatatattttgtaatttatttacataatattaataattttattacaaagattatatgtttacaaactattaagttttcttgtgttgatagtttcaaccttcatttttaggcatttatagaccaagatctttcttgtttgtcatattgttcagcactgtagtacctcaacttaatctatgatgatatgtgatttgggtatttaggtatttccttactgttattttcaatattaaatttttatgcattagtttgctctcaatttcataagtttattactaaagattttaatatattttactaacatttttaatttaaattttattttttttaaaacacttcacaatacactacttattactctacatcaaatattatttattacttactttttaaaaaaaaaataataagtaacattatattaaactaaataaaaaatcttaaataaaactatgactcgtcacacaacatttatctagtatatatatatacatattcttacaatcattatacaagcaaggccatactttgttgaaacacgcaaatgagaaggattagtagtgaaaaacaaatggtgaggttcaaattgagcacattacttagtaaggttgattgaggttattggttgccctcaagcctttttggcattttttttcttatccttagcctttttggcatttttagaaatcttgttcatcacaagggatctctattgcacccccttgctcgaaaccatactcctcagcggttttatccatcaaacccctaaaatctggcattgacaaacaacttgtgggaatcaaaaacctcctcagctcgggcgccacgtagactgctacatacccttttggaacttctgtgctctctgagcctggaagtcccccgccagatagttttccagcgagcaacgattcttctctatcgacacttcgacagagtctgtaagcctcaacatctcctcttcattaaaggatgaagaagaagcgatagtagtagtactagtactatttttatggtaattaatgggtgccctccatggcattttgttgtaaatattctttggctgagcaataatatgctttccctacttgatcaaggttgaagattgaaaaattggagacaaactttttggtgttgtgtgaagcaattttcgttttgtttgaaaagaaataataagaaataatgaaaaataaaaatataaaaaaaaaaaaataacaaaacatttatatctcagttgtccaactttcctagctctctacagaaaaacttcacctgtacaacatatctttaagaataaaacttcatgcaaaattaggtaactacatatatatatatatatttatatatatatatttataacaatacatggtacatttattatatacatttatatatatatatttataatgaaaaatattttttttaaaaaaaaactatgattaaagtgtttaacgagttatacaaaatgcgtaaattttagatggtttcttctgtgagataaatagaagaaaatatctttctgtgaaagagaaagagaacttttgtttttgtatatataaggcataatgctttcatatttggataattaacttggaatgaaatgatcatatatataggcagggccgtctcaaggtgatgagaggtctagggtgaaatttgaaacaaggcattttcttttaataaaaattaaaataaattttaattaaattttgacacaatatcaattttaattcttttatctctatgtaataaataattttttgcattaaaaatgta

SEQ ID NO: 123888 - DNA, 768 bp, Cannabis sativa
  modified_base (736)..(742): a, c, t, g, unknown or other
tgtgaaacttccccggtaaggacgtcatatctggatccagtgatcattttcccttttgtttaagccctgctcccttttgacaaaaatttccttgtcttctctcgtgctcctttgttctgattgatacaaccagtttcaaaggcaatcggtacatctatgagtggccctgtgttatccatcccgttgaattcagcttccataaatctagctttacatgccctttccaacatagaattcagcagagtctctttattaagatcttcgccatttctctttcgaaaacccgtctcaacttcttccatctctgtagtgatgacccttggcatcattatctcgatcgtctcagcacaaggggggttaagggaggtagttaatttgggttcatcaatgcataagcttgaatgtttataattattacctttagaatttataggtattgtacctgtagatgttctgctttgatggatcattttctctcgatctttgatctttttttccaatgtgagtgtcgattggtaattgttctcctctatgccctctgattgggaattttggttgatctcctctctagtatttgtttccaatctccccgttaaatccaccttcagccaagaaccgtaagcttgagagagttgcccatcctccttgatccctgtatcccaatttgtagcacattgcctcatttcatgtccaattaatccacagttaaagcacatgttgttgggttttatgcccnnnnnnnaactccatttcaatgtaatctatttt

SEQ ID NO: 123889 - DNA, 1346 bp, Cannabis sativa
  modified_base (54)..(55): a, c, t, g, unknown or other
  modified_base (144)..(145): a, c, t, g, unknown or other
  modified_base (179)..(192): a, c, t, g, unknown or other
agactcagttaattggctttaattaatcaattaaaattctaaaattagactatnncttatttatgaattttcattaagcaaggacttaattataaaggaaagagttttaaagtttatttattaattgagagactttgtaaggtnnaattaataaataagttaaatagaaattttatttnnnnnnnnnnnnnnattattaaataaataattttgacatttaaatgattgaaattaaaaagtatggcattagtgaaaagataaattgttgaataaaataataaaattctaactagtggggcccattgtatggccggccacataaggagtaattttagccaatttttatctttttaaattccatataagttaaatctaaccctaggagaaattctatacaaggaataagatggctctcattcacatccaatctaagttaactaagtttttatcctttgtcagacaactagaaacttgaacttctatagatttcaaattctctttctctttctcttcataattttcaagcccttagcgatagagtacatgcccactcatatcaagtcaagtactcaatcatggtgtggaagactgtgaagaatccaacacgtgaaggagagccagactcatatcttgttattactctgcgacagaaaggaacaagggtcagaactctaagtggaaggagacattattctgctgccaccaatgtaacgttttcttaactttatgtgtttaattctattattttagagaattcatgtttagggtgttaaacaacatacatgttagtaaatctagatcctagaaaaataatttccaacaattactccactattagtagtagtttaattgttcctgctggtgccactccattaccggagaaaccatagagcagctatttgcacgactctaggtctttgactaataggtatccatatttttagcaaattgtaattccaccaccaagggattgttgtggggtagtgaactgttgggttttccccttttgttggaccttggaccaaataagggcactagcccaattaaagaaacaacaattaaaagaaagaaaagaaaaatgaatggactaatttagttcttgtcgtggagaacaagaagtagcagccaagaaaaagaaagaaaaggagaaacaagttagagagagaaagtgagttttgctactttgcattgaagattaagtggttaattctcattcatttttgctcaaattttaagtggtgaatcctggcaaagtgctctacagatctaccagtttcaatttggcgattatcctctctaaggtgctgtaatatccccgcttcaagcctccattgggtccttacacc

SEQ ID NO: 123890 - DNA, 1185 bp, Cannabis sativa
taatccaacatacttgttagtaaacctagatcctggtaaaataatttccaacaaaaaggccatgggccaaccttagaaaaatcctgcctatatctatcatagacagattttggaagatcagagccctccatccatggaacataggtaagagaaggttccatgccttcatcaactttttccaagaatatagggcatatatcaaacacatgccctataattccacactcataacagaagtccggaagcctttcataacggtaatcaagccacatttcatcttccatccattggaaagagaccatttgacctctaagcaatagttttgaaacatcaattccaacccggattctaaggaaggggtcccacctttcattaagagaatcttcatgaacatctaagtaagtaccaatcaaattaccaagtattcgagcaagagattcagatttacttagaaagggtaaacgaaaaacttgaatccaaaagggagtagtagtgtttgaagtcagaggggcattttgtagagcatttggagagcacaaaattatgtgttagttatggaagtgtcatggttctttagaaagaacccttcttagatctccttcacagtcaaaggagaccatataagaattggatttagtgtcatagtctgaaattgtaacagcaaaccagtggttaagaatgaagtttttgagttgtctaggattatgacctttgcttgaaaaaattctgcaagggacttgataagtgacagggcgtggaggaggagtggaaatgtcattgatagtgatgacttcacattctttagtggagagtgcatttgaaatgtctgggtgaaagttatccatgggtaatcaaaagaaaattctagcgatggagtagacttggagaatgacaagggaaggaggaacacggcggtaaaaggaaagcaggagcgtttgagaaggtggttaatggaaaaattagtggggaagatggattgaaaacagttaaaaagaaaaaacaaaacacaactgccacagagcaaatttttaagggcagacaaagctctacttcatcaaataaacatctaatcacatttattaattcccatgatttgtcagttcactggatttagagtgacatgataatttgcaataaggtatactaacaccttggataagtgttacgtcatttccagggcattgg

SEQ ID NO: 123891 - DNA, 1211 bp, Cannabis sativa
  modified_base (49)..(55): a, c, t, g, unknown or other
  modified_base (108)..(108): a, c, t, g, unknown or other
  modified_base (1175)..(1180): a, c, t, g, unknown or other
taaatgataacgtgaaccaaatgagacacaaataagtgatgaaaatacnnnnnnntctttattgatatttaaaggataaagattacgttgaaatggagttttatttanggcataaaacccaacatgaggtgctttgtctagtgcttgggcgagataggccgatttgctcgagaaccaaccattactttccaaagtctaaatccatttatcactacccagaccagacggattaccccctttcaagataggtaaaacagttttcttgtcgaaaagactatttaacttggggatattccaacctacattatctaacaaaagctcagaaactttgttcaccccaagtgtggaggagccattagtatgagggaagaaatctttcctacgagcaatccaagggtcatcccaaatattagtatccttcttgtccaccaacaacttacaagctcctttttttaagatagagttggatttaaccacatttttccaaaaccacgaattagaatttttagacgtacaattaagaaaaggctttccttttaggtatttcgcttccaggatccaacagcaaagagattggttgccagtcaaaaggttccacccccatttagccaagaaggatagattcatttctctagttttacggaatccaagaccccttaaggacttagagaggcaaagcttatcccaagcttttagatacaaaccatggtcaccttttttggacccccactagaaatcacgaaccattccaacaatcttaacaacaagagagtttgagagcttggtcattttcatggcatacataggcaaggataagcccatggactttatgagggtggcatgaccagctttagatagagtcttagctttccatccctgaagattagatgtgaggtttttgataatgaaattgaagtcggcgtccttttgtctagagcaagagagaggtaaacctaagtatttgatgttaccttcaagggacccaattcccagcaccgacttgattcctcttttcatgccatttgaagtattttcactaaagaagattgaggttttgagtttattgacttgctggcccgatcaagcacaaaacctctcaatgcattgccagtagcctttaacttctttcgaatttgcttttccaaccaagattaaatttgttgggttttatgccnnnnnnaaaactctatttcaatgtaatccagattatt

SEQ ID NO: 123892 - DNA, 2050 bp, Cannabis sativa
tcttagtaaaaaaaattcatatgtttatattaatcaaaatgttaaaaaaaatttaaataaaaaaattagaaaaaaaggaaaaataaactactttagagtgttaactatgcaaacatgatatatgagctataaaaattatttttttaaaacgtgatatataagccactatatgtagatttgttttaaaatgatcataaattaatattttttaaaaaaaatagaaaaaataaatatgagaaaatagataaatatttataaatctattaaaaattttaaaaaaaaatgagataattaaatagggaacaaatagtactttgacccccaaaaattactaagtgtaatattttgagtcattagtgttatacctaaaagtataccaaggggagctctgcgcactaagaggagctccatacaccaaggggagcttcacgcatcagctcctcctctcaccaaggggagctccacccaccaaggggagctccacgcatcagctcctcctctcagcaaggggagctccacgcctcctctaaccaaggggagctccacacaccaaggggaactccacgcaccagctcctcctctcaccgaggggagctccacgcctcctcctctcaccgaggggagctccacgcaccagctcctcctctcaccaagggagttccacgcctcctcctctcaccaaggggagctccacgcacaagttcctcctctcaccaaggggagctccacgcactaaggggagctccacgcatcagcttctcatctcacaaagaggagctccacgcaccagctcctcctctcaccaaggggagctccacgcactaactcctcctctcaccaaggggagctccacgtagccacccatagcctccggttcccgtgtatctagtccactcatacaaatataagcaaggagaagatatcgaggctaaagatgtgtaagtcgagaatcacagacgagatagtgactacgcaaaaaatattggtataggagacaaggttcatttcatctgatatacatgtaaaagaggcaattttagtgtaacttaggatgtttgatacatcagatcacttgagatagtatgttatcaaatgtgaaagtgacttgacatcctataattttgggatctggtaaggttgtaaagcgtcaagggctcactataaatagagcccttggattaattgtaagaggactctctggtacaaaaaatattaatgaaacgatagtttttctaaatagtgaagagagtaatatttacttcgagtattcttctattaagatcttgaaacatcatcttaagttcttgttatttcgttgacgagttcttaccatcaataatttggcgctgtctgtgggaatgacaagctctagctacggtaattcctaaatcattcactatactcttcaagttgtcaagaaattcccatcgtctccaagaaaatatggttcactcaggtgaaaaccaaccaaccaccatcgtaagataacttcaacctccagttgttagagagggccagagggaaagtaaccaaagtgtggaccaccacaaaaatactcaaacagagcccagagcactacgtgactcgataatgacatcagtggctaactgcatcgatagaaatatctaaatatcaagagggtcatctccgctgcattgccttctgccatttgtgccaccaaacaccaacatttcaaggaataggcctagaaaagaaaagtgagcgtactcagtgagttcaacctcccaggctcattgctacaaggaggaaataagcgacctctattggaagaacaagaggttagaaattagtgtggctggtatgcaaaaagtgttgagtgtcatactaaaaggcaaagcccaggcctcatactttcataacaaaagccaccgagtgggaagtaggatctcaacaatgtatgctggcagaggtgattccatgtcatccacttgttgggattttataccctaaataaaaccaatttcaatacaatcttatttgttattaattgaagattagaagtcatttatgtttatatgtagttttcatg

SEQ ID NO: 123893 - DNA, 750 bp, Cannabis sativa
taccatgtaaatttccctataatatatgcgctgtcattgggccataaatgcacccttcggatccatacaaaaagtactaacaattaattcaaatttttctttgtttgtttttctttaaagttttttaatcgcgattgattgtaactgtactttctttttcatcgatacagtatacatacagtatagtggtcaatgtgtacttaattttatgtctgatattataacaaattggctatagccagaaaagttgcatgtcaatgcatgcacatttcccatgctactataacaaaaatcattcaaaagctttgtcctttcccttttccccatgtgcagcaatttttcctatggaccactaaaaatgcaacaggacaagaggtacacaaagtgccaccgagtgccgctagtaagtctccccagatctatatatttatatttatatctattttatataaaatataacaatatatattaaaaaaaaaaaatggagaagctgcggcctctcttttagtcatggagatagtagtctcattgcatcatcatccttttgttttagtggagagtagttcttcagagagattgttatcaagaacctaaaagggatgaccctttttggggattaagaactatgtgcgttattgcaacatcctctctacttttatgactaaaaataatttttcttctgttgctagaaactgtaattacgcggctcataatgtggccaaataggcatttgccaacaatgttatgagc

SEQ ID NO: 123894 - DNA, 1203 bp, Cannabis sativa
  modified_base (804)..(806): a, c, t, g, unknown or other
taatctctgaggtctttgatgtaactaattagaatcatggtgccatattatttgaactacaaccaatacctttatacgcccacctttgtggttgcatttgaactagtatataataatatgccatttatgtttttttttttcagcatttcggatcatatctccaggtaggatgagggtgtacgaacatgttcatcaatttttggtatgtccaatttttttaacattaatgtccaattattaatgttatcaaattaattcaagggtttttaattaataataataataatttaaggttagaaacgagataaaatagcatttttaaagaataattagcatttttaattttcaaatttttgacagtacctaattttgcctcttaaaatatataacttgttaaaaattctctctaaaatataataattacgtaattatacctcttttattaggttctgtttcttttaccgttaaaagttaatatttttatctattgaactttgaccagaaaaaaaatacaaaattttgtcctattttattaaaaaaattaattttaaaaaatttaatgttctattaattctgaaaaaattaataaattattaaagaaaaccttataaaaatattaagtttacttaaaaaaacttaaattatttctaaaaaagtattttcaaattttgtattatttataaacacgtatcttaataaatcaaactaaattaaattattaaaaatctaataaataatttaatcaaactaagatttttcgaacaaaactaaaaaaatagtatgtttacttaaacaaatctacannnaatatatattttttatatctaaattaattttttaataaaaataaataatttttttaatcgcttaattagtttaaaaattttaattttttttttaattttcttattgattcaaaataatttttcttaagatctaaattaatttttttaagatttactaaaaaaaattgatctttcttatttttattttgaggggatacgatttgatagttgtcaaagtttagggggcaaagttgctaattcacaaagacacgccaacatttaaacggaataataggacagaacctaacagaatgtctaaatttctataaatgtaaaagttcaaagggtttcttaacaagtcgtatattttaaagggacataatcagtattatcgaaagtttagagggaaaaattatta

SEQ ID NO: 123895 - DNA, 1530 bp, Cannabis sativa
  modified_base (162)..(166): a, c, t, g, unknown or other
  modified_base (540)..(558): a, c, t, g, unknown or other
  modified_base (618)..(629): a, c, t, g, unknown or other
  modified_base (1503)..(1505): a, c, t, g, unknown or other
attattaaataaataaatttgacatttataggattgaaattggaaaatatgacattattgaaagaagaataagtggttgaaataaagtggcaaaactgtaattagtaaagcccattagtggcggccatttagtgtgaatttttcccattattttattctttnnnnntccatataattaaatcctaaaccctagttgcaatactataaaaaaaacatgatgctctcatctcatccaacccttcaacctaccaaatctagttttctaactctattagacaactagtagatgagagactccttctatagtgattttgcaccttattcattgttcttcatcaattcgagccctagtgatagagtacaatgcccacacatagcaagtcaagtactcaattatagtgcggaagacggtggttaaccaacccgaaggagagaaagagatccaggcgcagatcttgttattactctgcaacagaaaggaataagggttagagatctgagcgaaatgagtcattattattccactgcatcaatgtaagnnnnnnnnnnnnnnnnnnngtttaatttcatcgtattagagaattcatatgtagggtgttaatgaaacatacatgttannnnnnnnnnnncctggtaaaataaatcccaacacataggccggccaacctacacctggtaagtgcatggccagccaacctacaactggcaggcctttgatgtgtaaccttcattcgtggatagcaggttaagttgcgatttgggcttcaacaacgcctaaaaataggggaaatatttgttatttcacctattcttgggggatttttaacccatttaatgtttattatttaattttttcaataaggctttttatcctattattttgaagggatattagtggttaatcttcatgtaagctctactcttaaagagcattagtctaaccctaattctctaagtcttaagtctctaagctcacttaaagctctcaagctctaagtctgaaaccctaactcttctctctctctctctcccccaaggcttcattcttacttaagatttcccaacttgattctcacattgtaatcttaagagagccacttcaaattctataacccttgtgatttgagtggtattatctttggtattaatacaaccaaaagggaactaggtcattacccgctaactcagggagccgaacctctataaaatcttctgtatcttttactttactattcttattatgtaacacgtggcaagcatcagtaataaatatgactccgctatcgattgtcaaatctcaggtcaatagtttggtgctttcattgagagcgagttgctaatttatctgatcaaacgcgatggttaacacaaggagaacacctggccaccacaactagtcaaggtgacattgttaaccaagctggtctcaatgattaacctctaccgcccaaggaggatctgttggatttattttaccaggatgttagatctactcacaagtannnttattaacatcctaaataagaactt

SEQ ID NO: 123896 - DNA, 3069 bp, Cannabis sativa
gaaaatctcggtcaacatctataaattttgtaattaaaaattttaaacagtaaaattataaggaaaaatagtactactacaaaaaaaaaattaaaaaaattaaaatgcaacacaacttttgatgactttttatatgtgtttttttatttttgatttttttttccttctaatttatttaattattttaatggttatttcgtactccaacacattctcaagccctacacactacaatagtacattggtaaacatacttccagctattgataatgatttttttttttattattagggaatagtagtaaactcaagccctagaaaattttcttttctagatcatctccaatgcaagatgtacatattgtgctaaagttagcacaaaaaatgaacaaactttatatttagcacaatatttgcaattgtactccaatgttgtacaataacattttaagagataaattggtggaaaaagtaaaatatcattaatggcaaataataaattaaatatttaaaaaattattgatagcaatattgtaaataaaatatatttattaaagtatttcattaataattaatggcaaaagtgtaattaaaggtaaatttggcacaatgctatatcttgtaccaaattttatccaatttttagcatgtgccaaattaataaataataacttatagcacattattagagaaattttttattaaaaaatactaaaaaataacaatacatcacttatttagtactctattgaaaatgttctcagaaaatgaatattacacgagatattgactactaatgtgtctatcactattataagatagcgtcttataattaaataataattttctataatttttattaaaaaaaaaataagtgaaattaaatattaaaatatatcaataacaatattacacatcataaaagcacttaacaatacaagtgtcaacatttctctaaaaaataccatagactccactacaaaaaaaaaataacgaataatataacaacaaaactttaataaaactaaacaaaacaaaaaaaaaattatataaagtgacgtgataattagttttgaaccaaatctatttcttacaatttaaaaaagtgatatcggtcaattattaaaagaatttttaaaatatattttttttatattttttttataatttcacatttaaaatttgtatttataaaaatacatttataaacttttaaaattataaaaaataattaatcaacatcatgacaactataaataaattataaaataactaaaataataacatcatgataactataatacaactataaataaattataaaacaactaacaaataatatattatttttactaaagatatttttttagaaataaaaaagtgaaaaatataaaagtgaaaaaatttccgtcaataggtatttttataatttttttttcaaatttttagtctattgtaattttttttcttctaattattatgtacaatatttttttttaaaaaaaaaaacaagtaaaatgggattttcttaagcacatttgacttcatcttgatttcccccatactcttgtttctctcataattaactgcattttcattctctctttcaagctctatattaataatgggctctcccctcatattgtccagaggaataggtaaggggatccttttctccctacctcttccttctagttgttgagggtttagctgccatcattcagtctaaagaacagtctaacttggtcaatggcatttccatttgtcgattgaccctttctataactcaccttctttttaccaatgacagccttctttttcactcagatgaattatcagaattgccagactattaaagatatcttaaatatctataataagaccattgttcagttggttaattaatccaagtcctcggttttgttttccccatacaccacttttcagtacaagaactcctttctctcacttcttggtttggtggataaaccttttattgataaatatttaggggtctctcaatgttttttgagatccaagaagtcctcctttcacttcattcttcaaagagctaacactaaacttagcatgtggaactctaagctcttttctaaagcgggcaaagaggtccttctgaaagcagtaatccaagctattccttcatatgtcatgtcatgctacaagatttctttttctatctgtaagcagttggaaatgcttatggctaatttcttatggggctctaaagggaacaatcactctaaaattcactggaaagcctggaacaatctttgcaaatcgaaattctttgggggccttggttttcgtacaattattcaccaaaaccaagccatgttggctaagcaagcttggaggatctaccacaaccctgattcccttcttgcatctattctaaaagccaagtattttaggaataacgatttcctcaatgcttccctgggtcacttttattcttggaggagccttctttggggtagagatctgctctctaagggtttagtctggaagattggggatggtaaaaatattcctacccttagccttaattggttgcctgatcatagatatatttcttataaagatgattctttgcctcctattagtactctttcttacttcattaaggaggacggccattgggatatcaacaaactcaattcccactttgacaaggataccattcactccatcctctgtgtgcctaccaatcctaattccaaggactgtttcatttggggacatgacccttctggtatgcttacggtagactcagcttatcaccttgccaactctaaccagtctgctccttcttcttctatcccgaacaccttcaagggctgatggaagattgtatggtcttccaacatccctcccaagataaagcacttcatttggaaggcttttagtcatctcctcccttctaaccttaatcttttcaccagattggttcttttagcccctattgctctatctgtcaaagtaaagtatgttggattatgttttaccaggatctaaatttattatcatgtatgttgtttaacatcctaa

SEQ ID NO: 123897 - DNA, 1297 bp, Cannabis sativa
tgtttcctatttcaattaattttggtaaacggttcgggaaccaggcgactaacttttttagctcgttcttctggttctattcttggctgtgtttccggcgggggtgatgttcctgctggtttggaagctatcttggtagttgatttgatttaataaagtttaattttttggttaaaaaaaaaaacaattatgataatcacttaatgccgaaaccttcttattttgtttttttaaagcttgaatcttaaattttgaaccttcctgtctatgtgtgtttataacaaataaataattataaaattcaactaatataaatttatacagatgagtgaatttataatatcattattattgtactgtttataatatcattattattgtactgttccaataaaaactaatattaaaccttcttgtctctaatgatctaaagaaatcagatgagtgaacatcaataaaaaaaaaatatgtatatcacatgaacagtgaactcaaataaaatcaaaatatattgatgtaaatactcatcaatgataaaaagcaataaaaataaatttacaaaaatcatgaagccacatcaaattagaaaaaagaaaagaaaaattgaagctaagagatgttattaagaaaaatagtgatatattttacacaacaggaaaaaaaaattaaagtggtgttcactggtggtaaccttcgctagaaaaatgagtgggatgattaacaaaagcataaactgtgagataggtatatccatacacaaaaacaacaatagtgtgagagtttgagatgagagactcctaaaatgagtttgagaccataagaatggttaattatttctaacgtccaatttaattatatgttaaacaaccattataataccattaatactctctctatatatttaagtatatatattattcgagtattaattttcaagtatgaatgttcctatatatggactgttaaaatttagtaaaaattaatgcagtcattatttttatttttattattataacgtatactttttcttttttaatggacttatccatatgaattgttaccttgttcttttattattaaataaaaaattaagaaaacagtgaaaggttagcgattaatgattaatgttttattttaaatgatatgataaaatattaatgcgtgaaacattaatgcgagatgagttgttatatggagaggtattaattaattaaaataaagtatatttctgttacactataaaatagtgtagggacttaatagtaatttctacagagtgtgaatcactataaatatg

SEQ ID NO: 123898 - DNA, 1314 bp, Cannabis sativa
  modified_base (1282)..(1283): a, c, t, g, unknown or other
tagccacaatcttgttggcgatgagagtctctatgaccaggggggaaaacgcaccatctttgcgtcttcttccgtgaaagtaattggttggtccatgagtcggggcctttgagccggaagctaggcaacttcccacacctcatcgtgtgtaacggccctgacatagcgctttagttcctttcgagtggtccctccaatatggggcccaccagagatcatagccactctttcattgggtcttggtggcaggccaggggtctgctgaggccctcctaagggtgcagctggtgccagcgctccgggcgcacccctggcgtcccttggggcaaaggaccccctgccggaaccgggttgagatggggtagtcggttcttgatccactcatagaggtggcccaactgaatcaaatttttgatctcatctttcaggtttttgcactcattagtattgtgtccaatgtcgttgtggtactcaaatcttttgttgggatcccttcgagaactatctcggtacaggggaggcggtctccggtagtgcgtaatttccttgtggcgaaatacacacgttcttgtgagtctttcagctctgtgtacttggtgcattggggagtataccctcttttttggcgcttgtcctccgtccggttgctgccttttaaggacctcttgctccgagagccttgagaaggtttggttaggcttgcagtaggagcggagtgagacaagacctgttcgcttacccccgggggttcccatagcgcgaagatgcgcgagccaagtcttggctctgattgtatcctggagtagcagagaattgtataccgctcatttatggagtaaccaaaggtagggtttttgggagttgaactccgggtacatatcctgccactccggtcggatagtatcctccataagccactatttgggcttcttctaagttgatatacttttggaccctcttttggaaatcttagagattggcagctccttcttgttgtaattcgttcgagaacggggttccagtttggatcccagcttgcagaagtgcaagctattgtctgtcatcaactttcttagttttcaaggcctcctccttgaacctctttatgaaatttttcaatatttctgtgggtaattgcttgatgttagtcatggcgctaactttgagattaatcttcctcgcggcgacgaactgtcttcggaagttgacttgtaatttgttcctacaatccatagatcctgtttctaattttttgagccactcctccgcggaaccgcttaanntcagtggaaagcataagcacttggcgtcatt

SEQ ID NO: 123899 - DNA, 868 bp, Cannabis sativa
  modified_base (30)..(31): a, c, t, g, unknown or other
aattacataaatgacaattttatttaatanntaattataattattaaataaatagttttggcgttagtaggattaaaattagtaaatatggtatttgtgaaataatagataaagggttgaaaaaaatggcaaaaatataattagtggggcccatatacatggccgaccagtatgtcttattttagctattattttatcattttttactccatataattcaatcctaaccctaagtgaaatagtataaaaggaataggattgtctcattatttaataacctagtttacattctgtcaaacaactggagttcttgagacctcctccttcttctccttcttctaatttcgaaatctcaaatagtgctcttcatatatttttgatgttaagaacactataaattctgaatttagccctaattaattcatgagaatcaaacaataaaattatagattatcagaagcgtaccggagtccatagagtcgattttgaatggtatgatcttccaattttttgcatcaaaattttctctctggaacctgaatttcttgacgaaggggattcaagaataaacatacgatatgtgaagcgatgcaaaaaataaagaccaatacatgtttattaataactgaaaaacagtaattaatcttttttgactattttcaatttagcccctcatgaaattagaagttatctttatggtatgcacatattaaaatcatgacaatcatccccttaagttataaactttattctaaaatagaccacataaatttaatttatttatttgatgacccaacacacattttatatatggaatcgtgactccaataaatttctaacaatctcccattgggtcacatatgtatac

SEQ ID NO: 123900 - DNA, 1485 bp, Cannabis sativa
  modified_base (1458)..(1460): a, c, t, g, unknown or other
ttcaaaggttttacagaatgataacttaatttgatatagtcctgtataatttacaactttaaattcattttttttaataatattatatattcattcaaaaaatatatatataattttatctaataatatagtgctaaggtaattgtttttaaaggaatcgatacatgttaaaataataataaaaaaaaaagtaacaaagttacacaattaataaaaaaatttcttccatctatcttataagaaaattagacaataaaattttaatatcagaaaagaaaattattgatagttgtgactttcactctcaataaaatacctacgaaataataattttatataaataataagaattctaagataatttaattaattagaaagtgtattacatatattttaagagaatataaaagtattatttattatgtagctagtgtaaagtattgtgttgtaaatgataataatgatagagtaggaattagtgtaaaaagataaagtattgattgaagatatatatggtgagccttgttgtctcttctctattcttctacaactttccccccatgaaaaagtttcacttgtcagcaaacacatttattttgtaaaatgaacttttcctgttaaacctaatttattatgctgtttatttttcatatggggtttgaattttccaattaattataaccctaattgaatatgacaatgacaagagtttacttatcactcttatattgccatatgtgtttttaacacccacaagttattcatttgagctggaaagagcaatagggactagtaaaaaataataataacaatcaatatcaatttcattaatctttctaaaatgaatgatatgtgaaagaattgaccattcaagtatgtgggatccatatagaacatagatattttttatacacaatatataattagatgccaaaaaagaaagaaaagaagtggtaaatgtacatttgccactaggggaagtggtcacccactaaaagagaaaataaatatatgacaagttttttggggttgcataaagcttatggcttcttttctaatattttcatacacttgttttatttactctcatctccacatcgagttgatgtgagtggctaacctcacatccggtttatcttatcttttcaatttttttgttttaattaataaggcaaaaagactctaatattcgaaagcatatcatcttatacttatctaatctttggctgctcttatttatttatttttaattaatattaagcttcatatgtaattatatatatatatatatataaaaggtagtcggttcaaccaaaccatttaattaattaattaattatgtttatattgatattgttggatatatagtgaatcatttttataagaatttttagtaatttaattattttttaaatgaaagataattattattaggcttatgtgacagtcagtagtccnnngatccgtaaggggaaacaccgggta

SEQ ID NO: 123901 - DNA, 1146 bp, Cannabis sativa
tggcatgttgtctttgaagttttacattttgttttattattcagttataaattatttatatttctcaagtagacaactctatcatagatggcctaactaaaaaggctagaaattgctctagtcgtgaagctttgaattttcagtgggagggaattcccttgtggttcccattgctctttttcagtaagtgaactttgaaaagttccacaaaaaaaaaaaataaactaattgaaactgggaacgggccggagcataggtggactaggcccgtacctagagtctatattttttgggagcctaaaataaaatatgaaaaatctcattagtcttttatttaaataaaattaattgtattttaaattgtaaatattgacagcttgattatggtgtattgcaaggttcagtattctcagggccagcctgactgggaataacattatttgtacatttacattactatgggatttacacaatcaggaatgatgacacatattataggtcagaggttcgaactctccttgtagagttttatttttttgtctgttaataatttctaaaaaatatataaaaaataaatcactataatcaagattacatgttttacaaggtatgtatatataagtaacacgttagcacacaagatagtgtagtggggctcttacgaaataattacatttaaatgatttgtggctatgtgctagcatttgtcacttagtccaactcaatcatgtaaaaccatatttgcactctttattcttacaatcaaattggaacacacctttcattaagaaagatttggctcaaggctcaagccaacatataaaaatcacaaagcatgctctccaatgaagtgtaaaaatagtgtcgagtgctatactttaataattttgaaaaaattaattctctaaagtggcgtctggttagaggtaatgaaatgaaatagaatagaaagaaaataactttaattttattcttttgtttagttgcatttaaagtattagaatgtcattttaatggaatgacttttttatcattttggtagaataactattccattttgaaattaaaggaatgaccattccaatacaaaatgaaaaaaaaaaattaataattttttatcaattttttatgtattttaagtttgat

SEQ ID NO: 123902 - DNA, 1086 bp, Cannabis sativa
attggaacctcctccatatatatacatatagtgaccactagtataagactaggggtgacatatgtctttgaaatttaaatatttaagtttatttatttataatttagtctattttttgtttttgtttttatattttaattttataaatatttttatatttatattctcttttttcgtattttctatattatgttatttttgtaaactaattttcattatttcttaattttttatacataaactaaatgtatatgtatatataaaggtatttatatattacaaatgaaagctagctagttattaagactataaatgtatttatatattaaaaaaaagactataaataaatttatttatatttatatgttggtggtgataaatatatgacataaaagtcaaatatatattgatatttatttattgataactaaataaattaatatccatttacaaacaacgacaaaacaagaaaagaaaagaaagaaaaaaaagtacacatgcattgacgatgacactgtaaaacccaaatgcctttttaaccttaaaatattgataataataataaaaataaataaataaataaaatgatcaccaaaatttagttttctttcttgttatttacattagccaatttatattactagctatacaaaaaaaactttcctaccaaccaaacaaaaacttgtgaagataatctccaattttcttttaatacaagttgaagattaattaattaacagtttagagacaataataccaaaatagcaataataatgattaaaaaaaatatgagagagatgaacaaattaaagcttgacaactcatgcaatatattattatataagggttggtaaaagggacaaaaaaaaaatagataagataagagaaatgaatagttaaatttaggtaatttttttttttatttatgtggggctaaaataaaattatctcttagaacacgatcacatcaacttctctaatattttacaatttaaaatacctcatttaaagttttactactaaaaaatcttacttttataattaatcaaaacaaaatttatgactaagtaaaaaaaattgtgacta

SEQ ID NO: 123903 - DNA, 981 bp, Cannabis sativa
  modified_base (107)..(109): a, c, t, g, unknown or other
agaaagtcttatctcgcgaggttacttttggtagtatctgacaagacaaggcgatggaaataaccaaccaaatccgcctaataacccaggcaaccagggactacaannncctcctcttgaaggagaggacattctggttatctctggagggctacatctcgctggagaaagtaacaatgtccaaaaaagatagtgaaggaagttaaaaacgagcagtctatttttgctccagaatcttctaagaaaggtaagagtgaggaacctccaattgcgttttcagaagaggatgtgaagcatgtgagataccctgatgtcgaccgactagtgattaccatccatctttcccagaaaaggataaaaagggtgctggtggacaatggaagttcagtgaatatcctttatagggatacattgaagaaaatgaggatagaaaaagcaaaattaaaaccttgcatggtaaatctatatggatttacaggcgacaatgtcgccagtcaaggaataattcagctcccattcactatgagtgaagcacctttatccaccgctatcatgcaagactttctagttggcgacctaccattagcctacaacgcactgctgggtcgaacaacgttaattggactaggggcaattagttcaattaagcacttatccataaagtttcagacaccaacatgtgtaagagtggtgagaggtgaccaacttctcgctcgggagtgctactgcatcgagctaggccggtcaccagctaatggtagtcatgaccgatgaaggcaataagcaggatgaggatcttgatcctcgaattcaagatgaacagaatttattgaaaccaaccgaggaattggaagtggttgttctagatcaaagaaatcccagaaagtgtgtattcattgggaggaacctagatgaataattaaaatagcaactaataagttttttgaaggaaaatcaggatcagtttgcctggagccactc

SEQ ID NO: 123904 - DNA, 518 bp, Cannabis sativa
atatatatatatgagcaaaataaatataaagtagtgcgagagaatgagtgaccttgtttgaagtaattggcaatggtggcgctgccttcctggacaagttactcacactcagaatcagagacacaaactaagagagtatcaaacagagccattatatttgcaattaggctaatcaagatttttctcccacatgtatcaaattatacttcttttgaatttttaaggaggttaaaaatgccctctaaattttgaagattgttggatttaatgacttttttctaattttaataaaattgcttaacatagatgaaagtagaggatcatgatttagtacaattcaataattcagccttacaattaaaagaggagtatattgaaatatacctctttaccgggtatattgaggtgacatgggtaatattggtaaagtgtttaaaaaagagataaaaatgataggctttaaaaaagagagtaaaaataaaagaggacaatataaaaaagtatagagtctaatttcc

SEQ ID NO: 123905 - DNA, 1558 bp, Cannabis sativa
tggcttcatcaatgacttggaggagtcatgtttctaagtcaggccaactcatttcacattacaatgcgggcttgatcatttcatccattcacaagcaaggcccaataatctctcaatttaaagttggatttaatcatcatttctcaacaataatccatgaataagtaatccctactcaccccaaagtgccccacgcaaactgtcgagcactccaacaacgccatgtggctacctttttccattgtcatcaacattttcagcaactttctccatttctttttacacgaaagaaactgatgcttagactaaatatggtctataaatagtactcaaaattagtgtaaatggggaacaattgagtttagcgaaaatatgcacaatattttgtctcactctctctcttatttttctttatctttttgaatgaacataatgtttagtttgagctaaattttcaattggtgagattagagaggttcttatgttggtgtgtttatatgctacatgattctcttggttataatgtctacaatttgaatttattcatgtcttcttcactttttcttcttattattttacaaagtattatatgccatactttatataagtattagtcatgctctacttatgtaatttagccatataagtattttgttaatgttaatattatcatatatgattatattttactgcaaaactactatgtactatattttatcgctttttggatatcgtatattaataatcaattgttataattgtgaagacttaatttattcaaaataaatataaagtgagcttttagaatcattttgtatgtataatacaaaaacatgagtaaatctttatctcactacttttttctcgttgaattacttttgcaaaattttattttcttaatacgattgtctacatcgtcttctctaaatttttagtcactttctttagcaaattttccttttgagtgtgtttttacctccttgtggatacgacaaactccatttattaccgcgacctcagtgtaataaattgggcgacatcaacccttgaaaaggttattgtgtggtacaatgttagagatagagttcaagactacgggtcactctactaaaatctaaatcgcattcattatacaaagattcaaatcaaaagacacatttgtttatgttcaatattattgttgaatgatactgcaaaatgaaaatattttttggaaaaattcaagtggaaaattgttggaattttttttacaaagtgaatgattttttttgcaaaataagtgtcctaatgtatgtaaaatagataaagtcccacataggatatgagcacttatttataagaataaataaaatgcaattatagcacttgggataggacccaaaggagaatacacacgcgcgcagtccgttagtgtggtgtgacactttattttttataaacaaaaattattttataaataattatttttattttattattttacttattgaaaaatgtgtttaattaaaactgttattcttcttattttatttttgactaattaggatttttgcctcct

SEQ ID NO: 123906 - DNA, 1344 bp, Cannabis sativa
aattggtcatttaattttgtaaattttgtatcaactttataataccatatacattatacatatgtgcccacaatataattttaatccaacacagacatataatattatatacatgaatagtactcttaataataaattatgagaatatatatatacattcttaaatatataatatttgtatatttaatgttaataataaattaaatttcagctagctgaaaattgttaaatagactctcgtaggatactacaactatagcgacggttgactacatagataaattgttataaaaaatgatcaatatgaaactgaaaagagatatttgtaataatttttataatttagaaatttttataatgaaaaaaaaattcaagagaataaactctacaacaatcatatttcgaagaaaaaatcttatttattttaattaataataattaaaaaaattagtccttgttcagattatttttcatgttttctcctttaagtttagtggttaatgattgtaaagtgttacttagtaattaaagtgagttttgttattgttggttcattgttttgttaatagggtgacttataatttttatagagtttcctttgtaaattattttctcataagggtgaagttgttgctgatcatatgtagattttattagatgattgcatttcttaatattttttttttatttcattttcaaagaaaaagtaaaaaaaatcagaaagtttaatggaggtaggtttaatacctttttgtcatagtttttttttaaagattagttgttagctttttctaccaaacaggccctacatctgtcttttgctttaataaagtgtagagaaggataaacatgatttttgacctaaaactataacacacataccattgataccacacgtttcatatcctcttccaatttcacaattaaaaattcaatcaatggactggatccactccttcttcaacattgcatttcctcccataattatatttctacactttttaatcctaccaatatacattccattcaagtttctacaatttataaaaacatccataaccactcaagaaaacctggctagaaaagtagttctaattactggagcagctcaaggcattggagaggtataaatatatatatatatatatactaattatctatatatgtgagttttgttttaacaattatatatttttattttgttgaagcaacttgcttatgagtatagtagaagaggagcttttttggccttagttgacattaaagaaaattttgaagatgttagaagaagagctcttaaattaggatccccagatgttatatctattgttgcagatgttacta

SEQ ID NO: 123907 - DNA, 1626 bp, Cannabis sativa
tcaatcctaggtggcttcgcctctagtggatcaagatttagtagttagttacaaccgcaattgtaactaactcctaaacctttgatcaactgactttacaacatatatataaagctggaaactaaagcaaataccctaagacctaacacagaatacagaacacagataaaaagagcaagagagaagagaagagtggatataccctagcctcgagctcccaaatccaagatccagagagaactggtccagatctgagagtaaaactctcgtggtgaggattttagaagaagtacatgcacaaaagaaaagtacaaagttagatccagaagataaaagaaagagaaagaaagaaacaacttgtaaataccaaaatcgagtcttacctgatcgattttgtgacaggaagctccgaatcgctgtatttcaccattgttgatagtggatatcaagctagatctctgagatgagcttgacagagacgtagcccagttttgggtgaactctgaaacaaatttcttggtgttttctctcccttactttgtttttcattttgctaaacctatatatgtgtgtgtgtgggtatgattctgggttttgtgctttgaatcgagcaagttcttgaagagaacttgctctgctagggtttcgagttgtgaggctgagagtgcattgtgtttgagtgttagggtttctaaactcttcttggagagtctttaacccagggatccaaacgacacaagaattggtgtcgtcttggttaaacgctgccgtttttgtctagactttaattagacaaggaaatgtcgattttgaccttgatactaatattaaaaatgttttgttggtgtaagttaaaagggtaaaaatcctacaatgataatgagatcagatcagatcaccatggatgaatcgatagacttgaaattagagaatgtatatatattattgagtaatacttaatattgtgaaccacacaatctattattttattttatgtttgggaaagtaaagacaaaagatataaattcaaataaagttggcagttgggtttattgttttgggagtaaataatattttaggagtgttaatattaaagtgtggctatccacacagtgcagattggattggattgaaaaatttaaaatccacacttatgcggattggatattgattgatatgtaaaagtaaccgatccaatctaatatccacacatctttataaaaaaattatatattcaaataattttttttttgaataaaaatcataaaatttattaattaataaattcgttcaaaataatagaaagcacttcagaataacagtcatccagctgaagcacccaacctgtagagaaataagagtctcttaccaagcaatgagttaacttatttgcagatcgttttacaaaacacaactcaacaaaagataaaaccaaaagcaaatttcgaacatcttgaacaataagaccaaactgtgaacgtataaaaataccgctctaaatcgcttggacacacactaaactatatgtttctaacatgactctatcccacgaatgagttgcaatccaactcaaagcttctttaatgcctattatctcagcaatttcgggttgaacacaaccaatct

SEQ ID NO: 123908 - DNA, 704 bp, Cannabis sativa
  modified_base (603)..(620): a, c, t, g, unknown or other
ttttttttttttttaaattaaaatgtgtgagatctaatattatattgcaccaataataatatgttaacttttgtaatatttgacaccttaaaatattccttgacatttatatatttgaattattataatattttaagaataaaataaattctcctgaattactggtagaaatttgatattttttttttgttgaaaaaattatttcccaacttatgaaacttgttacaaatatcctaccttaattacattttgttcattattttatgagtttttcgctgaaaaactctctcaacaattatttcacttgcacttaacttttaagctttaagtttagtggtaaaaccctccaaattattgcactggtaaaaaatttaaagtgtcatccatttagcacagttacttatcaacatagattacttttgtgtacaattttgtacatgtaatacatttataatattctatgatatataattatttaaaagatataaataattaattccaaaattaagaatttattttaaaaattatttgacacacaacacaattacattagtttacatatacacataacacaatgtaatttagggctgttcatccgatccnnnnnnnnnnnnnnnnnncaaacaacatccaatccgcattaagtgcggatttcattttttggatccaatccaatccgcacaatagttcaaatccaatccgca

SEQ ID NO: 123909 - DNA, 564 bp, Cannabis sativa
ttagaaaatacagagtccattttgtcatttaacaaaacacaggatccaattagtaacttttgtgaaacagagggtccaaaatagtatttaccctataaagaaaaacaacaacttgcgtattcaaaaggtatacaaaataagttatatatgttttcgagaattatcaaatcgatgatataaatcataatgtgctttacgcaagatattatattatatatatatatgtatccatacgtatttatatagtttcagttgaataattatactaagttggactaactttattcatttattatataattaataattaggtttaaaaattaaaataagtcaattacttgaaaattcaaagagagggaaacagttttatatgttgtagaatttcaggacaagaagcatggtcaaaatgatttcatttgatgaaaaacattaaaatcatgatatatgtaaaataatccaattaattaagctataaaattataataatttaattgaatctcaatacatataggtgtcgtttggtaacacttttttaatcaattttttgtttttaaaagtggaaaa

SEQ ID NO: 123910 - DNA, 1956 bp, Cannabis sativa
gcccagaaagaacataataaaggatgtaagagattatgatcgccatgtagaaggctatggaaacagccagaatccacgtacatccaaaggtcctgtccagtttcaggagaaacaaggaagagtcctcgccaagtacccaaaagcataaaaataggaaaccaagcccgatacgatatccttaagaagggaaccctaagaaaaatcctacatctttccccaaaaagaataaaaaggctcaggatctacaaaaagactgctctaatttctcgaaagaaaaatgtctgcaaaggggcaggctcgttagagagagtactagccctcaagaccgagtggatcaaaaaagcgtgtcagtgcatcaagaacctggggaatgaggcagaaagagtcgcaagcatccccctgtcgacctaagacataagcttaatgataagcatggtaaccttaggaagcacttagagaaaaagaagtaagcaataccggtgtcggaggttaccctaaacaaaaggatcctggctgaattagaactcctctaaaaagacattggtagggtctcacgaaggcaaaaaagagatgacttggagtctaactgtgaggacagagagccctacgccaggaacatcctagaggcaaaactccctaacaatttcgaaatgcctgaaatggcaatatatacagaagatatgaaccccagtgaccctctgtcccaattcaatagagtaatgacagttatgagagtcagtaatgacgcgaagtgcttatgttttccattaacatttggcggatccgctgaagaatggttcaagaagttagaaccaggatcatggactgttggaacaagttgcaggtcagctttggatggcagtttgtggcagcaagaaaaattaacttcgaagtaagtgccctgaccaacataaaaaaactaccaacggaaaccttgaagaacttcataaagaggttcaaaaaggaagcttcaaaaaccaaaaatgtcaatgatggacgacagctggcgctactccaagcaaggattcgaactggaactcctttttggaataacctgcagcaggaaggagcagcaagcctccaagactttcaaaagagggtccaaaagtacattaacttcgaagaggcacaaatagtggcttacgacagatattacccaactggagtttcaggatacataacaggaacacaacttcctggagctaccctccccatcatctcataaacaagcaaaatacaattttttgccactctgggatatactccaaatctcgcccttgctctagctcagtcacacctgggagcgccagcaaacaatccctctaggatgaatgcgcagctcccagctcagtctgctccagccacaagcatggcaggagtgccccaaagttcccagagtaagaggtcttccaaaggaagtatgcgacctgaggataagaggcaaacgagagggtatacaccccagtatacgcagtacacagggcttacggatactcaagaacgagtatacttcgcaactcggcaaaatactcattatcgaaaacctcctcttttgtaccgagacagttcttggagagatcccaataaaaggtgcgactatcacaatgacatcaatcacaccactaatgagtgcacaaatttgaaggatgaaattgaaagtttaatttgattgggccacatgtacgagttgatcaagaatagattgccacatctaaacccaggtaaaaccggagtcctagtgcctcaaggaggacccacgacaacaccagagggacaggtgcctccaagaggaatgcccaatcagcagacaccggacaacctctcaagacaaatggaagggttaccatgatctcaagaagtcctcacatatggggaaccactagaaatgagctgaagtgttacgctaagactctagaacatgatagtgagatatgggaagtgttggaattattttac

SEQ ID NO: 123911 - DNA, 2028 bp, Cannabis sativa
  modified_base (68)..(73): a, c, t, g, unknown or other
ttttttttattataatacagaatttatggaaagatcgaaaaacagtatatatataaatataaatatannnnnntatgtatatatatatatatatacggtgaatgtgtgaaaggacaagtagggttgggcgtatatatatcccgtggcttaataattcatgactgagaaaggtaatatatatatactagaggttgtaggcatttaattaaagcggtacgttatgagcaacacactagtccgtacaaccaaaaccagacatagtagccggtaatatggtctggtattagttgggttcatcataaaatatttaatgcatatgcttcagacttcaaacttgagagagtaattcagaatatttaaagccaagccaccaatatatatagtacgtacgtacccacattaaggctttattgaccctagctagctctaattctaataattctaacacaatattaatatagatcaactatatatatatatatgtatattgatattttgactccttcaacatagatcgtagtttcttgacttattactttgctaatttgtttatgttgtacaaaagtggggccatgcatatatgacttaataatttcatgctacccaattctctacccaaaatttcatttttcacttttgttttacgttttaacctatacctagcttgtaatattgattattgtatccacttgggtttaatattaacgataaagtttcatgttaagtgtactatagttaattattcgtaataataattaattatgtttgttaaacaatcgagattattatagatatatgtatagaatatttcgaagagcattattgtgtactattgttaattagcatttttttagaggttgtattttattattagtaattagttagtaatattttttaaaaattattatattaaataattacatatattattttatgtacagccaataattgaggattgaataattaaaggattttattgttataaataatttgtcatgtcaaattacttaatgaaaatattattgaataaaaattggcgaaattagaaagttttcatttataaatatggaaaggaaaatgaaaaaggaaaaacataaaaggataagatgagtacgtgggagctaagctgagtcatatagaacagtgaagacgacaaaaaacatgcacgtggagaatctgagccatatgggaatattgtccaactgacatgggtaaaatagtaatttcaaccaaacagctgtacagagacttcagtttctttctttcttgccctcctccttcccaaaaggccaaaatccataaaaagcaataattaaatattttacaaaatttttatggaccggtatgcattcatatattcttcttatttagtttattatttaaaataattttgtatagtcatataatttataattatttaacatattttataaaatattaaaaaatttacatattaaaaatagaatttaaataatattttagtgcgtgactattcattttatacttgtgtaaacattattttttatattttaagattaaaaaaattataagatatacaaatatgagaaaaaaaaattaaggtaaaaaatattaaaatattataaaagcaaccaatattttattattaattaaaaaaatgaatttagtggctgctctgttcttatgggtcccacttcttttgaggatgtttgctttgccctgccgtttaagaaatctcccattctctctctttctctttaaaatgaccccattcgagatacacatcgccacgtggcgaaacaggtcagatatgtcagtttaatttagatacacatcgccacgtcacataccctcgcggtttctttctgcgccagtttttaggtatatccactctgacgtggcaaaccccaccctaaactttttcatttcctcttctttattgaatcaaaatctcctcttaaaaagtggtgttctatactatattaaaccaactaaaatttgaaatgtaaaataattttttatttataaaaaaatttaaacctctaataa

SEQ ID NO: 123912 - DNA, 3337 bp, Cannabis sativa
  modified_base (2646)..(2655): a, c, t, g, unknown or other
aacacagggtccaattggtaacttttgtaaaacaaaaggtccaaaatggtatttaccctaaaaaatatatatctattatttaattgtatttgtctattttttttatacttttgtaggtacttaaccgttaagtgttaagttaaaaaaattattttttttattaatatacttaaattaatctttaaataaaaaataaaaatttaatgatattgactaattagaaactactacgtgtttattaacttaacacttaacggtcaactacctacaaaagtttcggaaatataatttagatattattactgttaaaaaataaattaaatatttatttacaattaaaaattaaatttaaatatttatgtaacaatttactctatataaaattttaaagaaaattatctcatatatattacattttaattttttttaaaatttatagtttgagttactccgataatttttatgtgagttgttatatgaatttttataaaaatatatataaaaaaattattttaaaatgtaaaataaaaaaaaaatcacattttaataactagatagtgtagaccctagatggtactattaatatttttttatttaagtaaattcaataatttaggtggtaaaaaaaaggaattaattaggtatgaaaatttattgaggatgattgcgattgaatttttgttgggattgagtgggaaaacgttgttaaaacggcgtcgtattctcattttgtcgttatttcctcggtaaacgataatgggcccatgggccgtatacatttaaaccgaaatgtctccattgtatgtactcacgcgcctctaggtgcgtttacattacgtacactattctaccctgcattacatgcacgtgcctgaatgctctattttcattggttggtcaccagtctagttattattataataaaattttaaaaaaatacaatttttagcaacatttttactgttaaataatgagatcttttttcatttttaactaaaaaaaaaataataatattacaaaaatattttcagttggctaaataaatatacaattcagataaaaaattacacaaataccatttacacacaccttcaacccacgatctatgcttcttaggattgaaacctttgtctaacgcaaacttcgggcaaccacccaacaacccaacacaatcgaaatgaaatccgaatagaaagagaactaccattaattccagtaacttcacctaagaagacgatcagaatcaatcaaaacaggagctgtttcgaattcacgaaaaaaaaatacagaaaaactactacgaaactaaaattcaaccaaaaattcagtttaatcgcataaaactaatgtcctaactttaattttcaaattcatgaaatgcagatgtcaaaaagttaaactggagttcccaaacaatccaacttaagtaaattacatcaatactatagtaaaatatttaccctagtgtatttttattattttccaaatttttaatagtgaatttgttcatattaaatcacaaagagacatgtatatagagttacgtacgtagatacattgttttgatttttaatgtttcataacagttgcataaatattttgctcacagttatttctccacgtattactattaaggtacaagtaattatcgatcagtgacaaaaaaatactgacaaatagtttcttacatatatacattcacatttaatatttttagttgcatgttagttaaataataattttgctactacaatatcatactattataaaatcagggctcgaaattgtcaagtacgcgactttaacagataaaacatgattgttgtaatatttattcgtattaaatatgtgaaattattagttattatgtggttttatgttagttggctcgcaacagatataactgttgcattaaagtaatagttgttactaggggtgtactgttaaaaatttatatgaataatatgataatataaatgtgtaaataaaatgcaaaataaataaacatatacacaatataactataagatcgaaatacctctagctattaaatctttgagcttcaatcccacacaaattttgatctgcaaagaaaatagattagcgtgggtaatcgggcttccaagctctctctaatctctttagatggatttttagtatttcacaggatgagtaatgaacttggggaccgagaccttatatttatataggtgagactctccatctagttctctgccacaattaatagtcagatattttgacaattaattatgaaaattaaatcaggtaatgaatatttagtaaatcatattatgactatatatagaatatcaactacttaatcgtgaccaaatacaataaatataaaatattcgttctcttatacacgtataaaatcaatacattgattttatacttaaaatagataatattctaatatgtacatcagtcgatctggtcagtttatgctatactttattcaacctaatgtaaagatcgggttataaaaatctaagtacaacccgcccaattaagaaaaaaagaatagtaacctgccaaatgaaattggtcggtttgatcgggttaacctgtctaaatcgaccattaatattttttttttatttttacatttaattattatatttnnnnnnnnnntaataatgagacaaatatatataattggtgacttaataagataaatttagaaaattgttaaaaaatattactagtacttttatcggtgtcatattattattatgtaattaaatatcaggtattatataatttaaaaaaaaaataatttttaaaaaatattgctaatcaattgtaggacgccatctatagaaagtaatgaacaccactagtttccaatagcaatcctcataaatttatataggagaaatgctaaaagcactatcttacgtgttagtattgctattggtacaattaagtatcgataattctataatttaatgtaataacttttagggagtatgtataactaattattgctaggatttataaaacacttaagaaatataaatatcacagatctaaacatattcataaaagtgctttaataaagaaaatcctaaattataaatcgatatagcttttgctaaattaaagaagaagaagatgataaaaatgagcgaaagcagtaatctcaagccattattggagattgcagagaaggttatgatcttccaagaatacactattttttttaggtattttctctgatagggagggagagaaaacagaaaccctagtgtttcttggagaccactacctatttatagactcatcttataataagttttgggtatttataatt

SEQ ID NO: 123913 - DNA, 1076 bp, Cannabis sativa
aaaaaaaaaaaaaaaaactccttcatacaaaacatcaaaagaagaaataaataaattaaaaattgatcatacatgaacccaacgcgaccacaaccattttcacacattttttatctattttgacatcctaatttttttttttttttttgtgtaattacttttataatggtgtagttatttgatttcacctataaatttatcatatttgccaataaatttatataattacatagaatgagaaaaatattaaagtatttagagacaacaattttacatggttggaatattaatgagttttaatctacgaattactatttagtgagtatacagcaattcaaacttttagaattttgacagcacaagagcactcacaacaacctctttataataaatattctctaaatttttggctaaatgtaataaaaaagacttttatgagcttttttaaatcatatatgtataatagagatgcacttaaactaatgtaacttgctctacatgtagaaaattagaaaatgaatgtaatttttaaactttgacaccccctgcattaaaagtagggtaaatagtggtaaaacccccaatactttcgttttagttttattaaacccccaaaacccaaatttctgcgggtaatcctccaaaaccaggaaactgttagcaatttaccctttccgtccaaatttagctgttaagtgccatgttagcttgtccacgtgaacacaatatacacgtgacatcattttatcggtgcacgtaaaaaattatttaaaaaaaattaaaaaattaaaaataaattaatttaaaattaaatatatatatatatattaataaaaaaaaattcttttttttcttttttctttttcttttctttctttttctctctctctctctctctaactccacctctttctgtgtctcaccaccaccatcactcctcttcaaaaatatcatcagcaccaccaccacgatccaccacagatgcccaccacggcaccaccagcatccaccaccaccttaacctgttatttttatccaaacaaccacaactatcaccaactccaccccaactcaaa

SEQ ID NO: 123914 - DNA, 606 bp, Cannabis sativa
aaatggtttattaatgaaaataaaatgatttatgagaaattcataaatcacttttcatttatatataataaaataaataaaataaattctattaaatctaaaaaaatacattgaaagaaccacctactccctgattggattgaactctctacgatgacgattgggtttgtagtgacgagattcatgggcaaacaattgaagaaaccactacttgtgtcgattgggtgaaactttgtacaatggcagggattttggcgatcaaaataatatggaaaataattgaaagaaccacctactcctactgattgggtggaactctctacaatgacgattgggtttgtagtgacgagatttatgggcttttgtaaattttgggatgaaaaaatcaattcccatatttataaaaatttggcttttgtaaatcaggattgttgttcatagaatgcctgcgagtttttaaccaccttcggtacaaataagagggaatatcaaactcagtaatgttgagaagtagattgattacttcaaaggtaaaaaggaagccactttacgtcttcagatttttattattattatttttcttctcctcattttccatttgttttt

SEQ ID NO: 123915 - DNA, 750 bp, Cannabis sativa
  modified_base (49)..(56): a, c, t, g, unknown or other
atataaaagtttaaaatctgcgctattttgattagtaatcccgtttagnnnnnnnnggtttcataagtattttgggtagctgcctatttattcagggtgttacagatagtctttctgaggatgttattattagttgtattacccacttagttgatggaaaaactatataaataagaatcgacatacttcaaaaagaaaaattgaaagaacccttcagctcattagaggagaaaactagggatcacaaaagcggatccctctcttggattacatccatcaaaatgtaaagactttaacgcatttttttgctagcaaatttgctgtttgagtccaaacacttaatgaaatgaaaataccccaattaggaggtcttcggcgacagttaagagcttccaccaccatttttgcattaaagagtttggagatatgttgcatttgcttttcaactgcaattctcagaacccataacatcgccaaacctcagcttgacacggggaagaagctactatcttggaagaaaaggcatcccaatcctcagaccataattttgtcagtctgacattaactatatttagctaagtactatttaggtcaatttttgagttattttagttaatctatatgctattttgttgatgtttttaactcttagctatatatttacctttttacctactgaataataataataacaacaacaacaacaacaacaaacaacaacaacaacaactaacaacaacaacaacaaca

SEQ ID NO: 123916 - DNA, 1841 bp, Cannabis sativa
attttttgccaaacatgaagtgtgaggttatattcaatcgtggtaccataaactagcttacaaaacagcttacgaaggtacagtgggcccagtcccgagcctagacaactggccaaacaaacgaagtaatcctatactacctccacataaaaataatctcttcggaagcccaaagaagaaaagaaacttgagtactaattagccaccccctcctaaagaatgcagctgaacatacattatttataatatttgttctaagtatttttgataatttaataatgtaaaatgatattgaactataagttatatttgtgtaggttgagaagaaaaagggagggcgccctcctgtcaaaaatccaactaaagaaacaatcaacaaaaaaaaaaaaaaaaaagaaagacaaaaggctagggaaagtgcagttgaagcaaggacctcaactgcagcttcttaaaagattatgaattgtgcaaacgtttttaatgtatagccctgaatcatgtagcattttgatcgtttgggttagttttttgtaaagtttcaaggagattatgatagtcataacatattatgagacgcaagttattttttgtaaagctttttagaagctaatacgatgatatatgttagatcatgatgtatatccctgaatcatgtagtattttgatcattcgaggtagtttttgtgtaacattcaaggagattatgatagtcaacatgttgcttttttgtaaaacttttcaagacctaatatgtattagaacaattatacttttgcaacatgttgttcaaagatacgttacaagtcaattatactttacatgttgttctaatatgtattagaatcatgatgtaaatcttatttatcttatgatggtgatatcatacaaacaggttctatacaaacatattgttccaagataagttcaagtcaattatactttacatgttgttttaatatgtattagaatgatgtaaaccttatttatcttatgatggtgatatcatacaaacggattccaagttcaagaataaattataattgaaatagtactttatttcattcaaaattattcactcttacaaaaagactagtttactacaataattgataatactaaatcaaatcattacaatatcatcaactatctaaacaaaatattgctctatttttccccaaacactcatcaattctccaacttaatattttaaatataacaataccattactattacaatacaaaatagaaaaggttttatgcaacttctaatatttttattctccataacttgaacaatatgattgctttgaccatagctttgtataactaattcagcttgtgacatgctatgaattttgtccacgagataggaaggttcttcatgggttgttgtaatggaggaaatttcactctccaattattgtatcttcttaagtagccctggtatcacttgtttagaccgttcacacatctcagggtctaattaagcccaaaaaccataagactctcgcccctgctaaaacacaacatttccaaaaaactattaaaatggactaaatactaaaacaagttactacaatatcttttacttgagaattacaataaaatataaatataagcacaaacactgtcacaaatgtaaagatcaagattaacattaaaatttacaaatattcaaccaactaactcagcaaagaaaaatggaagaaaaacaattaactaatccaacaatattaaaacaaaaatatacaaacaacccaaaacaagaattattcaagtctattactttactctttctctccaacacaaacttttaagcatattaagcagaaaatttt

SEQ ID NO: 123917 - DNA, 595 bp, Cannabis sativa
  modified_base (560)..(570): a, c, t, g, unknown or other
atttaaaatactttaagcctttccattgctcttattttcatttgatattgtttgagtagttattaatctactatgtgcgcaatcatttattatctgctatgctttcaatttgcgagtagttattaattctacctcgcgtaaacagttatgatctgttctagacaaacttaaacatacttttaataattggtctaacgaatcactttgtatatttttgattgcctatatgaatagttaagccttctattcacaccttaggttaagtattttttcaagacatcttggtgcctcgttttaatacattcctataaaatgtgagtcgttaaacattcagcttcacatgtagcttattgtttttttatgagttaaatctcatttacaactgctacttttgacttttctttcttactagaaatgttctttaatcaattgtctggaaaaaaaattgaaaaattttaaagtggagtggctttgaaatatatcatgtatttccatatggatttcggttaatcatacacacacgcctatctaaggaacagtctgatcctcaagagatagannnnnnnnnnngggttccttatgcttcagcagttgg

SEQ ID NO: 123918 - DNA, 4082 bp, Cannabis sativa
  modified_base (2924)..(2938): a, c, t, g, unknown or other
gggttgcggcaaatcactagagagagtctaaatttgtttaagtcaattgcttttgtaatctttgatactttactaattgattttattctctgggcgtggtccagtgaactagtagtgtttgaaagaacattgataccacatacaattctcatgtgtcaagtgattttattttctaccgtatttttatcttttggttttggtttgtttctacaaaactgcgttctgcagtgacagaattacattctgctgctacagactgttacaactatgtttttactgaaatttagcatacttattagcatttacaaaaatacggtttatcaaaatacaaacaaaataaaaatccaaaaaatagcggattttattccagttttcattgtggctttctctttgaaaacttctcccacgatcaaaaccattttttatccaaaaaaaaaaaaaaactaattttgtccatcttcctcaactgccttcctccatcatctgaccaagttttttccaatttttttttctttttactgttatgtaaatggccattactcaatcttcattccccatcacgacctgttgttgaagatgatgattcagactttgctctgtctaccaaaaaaagtgattgtcaccatgttaagaagaaattgaaggttaatgttgttgaaaacatttccctctttgaagttaagaaagggtagaagcaagttgatgagagtctgaaagtttttgtctagtttatttatcgttttgccctaacattgccctaacttttcttattacttgtttctttaggaggcaataatcatatttattctatttttaaatatctctaaggattataatttttttttcttacaaaagtaccgattattttttaatttttaaatgattgattaattgtaccaccgagtgtgtggtgtaattggttggaatgctttgcataaggttcctcatttggttgttatttagagttcgattccccatggtcacacttatcttggaccttaaacattacgctattttagtaataagaaatttttgaagattcaatagaatagtcaatgtaataagaaaagttttggaatttcacactaatgtgttaaatatgatgttgataataggttatgtttctgttaatattttggatatgacgtacaaccttaaaacaactgttatgcaactaatgagttgctccttgcaaagacggaggaattgttggttgttgttgtgttgctgaccatgttcatacaatgaataccttatgaagtaagattctttcaattttagttgtatgtagaagaataggcttggatcgtcccttatcctcaacgattggtatccttatttcacttggtatttcagttgcagttgagtattttcttagttgcattctagcacatattttttgtgtactagttcttcatatttgcaatctattgaaatgtattggccagtagctagcttcgtaaattgcataattcgttccttgatcaaatgtccattgaaaaatatgagaaatagaattacgtctttttcttgatagtttgaaaatttaagcatcgtaaatcaactatggaatagctgtcatgaaaccgtaatgcaacaattatatttgttgtgaggcagctaatattaaaccttaaaataactaataatgcccctatctaatacaaacaaaaacttatcacaattgagttttctctatacgagttgtgtattggcaattccaagccatatttttttaaaaaaattataatattgtagtagcacaactattattcaactaatatacaatttaattgcaattagaaatagaaaatttgaatgaccatcgtcatgaaaaaaattgtcagtatttttttgtcattgatcaacaatcaattgtaccttaataatattatgtggaatacaacttttagaattctataaaccaactttataacaaccaaatgaatatattaataaaactaaccgtattatgatttttttaaagagctttgtgttggattgtcgatatgaaacacttgcaaatatcataaaaattattgtatcgttatcaatttgtaatcattgatatgtctaatttcagagcattagtaaaatatcaatgtaactgcaatgtaactacggagaaatttaaaaactagaacaatatttatatatacgtggctctagatgaatttaaattttctttgttattcttgatttgatatgaataaatccatttaaaaatctggaaaataatgttaatgcaacaagagaaacattagcaagtgtattgatatttttttttcagtatacctgatttggactgatcaggaactccagatctgtttcagacaaatttacattttatgattttgaaatttaatattaggaggattagttttctgcgattttaatcataattcagggttgaattttagattcgaaccaatttttctgtcagattttgtataaatttaaaattgtatgtgtttggattttttacggttttcttctaaggtgaagtcgccgaaaattatggtgattctccgtctggcttagtttctttacggttggcatgctggtttggttgctggaagacgtcattgttgaagaaggtggttcgtgcggctgaatagttttagcaagaggtatttttctaaattttttattgttggcctgtataaatatttaggaaagttttatttgcaccccataaaataataaatacaccctattatttaaaaaaaaatgtaaacttaaataatttttaaaaattactcttaatatattttttttaaaatttttttcctctcattattttatgttaatttcaataattctaactcatgtatatatatatatatttttattttatttttttctatgaaaatttcagataattttttattttaatttctttgttataatatttaaaatataannnnnnnnnnnnnnntaggtatattttttaaaaatataaattggaagaaaaaaatttaaaaaacttagtataattaaagatataaatttttcataaaataaaaattattaaaatagagtgtctttataattttttggggtgtaaataaaatgttccaaatatttataaggtctgcctaatgtatttgtgtaatatttttgttattttaaggctaattaagattttttttccccaactttgacacgtaccaaattatgcccctgaactttttttgccgttaaaaattctcctgaactactgagattgttagattttaggatttttgtctaatttcattcaattttactgtttctgtgattgtttatgtaataaaccatgctctccagactttgatatctaccaaatcatgtccctcaaattttgatatgtactaaatcatgttccctgaactttcatccatattagaatttttttaataaaattagacaaaaattcttaaatctaacaatcttaatagtttagggagaatttttaatggcaaaaaaagttcaaagagtatgattaggtacatattaaaattcaaggaaaaaaaatcctaattagtcttattttaatatatacataaaaaaggccctattttcaataaataaatgaaagtaacattaattaaatattaattttgtatcaagtttttctaattatgtattggagcatattattagaaaactgatgcaaattatttttaacaatctttatgtaattttcatatctcctaaccatataaacttagattaattataataatgaccggacgaggctgattaccttgcctaattttaaaaaattaaggaggttttgcctagcttattaatcttagcgttgttctatcaaagaaaaaaatctcagggtagttgtttggccaaattattacggttattcaacgtatagtataatagtcgaaaatcgaaataataaaaaaaaatacagcttaaagtggtcctcatctatatatcaattaacaacatatattcacaaatcattcatatatcaacatactcttaataataaattttaattggggtaagttaaaaaatacctcttttattaattaattaattaaatttgtctctaattttatatttatttgaaacatacctct

SEQ ID NO: 123919 - DNA, 858 bp, Cannabis sativa
ccaggccactgactaggtggtcggccagcctttagaggctatggcggacccactattttgcagcttctggatcgactctatctactcctgcacaccattagacccactttatttgtactttggatttatgattttacattcatagacatattagtttcatgttctgtatggcctactagcttgtacttttgaacactacttatctttggcctcgaggctttcatgttcttactttttgcctataggcactttgtttctgaactttactattgtttattcctaaagccttttatcatggctgtgtgacaaactagggggtctttaatcctagctatcttcttattgccttgacttaaaagtatccagagatttacttttctttatgccaagctgaagtatgcctgtacttgacatagaggaaggtttagcaacttatactaagcgttaaaatttctctacataagctccctgtgctagttcgatgcattgtacggtgtggattccccccaagaagttaaccttattagcaagtggtttaaacaaaacatatttaaactaaaatattgtttttattcatcaattggtaattgttgatgtgtcacttacataaattaaatctataagcatacaaaataaaaaattttgcttctaggaatcaagttgctacccctatctgacatgccaagcagaggccatcattgaagaacgataggaggccatgccaaaaggccatgggtacttgctcttttaaactatactgtaataatgaattgataaaactattactaaagagtagcattctataagctagtcactagtagtatttttggaggtgctcttgttggaaatattttacca

SEQ ID NO: 123920 - DNA, 1304 bp, Cannabis sativa
aacacatatggtattggacactttattctgatattattagaatatatatattacactctcttgattatcaatttactatttcatcactaaaatattgttcttttctaataggaatatactcttctttgtggatgtcatttctacatttgtttgtaagtacaatgtaatgcacgaaaaattagtacatatgctatgattaatcatattctaattaatttcttccttgtttaaaacccaacttatggtaatataaattcattcatgatgatcaatatggtaatttcacaaattgcagataacattaatggtggcaactaaacttcaagtaatcattataaatatgagattaagcacaactaatggatactatggttctctgaggacgactactatgagcctgaagacacacaatctcctgacaatagaccagctgtaagaaaacacaaagaaataactatgaaattgagaatgatataagtgaagaagtggtttaggagccaatcttctcctcacaacaaaatgaggtcaagatttttttatctcacttcccatttaggaagtgaaatagataacactactattttactcttataatagttttttcttttcttttggtcatgtatattttgttgaagatgataatatgtacgagctttggcaaaaattgtttaatatatattggtgaaaatatatccaatacctatatatgaattgatagataatagtttttattctttaggtatgatgtactcataagccagcttagttttatattttatagtcagatttgttaatggatgaatactaataatttagttcaatagctaagaaggttccctcatgaatatgactgatatattattatattaatgcaatataaaaagagtgactttttccgacagttataaactgtcatttaaagtactttttactgtcggttacaatttaatggaagtttttctcaacagttataaatagtcatttaaagtgactttttccaataattataaaccgctatttaacgttttgcatttttatgacacatacccaacagttttaagaatgagaaataatataaaagacagttttaaagcaatgaaaaaaaactaattttgtaatagttcccatttatagatcgaggagtaatatgtgttttataataataattaatcactctatattaaaatatttaattagaccataataataaattaaaaaatatatagatgattgtttcttgtatcatttctaattaaattatgtagcacctaacataatgttaagtatatgtgccttgcacgtag

SEQ ID NO: 123921 - DNA, 1131 bp, Cannabis sativa
taaaataatttccaacactttccacttccgcgaattgatcagatagtcgattcaacctcgaggtacaaactcttaggctttatagatgcatactctagttacaatcaaatcaaaatgcatgtggccaaccaagagcatacaagctttcaaactgacaaaggaatctattactacaagttcatgcccttcaaattaaagaacgtcgaagctacctaccaacaaatggttaacaaaatgttcaagaatgtattggggaagaacatggaagtttatgtcaatgacatgctggtaaaatctaagacttgcatgagccatcacaatgatttagaagaggcttttttcattatccaggagtatgaaatgaaactaaacccaaagaaatgcatttttagagtctctttaggaaaattcttgggtatcatagttagttctagaggaattgaggtaaacccaaagaagatcaaagcccttctagacatgccttcacctagaaaacacaaggatgctcaaaagttaactggaagggttgaagcacttagcagatttgtttccaaatctacacataaatgcatacctttcttcaatgtactttgaggaaacagtaagtttgaatggacaactgagtgtgaagaagccttccaacaacttaaagaacatctaacaaaggctctaatattgtccaaaccaattgacaaagagtcgttgttcctataactagcagtgttagatcatgctataagtgtcgtcttagtgcgagaagaaggaaaggtacaacttcctatttattacatgagtaaaagattgttgggctcggagttcagatatcctatgattgaaaagctttccttttgcttactaattgttttacaggagttgagaccatactttcaagctcacgccatcagggtactgaccaatagagctaagccaatttaatatacaatatcaaccaagaatttcaatcaaaggtcaggcctcgacagactttattgtagaatgtgcggggataaatgacaatcgtaatatgccaatctcagagctagaagtctagaatatatatagagcatcaaataagaaaggttgtatttatgggttctgttgggttttgtgccctaaataaaaccctttaca

SEQ ID NO: 123922 - DNA, 1826 bp, Cannabis sativa
  modified_base (35)..(46): a, c, t, g, unknown or other
  modified_base (1786)..(1801): a, c, t, g, unknown or other
atatttaggttgttaaataacatacttgtgagtannnnnnnnnnnntggtaaaataattccaacacctcttactgaggagaatcctagagatctcattccagatgaggggccttccaaaccagttcaacctaaacgatgccgtaaggccaagggcaaagctcgcatagtatctccagttcctttggccctcaacaactctatctggagatagaccaaagaccaaacttattgaggaattattgtctttggaagcgtactctaatgacggaggagtacaaaatgttctgggactcatgtggcaccgcatgtctatccttggggagtcttcttcccaaagtgtggacagttttggatcgtggagttggtcccatatctcttgtggagcccatcttccacttagaacttacttcatggaatttgcattaaagctagaatcactcccttccagcttctaccggcggcatacaagttgctcgtgagatggtttatattctacaaatctcggggaatgtctgctctagccctagaagaggttttgtatttttataagttaaattcccaacccatgtgaggacatcctactaaagttgggttttatcgtctctagaaatacaaaaatgcccgacgtcccatgagcacttcctctcatagtctgaactgtcgtgagtacagatttttcacaacttgctttcccatgaggcgagttctagcactctcgttggacttcaaaattctaggtataatcttttattcttttcttttactactttaacggtttgtaatatggttatgtttcaaaacttaatttcaattcttcgatttcattccttccttgcagaatatgttcccagaactgagctcacaaagtaattgagtcaaagaattgccttttacgagcccttttctaaggaagagttgagagttgaggggctggttaccatccaattattgtgccagtatggtctcattgccaccttctagcgtattcacggagttaatggtaggggacaaccctagactcccagcaatcttaaggagcaaacaaccaaggcggccaaggatgaggaacttcttgctgctgcttgggacagctaccatcccgaacccctcacataaaaagaagaagaagagatcaaggccaagttcagggctacgtacccagaagcaaatacttccggagctagtactttgagaagagttaatcagccctttcgtgtaatttgtacccctagcctttctcagatgccactggcagaccaagagagttttgacaactctttcttaaatctagaccctcgtagatttccaatgaaagataaccttgatacgtagaccaactagttaggcacaacaacaatcgagaacttcctccaaacactattatagtgggccctttcctcactatgttcttcccaggtttcaaggaacataagagcttcatcaaccaggaagaagtaaacgtgtttgcaagaggggaaccatatagttacacgttttatggctgcacttacatgatgtatttttgcttttgaaactatgtgatttaggttgttactttctgtcttttaaccgaccttctagtttatggtgttttaattcatccagatacacttgagttcaagatgcttagtgatcttatgaaaaccatcaagaaacttaatgttgtggtcgacgagaaggggaaacagaagaaatcccaagccaagaaatccaaataagtgtcagatcctctggcacccccactcaaaattaaatatgttggaattatatttatccaggatcttnnnnnnnnnnnnnnnnatgttgatttaacaacctaatattg

SEQ ID NO: 123923 - DNA, 2500 bp, Cannabis sativa
  modified_base (56)..(58): a, c, t, g, unknown or other
ttacctgacaatatattttgtaatgaccgagaggtctaactcttgatttatgatannnacgctttttctcaaaaaaaaaaatatatatatgtatactttactagtgcacccaatgtttgattaactttttagatgagaatttgtaatattttggtcccacatggaaatagttgatttcatatcaccacatcctaactatttttacaaagtttttaggacactttaacacaatataaacattcatttataaaaattgggatctttaccgctaaattgatagcccaaactaaagaatcaaccaaacgtatatgataaatcaaaaagaatagtttgaaacacatgaaaattaatgtattatataatcaatgtacattatgtataatatatgtgtagtttatcacatatatgccaattaaaaaaattaataactatcaaaatattaacatataaggaaacatttataagatatataataaaatcattatgtattattatcattatctttttgtgtgatttattagtgtaaatataattatgatgaataaatatttctaaatataattagaaataaattatttaaataatattttaaattttatggagattataattttattctataatttctattataattacatttattttttttattttttataattgtgttgttgtacttggttaatattattggtaaatttctaaaaaatcccaaataatttacattgatgaaaataaaatttaaacaactatttactacgcatagaaaaataattatgactacaacaaactaattatattttatttttggcactgtattttttttttttttgaaaaaaaaaatcaactggtggtcttaaatattgcaaacgtacacgatcatgaaaataaaattgactaaaaatttttttagatggcgaaatgtgtaccaaactgacctttttcggagtgtgtatattataaaaaaatatttttatatgtattacatgttacaaaagttattggttaattttattgcacatcttttaaaaggatcattttgatccatttttcatcagttattgcatttagaaaagctttttaattttttttttttatttcatgatatgtacgttatattttcctagaattacatgtaaaaatttttaaaaaattaaaataatttataatgtcaaaaataaggttcaaatattttattacactcatgactattttttaagtatggtaattaactatttgaactttattttcacactataaaatattcataattctttaaaaatttataggtgatcttaaaatactataacatatgtgattataaaaaaaaatagactaaaaagctctcctgaatgttaaaataaataaaggtgtaccgaactagtcttttaagaggtgcactatagattttttttttttaaaaaaaaaataataattagccgcttggccccctagtaattaaatcctggcttcgcccctgattgggattaatcaattccaatcgcaacattaactaaattcacattcatcttgtgttaggaatctaatcacgtaattctaatatgggtaaataccatttttagaccatgtgttttgcaaaattactaattggaccctctgtattgttaaatgataaaatggaccctgtattttctaaaatggtacgaatagaaccctgaactaattttttgtcaaaataaaagttaataataatccgatctaaaggtgttattacaaaattgtttctattttttttgtatctgttcgtgttaggaattgtgttcaagttagttatattaaaaaaaaaagttgtcaaaaattaagctcatggtcctattttaccattttagaaaatatatggtctattttgtcatttaacaaaacagagggtccaattggtaacttttgcaaaacagagaatccaaaatggtatttacccttttaatatttttgttgcaactgagttgttgtacaattgccctttagttttattgacgctcagagaattgatgcatcaatacttatacattgattaggctacactatttttagtgttatttgaaagtatttcataagaaaatctgacacagagacctcataaaaataattctaatatggttagtttgtttatattttaacattgtactactacaaaaagaaaaattcgcaacaatcccaaaaatattattttggggggaccgtagttaaaaaaattaagtaattgtttaaaaccgtcaggaaaaattagtattcccgacggtttataacagtgcctaaaacgttaggcgacgtttttcattaaaaacgcaaaaaaaaaaattacgggattatacctgacagttttaaatcgtcgggtatactctatttaatttatatatatactacaaaaaggagaatagtcgacggttctaaaccgtcgggtataaactttcacctacttctcgccacatttccacgtacccacctaatttttttatatttcccacatgctcacctattt

SEQ ID NO: 123924 - DNA, 3021 bp, Cannabis sativa
ttgggggaaggagtttaccgggaattttaaagaacgaataagccaatgtaaaatggttattcgaagattgaagaagagaaaggatgaggattcggttaagttacataaggagaagcaagaggagttgtttgaaattttagcgcaaagagaaatttattggaagcaaagatcaaagcagttttggcttcgctctggggatacgaatagcaaatattttcataaccttgctagctcgaggaagaggcaaaatcacattcagcgactccaaagagaagatggggtgtgggtggactgggaggtagggttaggcggggtgatggtggattattttaatagattgtttgaggcttccaatgttgatattagcagtgttctacaagaagtgcaaccctctatcaaagaatatcaaaatgcaatgcttctcggtatggttgaggaggaagaggttcgtgtggcactttttcaaatgcatcctgacaaatctcctggtccggatgggatgagtccggggttttatcaaaaatattgggatattgtggggagagatgtgattcggcttgttcgggattttatggaaatgggggtgcttccattcggtttaaatgatactaatctcgtgttgattccgaaaaagggtagcccttgtaatatgggggagctgaggcctatttctttatgtaatgtggtttataaggtcctttcaaaagttttggctaaccgtctaaagaaggttcttgatcaagttgtttctgatttcgaaagtgcgtttatccccggaagacttatctcggataacataatggtctcttttgaagtcatgcattacttgaaaaggaaaacgagtggaaagcaagattatatggcgttaaaacttgatatgagcaaagctcatgacagagtggagtggaggttcttgaaggatatgttgaggaaaatgggctttgccgagaagtgggtggatcttgtgttacattgtgttgtttcggttcggtatcataatgtccatggtggtagaaagatggggcctattgtcccgtctagaggtattcgccaaggagaccctatttctccttatttattcattgtgtgtgccgaaggtttctctgctcttgtaaggagatttgaacggaaccagttgtgacatggatgtcgtgttgctaatggggccccgagagtttcccatatgttgttcgcggatgatagttacttgtattgtcaagcttcggttgaagaggctagccgcgttatggagttactttggatttttgaattggcgtctgatcaagtggtaaacaaggcgaagtcctcagttttctttagctgtaacacaaggggggatgtccgatatcatatatgtatggctttggggatggttgaagcggatgctaatagctcttacttgggtcttccaaacactattggaaggaataagaacattgtgttggggtttcttaaggataaggtgctaaagcgaatcaaaagttgggataccaaatttctttctcgtgcgggtaaggaagtgttgataaaaaacggttgtgcaatcgttacctacttatgcaatgagcgtctttcttctctcggttggagtgtgtaaggagatcgagagtctaatggcaaggttttggtggaaatcttcttggaatcaaaacaagggcattagttggatgagttggtcccacttggtgaagcataagttcgatggtggaatggggtttaggagtcatcgagagtttaatattcctatgttgggtaagcaagggtagcgtcttatcactaatcctaattctttggtgagtcgcgtgtatcaagcgagatattatgctcagggagattttttgaatgctgaattaggctctaatccgagctttatttggagaagcttaatggaggctcaagatgttcttaaggctaggttacgaatgagggttggggatggtttacctatccaatttgctctggatccgtggcttcctagtgatgagtttccaataccaacttctgacttaactgcttacaatgatttaaaggttcatagtttgtttaaggttggaagtaaggagtgggatgaggaggtggttcaggatatttttaatgaaagggaagctgatgttattttgggaattcctttagctattggtgatgctagtgattcttggtattggttgaaggagaaacttggatgctattcggttaaatcagcttatcaattgctcattaaccgtgactctagtgttgaagggagggatgggggttcaaagttttggaaggatttgtggaacttgagagtgccgcctactgttaaagatgttctttggagggcagcggccaattatctcccaactaggaagagactttttgagaggaaggtgcctttggattacatctgtcctttttgtttagtttccagcaaaaccatctcccattgtctaattaactgtgactttgctgctgcgtgttgggcgaagcttgctgtgagtgatgggggtcgggtttgggattcgtttagggactggttgcaggatttaatggacaaagctgatgatgttaaagttgctcaggctgatactttgtgttgggcaatatggaaggctccgaacgaattggtttgggatcagaaaagtcggagtgttgatgacgttgttcagtttgcattaagatctcttgatcaatggagaaaagctcaaatgggtgagaactacccttcgttgaatctgttatttctcaataaaggggatgagctttggactaaacctgttactaatgggatcaaacttaatgtggacgctgcaatttttgacagcaacagccgatatgggattggtttcgtggtgagggactgcaaggcggagcttttggtggctgtggggttgtctcggccgggaaaacctgctccaactgatgctgaagctatgagtataagggaggctttgagttggttgaaggacaagtcgtaccaacatgtttgtgtggagagtgatagcttagttactgtgcaagctatcaatagtctggttgaga

SEQ ID NO: 123925 - DNA, 945 bp, Cannabis sativa
ggcttcaatgacttcttcaatattcttttcttcaacttcatgggtcaacccaattcgtagctcagaaattcctatagatccacattcgaaatagtcgaagtattcgaaagctttgtcaatgaactcgtccttactgtgcatcttttttaggtaaaatgatatgattgcaaattctccatattccatatatccatccttataattttgatcaccctgtaaatccaattctagttagaatgttaatgttcataattttttttaaataaaaaaaggtttgggtattacttcttcctctaaccgtcctaactaacttaacaaccaattctgttaagttagttgggttcaattctttggcaaagaccagctcaactattcgagctggccaaagcctataaatagagtagagtgagagaaagagagctatggggattgagttttgtattcgagtcatcacacttgggtgttgatctcggggttttaaatatcaagttcgggggatactcttgagagattccaatcaagctcttgactgtaatcacttcttgtacaaagttttgtctatcctaatgaagatcaccatgatggattgctcagctggagtaggagcaatttcacattgaacttgtctccgaaccaggataaatttattgtgcttctttactgtttttgcttatgttttatgctgttattgttcccttagattcttgatcgagcaagtgtcatcttgagcaaagaatttacaacagaagggctttcatccaaaacagtaatacaatcccacattttgcttgaatgaattagtgtcattatgtgtcataaactagtgtatatatcttattttttttgtaccagaattaacaaagaaaaaatttatggttccaaaagactggtatacttacagcttccattatcatatcaacaccagcctctggaatgtgatttcct

SEQ ID NO: 123926 - DNA, 680 bp, Cannabis sativa
  modified_base (90)..(98): a, c, t, g, unknown or other
tagtcccatgtctacacagtctcaaaatcatcacacatgaccttccccaggcgatgtgggattgtacaacttacccggtatttccccttnnnnnnnnngggactactgactgtcacatctaagaaaagtgattttgttactctgttcgacatccaaaacaaatttttagtttaattgttcttttataataatgtacattatagttatttaaaattattcgtaatttttttaaaaaaattaaatagtttacaatattgtaaaaaaaattaaaatattttactacaatactgttatttcttatacttgtgataagtatttatttaaatcttactttcgataatataagctatttaaaactttttaaaaattttcaaataattttaaacaaatataacatagttgaacatgatcataatttttcactaattttttttcttaaagttcaaaacaaataaaaagtgtatcaaaactcttatatattccgaaattactataatgatatacagtagaatctctatctaagaatacacttgggatcaagtaaattttaattgagatgttatgactaaatagagttatactagaaaaaaattaaaaaactaaaaaatatcaatgtaataataataacaataaataatcattaatactatatcataataaaattattttaaagtaaatat

SEQ ID NO: 123927 - DNA, 1319 bp, Cannabis sativa
  modified_base (1293)..(1293): a, c, t, g, unknown or other
atagattttaaaaaagaaggtaaaaataaaagaagacaatataaaaagggtatagagtgtaatttcctcatatattttcatcctataaatatataaaggcactccattcattataaacattaaactaatttattttttaatacttttttttttcatttttatacattattaatttttttcatattaaatttacgcattttaatattttttcttttatagttttttacaaaataatgaatatttttaataattttttgtttcacgtgaaaatttatgttttgaataataggttttgtaagagtaaaaaaataaaacaaagtataggtcttaaaaatataatttatgttaattttattaaaaagtagggtgccttaattaaataattatagtaaaaactaatatgttcataaaaaatatttgcttaggttaattttgacaatgttaaagatagggataaaataatacttactttgccacataagagcaaaacaatattatgtcaaaaatccatagggtaaaataatacttactttgccacatagggggcaaaacaatactacctcaaaagttggcggatacgtatatactactggcaaaagtcaaggaaaaatccatgaattgttcttagataaatgctaaaaggcattcttagtgcctagtgttgggaatattatactaggatctagatttactaaaaagtatgttgaattaacatcctaaatatgaatatctctaatatgatgaaattaaacacataagagtttagaaaatcttacattgattgtagcagaataatatgactcatttcgctcagatatctaacccgtgttcctttctatcgaagagtattatcaagatttgagtatggatctctttctctccttcgcattggttaccaccgtcttccgcactatgattgaattcttgacttggtatgtgtgggcatgacactctatcactatgggtcgattatgaagaacaatgaaggaggctcaaaatcactatagaaggtgtctctcatctactaattgtgtgacacagttagaaactagatttggtaggctgaaacgattggatgagaatgagagcaacatgttccttttatagtgtttcaactaaggcttaggattgaattagaaggattaaaaaagaaaaaaatattgtgcaaaaattacacatagtggccggccactaaatggccttttactagttataactttgccactttatttcaaatacttattcttctttccataaaaccatattttccaatttcaatcctataaatgtcanaactatttatttaataattataatta

SEQ ID NO: 123928 - DNA, 2296 bp, Cannabis sativa
ttattttacaaatagtatttatattgttcatattttttaataaaatttctgtaattaataaattttacgtattttctccacttctaatgatgatctttatataactaacctaatcagattataatcagacttatttattcccttaatatacatattaattttataaaataaccattaaatatataattataattgaatttttggaatattacacaactataatgcaatggtaataccctgatgatcatatatgggtattttgggtaggatattagccacacattaatgggtttgtgggtgaaattgccatttacttattaatttgttgtttttgactaatgcagctttatgatcaccctcaatggcttacaatcaaaggacatgtacagtgttacgtcaataaagtaagtgacttttattttaagaaaataaatatgaaatttgattgtaattgattttttatctttttaaaaaataaataggtaagagagaagctagagagtaaaggttatcacattaaaacctactccgaggtacaaatgatttcaactatcgatgagggttagtactcaattactttttactatattatttgttataatataatatagattaaaaacattaataagtgtttaataattaaatatataatgtaatttaataatacacgtggtttataatataagagtagttataaaattgaaaaatgatattgtaacaaatgattacatttaattatatgtaagtaagtaaattattatagagaggttatcatgaaattaatgaaataaatttttaactgttaggaacgactataatactcatttatataatttaaataggtgttaagacgttagagaaaaatttagctcgaggaggagttacaaaactcaatattagattttttagagacagttactttatggttgatgacatgttattttacggttgttttcctttgtctggagcaaattttgaaataacgtcaataaacgtacatgaattcattcatgagcatgttttcaactttcttgtccaatatttttatcccaataaactccaattaaaatgatggtaacaacaatgtggtaaactgattttgattttctaatgtggtcttaaaacattataaatagaggtctacaatgctcatatgagatgatgaagtttccatcaagaaagtactttgctagaaaccctaaatgcatgattattaccaaagttatttcctaaggagttcccttaatacttagagataggaaaattaacaagtttttggacaaagatgataatatcttgttcaagtcatggtgacccccattaatatacactcaaaattgtaagcaagtgtttctatgcatattcttcttcttctttatatatatgtatatgtgtgtgttataatacaagtgatgtaatctctcttcttctacttttcttttatatatatatacataatatagtgtatatgttgttataatatctcactacaaaaaataattacttttagtgacaattttctagtcacaacataaattttttatgactaaatgtaacttttagtcacaacaaaaagttacatgtgactaaaatatattatttagatataagtaattgtcactaatttagctttagtcacaacaagtattatgactaaaaacacatttagtcacaacaaaatgtaatttttgtgaataatatacatttaagcacaaattttttagtcacaatatatataagaataatgatttgtaattagtcacaatttttaacttttagtcaaaatttttgacgtgactaaaagtaagattttttgtagagtctatttaatttatcttttagtcattgtattatattgcaatagaattgtaatattatgatttgtaataaaattgtaataggttgtgtagttcagactgaagatggttctaaagaattgtataatgggtgcatattggctgtccatgcttctgaagctctgagattacttggagaccaagctactcctgttgaacaaagagttcttggtgcaatccaatatgtttatataggttttctcctcctatattaatctaaatcatctcaaaccatgcatatatatatatattattttaatttaatcaaacatgtaactttaattcttttggcagtgacatttaccttcatcgtgacaaaactttaatgcccaaaaacccagctgcatggagtgcattgaacttcctagcaagtagtgacaataaagtatgtttgacatactggctcaatgtgattcaggtgatcattacacacaaattgt

SEQ ID NO: 123929 - DNA, 1424 bp, Cannabis sativa
  modified_base (37)..(50): a, c, t, g, unknown or other
ttgttattttttttaaaaaataaacaaaaaaaattannnnnnnnnnnnnnaaaacaaaaaaaaaaaaatattgtaaacttggctacaataaatatttttttcatgccaaataataagactgttgttaaatggcattttagagtgtcataagtcatgatatattattattattattagtacactttaataataggtcctacataatttaatataaattcaacatgtaaaatcgagtattaaattgcaccaaaaaactaaggtatttttcttatatctataattgtatatctatcaaccaaaaaaaaaaaaggtggaacccttgaattacaagtgggctttcataaattcataattaatataattaatagattgattttttaggtattctttatcttattgtcaatcattaaaatctatggacccatttatatagttcaagttgaaggagtgaaattttttttagaggaaattacactgttataggattttaaaagttgtttggtacttttaagtttgattaatatacatggtattttttttaggtatttttatggtatttgatatgtcacatatatgtaaattagattttcaaaattcatatttaatgtttttatttgtttaggcagttttatttgtcactgttgtcagaaaagttgctagagtagctgtcggtaccagaaaaatcactgtcgtagctgcaggtgctgaaaaagtcaccggagtagctgcaggtactagaaaagtcattagagtagctgcaggtgtcggaaaaagtcgtcagagttacctgtcggcatcgagaaagtcgtcaaaattggcattatcactgaaaaaattatgagaaaaatcaccaagaaatcatcaagaaactagtttcttgatgaagaaactactttcttagtaattttttcagtgattttatcggtgacaatactaattctgatgacttttctgacaccgacaacaactccggtgacttttttgacaccaacagctactcggacgactttttcgacaccgacaataaactccaaaaaagtcgtcagaattggcattgtcgccgaaaaaattacctagaaaccagtttcttggtgatttttctgtcgattttgccaattcagacgacttttttggcgcgacagcaactccgatgacctttccggcgctgacagcaaccctagcgactttttcggcgtcgacaacaattccagtaactttttcgacattgacaactactccggtgacttttttcaatgccaacagcaaactccgacgactttttcagcaccaattacaaccccgacaatcactgtagtttcatttgctttatttttttaaaaaaaaaacaaaaatatgaagagaattttaatattttttatggtaattcaaagtggcatataccatatatgttaagtttttatttt

SEQ ID NO: 123930 - DNA, 2204 bp, Cannabis sativa
  modified_base (36)..(49): a, c, t, g, unknown or other
  modified_base (2162)..(2179): a, c, t, g, unknown or other
gttaaaccaagaaatgccgttaaataggcacttttnnnnnnnnnnnnnntatatatatatatatataggatatcaaaattaataactacttgcaatgatttatttataatccttattacatcttaatctaacagttaatattatctttgtatttgaacaaaatattaaataattttttaataaaacaatatataaataaaagataggtaaaattgcatgaataatgacttttagtaaaatatataattgaatatactttacattcttttctaactcatgaatgattcttaaatataattgttcaataatttagtgtcttttttataatatttaagaaattattatttatcaaaattaattcttttaattcatttatttcaaatattagctatgtgatcatctcattttatcatttatttgggttatatacagaggtagagacacaatcatatagcaagagtagtagcaaaggccccaatatatatagatcctcttaattatatacataaaaaaaaaaaacaaaattaatcataataaacacataaaacatacatagtctccaatattatataatttagtatatatagtgtaaatacagggtgtgtataaatcgatcaaattcaataataactagtcgattcaattacaatcgatcgcctaatattggatatccaactgtaatcgaatcagattgaatgttatttttgaatatctaatcaaatcggatcgagtgtaggattgggtattcgaaaatacaatacatctaatatctaattgaactaattaatatttttatttagtttgaatgattaattagttttatattgttatacataaaaaaaaatataagtatatatatatatcaaaattaacattaaaattttagtttttttttagattggatagatccaattcaatccaatagatactggatttaaaatattagatggatctgatccgatctaatgaatactaggtataaaatattaaataaactcaaattaaactaatagatatacatgaaatacatctaatggataaaaccgattcaatggatatacatagcttattaatatttattttttattacttaaattaatattttttttcttttttttttacaaataatttattataattattattactacaaataaatattttttttaagtaccacttattatttgttatactttttatacattttgcttaaaataatttaattattgctaacttacatctttaaagtagaagttagattgagatttgtctcctttaagtgagtattaatgaatataaaaatattttattcatatatattttctttgttttataaaatatttaataaattttaaaatttaacatgtgctaattttatcattatttacaattgatggatacaagtttatttttttaacatttctttatagatgattttcgacaaatgtttcataaattttttaacgtgttatgaaatttttatttgatattaatgagaatttggccccaaataacatgtatcatacacaagatcggtcctgagttgaaatatgcaataggcaaaaaaaaaaaattggacccttaccataaagataaatagtattttgaaaaattataaaaaaaatatgtatattttttaaaagatatttttttttatttgggccccttaaatgagtgggccctaaggcctaatccgcctatacctagtatcgaccctgatcatgcatgcacataattttacacaataacccacaataatcataaattttcatccatttgcattatattctttatatctggacaataatacaatttgtattttttttcttttaaaaaaaatataaaataatatagttcatgtataattcacagataatttatattctaaaaagaaaaaattcacttgttcaaagagcacgagaaaatctcaagaacaatattagggtcgtggttagcatgtgggcatcgcaacactcgacctttgagagtctgatagaatcatgaatcagagagcatcagagattccaattcaaagtttggcccccctttttctctactcgctccgtagtgcttgagtagaatcttatatagcttatacaactttgtatttacattgttattaataaatagagcttgttatgaaataatataaaataatatannnnnnnnnnnnnnnnnnaagaagaagatgaagagagaaagag

SEQ ID NO: 123931 - DNA, 679 bp, Cannabis sativa
aaaaagaactctctcctcacaaaaaataaaatatggaaaaataaaaactagaagaggtaaatcatttggctactctctaggttttatttatagaacatagcaaccctaaggacagccataaaaataatttcacaactgtacaaccctttcctaaaaaaattcttcatttgtagcataaaaatcggactctgcagcagcaaatctggaccagaaaggaaacttttttaaaatggaccgcgatcatggacttcaaacctgccaaatacattgtgtttaatatgatatgatctaatcaaagcacaatcaaaatcataaaagaaaaaagaaaagtcaaagtttccaaacaaaagcaacttttccataaaaacaaattcttctcttgtaagaaaatcttcctaacaattacaaccagctatgaatataatttttcataaaagaaagagagcaataaaggcacgaaaatattacaataaaaattctttaatttcttaaataaaaacataaattaattagaaaatatttttttcaattaattttccaaaaaagactttgtaatctcccccttttgcagtttagataatcaaaatatttttaattaacaaaaacctgtaataccaatttagcaaaaacaaacataacaactccccttgagaagtacaacattaaaccaaaaaagaat

SEQ ID NO: 123932 - DNA, 1212 bp, Cannabis sativa
tgtttaatttatcgttttagaatgttcatatttagggtgttaataaacatacttgtgactagatctaagatcctggtaaaataaattcccacaatgagcccgttgagcgaacataagtttttttcgtgcctgagataaccacagttgaaataaagtttacgtaacttaaagtaacgaaattgaatccactcctttcttccccacttaacatcaaggaagaagctagaaataatttgattgtaagtagcaattttgacttggaatttcaggtagccccttctaataatagctctttgattagatgtatcactgcctttatagttccttactttagcagctattgttgtggtgttaacccagttgaggtaaggggttgaaaatccaatgtcttggacccaaaaaatttcgtttcccatatctgcaaagtgccaatctccattcttcggccattcttgaataagtagtaattttccatttatgatccaaggcctactattcaggacctctaaacagtcttcctcctaatcaaagaagaaaccccagacccatactttcataatcttgattctctaatggccattaagtttccagatcttgtccaaagtatccttaagttcggaccttcacacaccttttccttaaaagaaaaaactagcaagaactccagttttgactatctcatcattgagttcaaaatctggctcaagttctaaggtcatataatcaaaaaagcccctacgaaggaccttcagatccctatctttgctgctgtctgtccctcattattctggctgtccacaaatccctcctctgagagctctacattaatacccatatccatttggggttgttggaaggcattaatgttgccattcatggttgggtccctctccatcatggaattttttatttgagtttcacgtgcatgtcctaggttgtcccccgtaatgagaacctaaaaaaatcctaaagaaatgactaaaaaaggtaggaacttgaaagagttatgagggtcaaaaagaaaggaaaagcaagcaactccacttttcctgggactgatacaaataaaacgagaataattgatgtaaattctaagtaggctaatagaatgactttagaaacaagattaaaatagaatatctcattgctacaggcacaactaagtacccttaaaggtctaaagcgcattcttgtttctctctctctctctct

SEQ ID NO: 123933 - DNA, 3312 bp, Cannabis sativa
  modified_base (1581)..(1582): a, c, t, g, unknown or other
  modified_base (3083)..(3083): a, c, t, g, unknown or other
agcaagcaagttctagaattttttaaacaacttttcacatttcacaattagcatacataaaccaattcaattactagaaaattacctaatataatttcgtgctcttttaaagcacaaaattgaaattagttaagaatgtaatatcatcaagcacatggattttttaaaaaaaatatatgaacttttcaaatcatgctatctacctactcatattaagcaaattgactcaaaacaacaaaacctaaaaaataaaaaaaattaaaagaattaaaattttaattctaaaagactaaaatttaagttgaccccccaacctgaagtgaaacattgtccctaatgtgacattaaacagagagaaaagggaacttacctctgagcgccacatcactatggcggtggtggtggtggtttcaaaattcaactgggatacagtccacctcttgcatccataagggttcttgtaccaaaggaagaaaattgtcctccaacgttgcaaattttgaagctatccctagaatgagagtcaccttcacaattcccacacatcaatcttttcatacaacgtcgaaaagtttgaaattgttctttgcgcttccctttctttttctcgacagttacttgacaatctttcaataattttactcaacaataggtaggaattttagttgcaccaaagacattaaaagtctcttgttctttttcaatgcgcaactttaactcccccttttgcacatcaattaatgctctccctgtggctaagaatggtcttcccaaaatgatgggaatattctcatcttcctccatgtcaagtattaagaaatcaacaaggaatataaacttacaaagcttcaccaaacatcttcaattataccccaaggatgagtcaaagaacggtatgctatttgtagagtcattgttgtgtgcttggcttctccaaatcttagtcttttgaatgtagacaagggcattaagttaatactcactccaagatcacatagagcttttgttactatcaaacctcctattgagcatggaatattgaaactacttggatctttaagcttgggtggtagtttcttttgcagaattgcaccacactcctccaattcttccaacttccttttcttggatagaatgtctttcatgaacttcatgtaagttggcatttgttccaaagcctctatgaatggaatgttaatgtgtaatttgttgaatatttcaaggaattttaaatactacttatccaacttattcttgtgaagtctttgaggatagggaatttcgataggatgatcaatgctgataggaggtgaagtttctttttcttgaagaccgtaagtagtcttcttcttctcttgtgttggtactggttgatcatcttcttcatcctcgggcttgtcttggcttggaccagcataattcttaccacttctcaaggtagtttccttacaattgtcttttggattgacttcagtagtgctagacaagttaccttgagtcctgttagtgttttgagaagccaactgccccactttagtttccaagaccttaatggatgacttaatctctgtcatgaattgnngtaacgcatctatctgagaatcagaccctccactagagccttgttgttgttgatactgttggctttgctgagattgatttttctaaggataaaacccttgttgttgttgattaggaaactatttttggaagttctactgatgacccccttggttgaaataataattattctggtagtttccaatggcttgggcttgctgcatcggaaaactgtctacatctatagggcaggtgtcagtggtatgaggtactccacaaagctcacagacaacttgagcttgtttgacttgtgccgtcaccagcttcgttaacggctctacctgagatgtcaacttggttatggcatcgacttcatgcatacccgtaacctttttagattggcctctctctgttgaccattgttgattagtgatagctatctcttcaattaattcaaaggcctcattagcacttttcgtcataaaaaccccaccagctgcagcgtctatgagtgtccaggtattgctgaccaatccagtataagagttatgcacttgtaaccacttttcaatcccatggttagggcacttcctcaataagtccttgaatctctcctaggcttcataaagagattcattgttatgctgggtgaagttgtggatttcagctcttagcttggcaatctttgcaggaggaaagaatttggaaaggaatttcagggccaattcttcccatgtgttgatagaattggatggcaaagataccaaccaactcttggctcgctccctttgtgagaatggaaatagcctcagcctgatggcatcatcgctaactccattcatcttgaatgtctgacaaagttcctcgaagttagctagatgcatgtttgtgtcttctaatggtagtcccccaaactagaatgaagattggaccatcttcaatatggctggcttgatcgcaaaattattggcatcaacaacaggtggccttatacaggatctaaccactatcaagttaggaagaaaatagtgcctcaggctacggtcattgtggttgcgacaattagcctggtcttttacagctcctccattgttgccattgttggtgtgatcagccatgactacgttgtgctcaatctctattgcagccttttttaatcttttccatctttcgttttgtttggaagtcttctctatttcacgatctgcaggtaatcttgcagttgcaccttgacaactcataaactagtgaacctaaaaaaaaagataagattttgacacaaacaaaattagaactaaaataaaaaagaaaaacaaaattagaacaaaatttaatttttaataatattaactaacaatccccggcaacgacgccaaaaacttgttgtggtaatttgcacatccaagtgtacatatcgtaacaagtaatagactcaccaggagtgaggccgatcccacaaggattgtacttaagtactttaaaattaaatctttacttctatttggtgaattcaaaattaaganaaattaaatttaagaacactaaagacagtgaaattaaaaagcaaataattcaaaagagaaattaataatgattaaagttaaggctttgacttcaattgtaactactgattatggcttaatacgattatcttcttattaccaatttctatgcaatagcatgtttactaaggtaatttatagtcttctcagatgtataaatctcaattacatgtaaattttctactctcgt

SEQ ID NO: 123934 - DNA, 623 bp, Cannabis sativa
  modified_base (182)..(187): a, c, t, g, unknown or other
gatcttaatcttgatatggttacgttcaatcttagttgtattatttatgttcttcaatttgttcattaaagtcgaccaattggatcttctgatgacatacagattaaggacattgtaattcaattaagtgggagcactaatcatagatatggaatctatagcttttataagtatttagaagnnnnnngatgatttccttcgagcttgcctgaatagagataaatgattgagatgtccttttaataattatattagtttactaaagtatcatttataggtagtgttatacctgaaactcggctgcacttcgaaagttaacacatgtcctatagtgcaattcacaactcgttgactatatagtcttaagcgagataaggataaaaagctattaaaacttatattgacgaaacacgcggctacctcggagtaaatagttaaagaatatattcattcatccgagtagagtaaatataatcacacagcgacctcagattacatataacgagacgatcacctcgcagtctgtaacaccctatgagtttagctgtgttacagtgcttttaaaaattactgtgcaacctttgctaataaaagggtttatcaaaagtgataaaatttaaact

SEQ ID NO: 123935 - DNA, 1267 bp, Cannabis sativa
ggtttagtgactcatcctgaagtgtcacgaaataccgcttttccagtcacccacattagtgacacgaagtgatgtgtcgctaaaagattttagagtctctccatgtgcgtcactaaactctatttttctagtagtgagaacactgtttcgagtcttccaatagtgtcttctgctcctagccttcctcctatgctccaaattgatctatattttcgaatgatatcaaaactagccatcagcgttctttaaataatgaaaaaatcaagtttcccaaaaaccatcaaagctacagaaatgcttggaaagtcgtggctttctaaacgagtttccacttttaaatttctttgctgattttttggtttcttagtttctattttcttccagagactgaaggaatgttgcaacattccttgctatgtcgcgacaataatgagtacataccctttttttcttcatttttcaattagaaagtgctcatttttgactttagagcacaaatttttgagcaaaaatgcaatctttgacccattacgctgtaagaaatcaaaattaacaaattttatctcaaaaaggcttgaagaataccaaaattatcaaaaatgtagatctcccaacatttctcctaaaaaacataacaaaaaaaaaccaagcataaatctgaataataaaataataaaaatactaaaacacatactaaaatggactctaaaaatgcataaaaataaatctaacatttaagaccatagatataaataattaactttcgaacttgactttttttttcttaaacttcttttaatattttatcttagcacttttgtttagttactaactttactacaactctgttatcccaatttttacactctgacatggcatcacatgatggtgacacgtggaattacctttgagtatctgctcggagggcacagtccgaacaggatgcctcgtaggcatgcgcgaagcagagcgatctgtaatccgcacagagcaaccaatacttagcgaattcagctttcgcattgtgagtcatcaaagaaatccctataacttggggatcagatcacagacatatggcaagctgtccaaatcccacgatcaatatattctgcatttatcatgcaatctttctacttatatccactgtaacgagaagggaaacgcttcctcttcaagttcacaatcctttaaatagtgatgcatgttcactgggcatagggtcgcaaacagtttagtcgagattttaccctagagatattatctaaga

SEQ ID NO: 123936 - DNA, 3408 bp, Cannabis sativa
ttgtccaacaacttacaatgttataatgggacgtctggccctggtagattttgaaaccataacctcaattcgacatttatgtcttaagttccctacccatgcggcaggagtaaggactgtctgcgataatcaatgagaggctaggaaatgttagaatgtagccgtccaacaaactatcttgatgtttcaacaaaacaaagaaagaaacccagtaagggtggaagatgagttagatccctggataggagctgagattgcactcgaacccatggaggaagtaaaagaattcaaatttatgaacaggatccgacaaaggtaatctgtgttgggaagggcattgatcccagcaaaaagattgaaatagtggacaccatcaaagaatcggcagatacctttgcatggagtcatggggacatgactaacattagtccacacgtcatctttcacattttaaatgttaacaaaaacatggatgttgtgcagcaaaaaagatgtccccttgatcctgtcaaatcagaggttctaaaacaagaagtggacaagatgctgtcaaacatcttcatctgagatgtttactacccagagtggttggctaacccagttctagcaccaaaacccaacaggacatggcgagtgtacattgaattcacagacttgaacaaggcatgtctcaaagattgtttcccattaccctgaattgaccaaatggtagatgccacgtccaattatgagttgttatctttcatggacgcttactttggttacaactagattaagatgcacgtggctgaccaagagtgtactagcttcaggacagataaatgggtatattgttacttggtcatgccttttgggctaaagactgaaggagcaacttaccaacggctggttaattggatgttcaaaaatcaattgggaagaaacatggaggtttatgtagatgacatgcaagtcaagtccaaaacagtaagaaccattctgacgaccttaaagaatgttttaaagtagtaagaaagtacgggatgaagctcaatcccaagaagtacactttcagagtaaagctaagaaaatttctagaattcacaatcaaccgacgagggataaaagctaaacgcaagaaagtacaagccttgctagatatgccgtcccccaagaaatataaggatgtgcaaagattaatgggaaagatagattccttgagccctttcatctccaattccattgacaaatgtatcccgttcattaatatattaaagaaaagtcaaaagttaaaattgaccaaggaatgcaaggaggcattcaggagattaaaggaacatatgaccaaaccaccaattttatccaaaccaatgcaaggggaagattgtacctttatttagctatctctgagaatgttgccagcacaaccttagtctgtgaggaagttaagaactagcatcatgtttattacgtcaacaaacggatgataggagcagaagtttggtaccctttgatagagaagctagccttctatctactagtagcatcttgaaagctatgactctacttccaatcacattcaatcaatgtctttaccaaccatccactttgacaagttttgtataagtcagagtccttagggagattgcttaaatgggtcattgagcttagttaatttaacattcagtacctcccgcacattttaattaaatgacaggtcttagcagacttcattgtagagtgcaatgaaactgaggcaaatacgaatacgccagaagtaattacacccacctggatagtgtatatggatggggcctcaaacgaaagtggatcaggagaaaaactagtgatgatatctccaaaagggttcagaataccctgcatttcaaattcccaacctctaacaatgaggtagagtatgaggccttgctggcacaattgagattgtcaaaagttgtgggagcctaccagatagaaattttcagtgactcccaattggttgttaatcaggttctgggggaatatcaaacttagggagaaaagatgacctcttacgtctccgccgcaagagaatcgctccaagagttcaagaagtaaaaagttgagcatatcccaagggagaaaaatgcacatgcggattgcctagcaaagttagcttcaaataaggaagtaatgagactaagggtagaccccatcgagtacctccctgagccaagtatcctaaccaagacagaggttagattcactgttcaagagcccagctaaatggacccaattattaattacctgaccaagggagagttgcctcagtacaaggcagcctctagaaaagttcagtagtaggctccccattatctcacaatttaaggtatactctaccagagagacttaagtatgccttatctcaggtgtgtttctcaccttgaagccaaacaaacaatgaaggagattcatgaaggattttttggggaccacatagtttgtctaaaaagattttgagacaagggtacttctggcccactgtgaagaaataatgcatagactatgtctagaaatgtgacccttgccagaggtttgcaaacatctcgagggcccccaaatgaaatcacatcaataacgagtccatggtcatttgtagtatggggcattgaccttattaggtctctcctagtgagaatgggtagagtcaaacatgtaatagttgttatagactatttcacgaagtggacaaaggccgagccaataaactcaatcaatgctaaaaataccctagactttgtggttaaaaatattgtttgtcgatatggactgccccagaagatagtttcagacaatggcaaaaagttttacagtgattaacagaattatacaaaaaatatggagtcatcaaaagcttttctaccgttgcaagaccacatgcaaatggtcaagcagaagctatgaataagatattgaaggtcacactaaagaagaaactcttggcctgtgaaaacaattggcttgaggaattgtcgcatgtactctaggcataccgaaccactacccggaagaccattagacattctccattttctatggtatatggatgtgaggcaatgatcgtggtagagagtacaattccctccgacagaaggaccgcctacgacctaaccactgatcgtgggaggagtcataatacgtttggtcgcataccaaaggaaagtggaaaaacactttaattcaaaagttaaaaataggacgttctcaacaagagacgtggttctaagaagggtttttcccgcctcacaagaccccgaagtgggggtattaggcctgaactgggaagaattttatgaaatcaaagatgaaataggcttcaagacttataagctcaagcgtatgaatgggttcgtgatcccaagagtttgaaatgctaatcatctccaaaag

SEQ ID NO: 123937 - DNA, 615 bp, Cannabis sativa
atgatatgaaatacatatctaatctatccacaaataaattacagatacttgatatatataatatatagatatagatactataataaatatcaacttaccaaccagaactaacacctcatataactataaataaatatctataaataaatcccttttattattatttttaattattttgggggccacttacatataagtttaagagtattgttatttagtattaatagtgtttagtatctttaaatatgttactttgtatcagctagcgatgtttttaaaaaattattacattaaattatataagactcgatactttagactaataaagatattgatacatagtagggcgttcggtaccactagtgctttttagcatttctttatatttaattgagaaatgctaaaaaaaatactagtggtgcttagtaccctctacgtgtcaatatcgctattggttatcgagttctatataattgaatgtaacaatttttagaaagtatcactagccaatatatgtttagaaagaacattgttattaggcactagtggtgtctagcaccatctcgatatgtcgcgttgcgattgactagcaatactccctaaaaactattatat

SEQ ID NO: 123938 - DNA, 895 bp, Cannabis sativa
atacaccaaattgtccatttatatatcaaattcgttataaaggctggttaataatcttggagcctataccaaaagatctctatgagtaaatatagattaatttcaaccctaatttgttaagaaccaaaaaaatatctaagttcaagtgataacaattgagccaataataatcataacatgtaaagccactatatatataattaacaaataaattattgtacaaatcccactatgacaaagactagtctagcaatatgcatggttcccaagcttatcctacttctactacctgtaaagagtaaattaattaataattacaataataattattttaaaaaaaaaaaatctaaacttggatacaactatatatatgatgatgataaaaatcttgactgtacaaaaatactatttcactaattaagagtttatatatatacaaacataactaagatcatgcaaatcatacttttagcacactttctatagtgtcatttatttaataataataattaagaagagatattataacacccttttgaaacagctcttgagtttggcagcacaaaaattatacatatttatggtaatgaaatttctcactagttgaaataattatctactaatggtaattaaaagatacaaatcacagctaattattgaaaaaattaattaattaaaagctgctgtgctaattaaccaatggggccttgggctctcaaaaattgtacagctagaaatatataataaaaatcaaaatgtagaaaaattaaagcagctttacaaaagcataaagatataatttacataagttgaaagagattgtataaatataaatatttgttattatattattctattttatactgctgattacttgattagtgattatataaga

SEQ ID NO: 123939 - DNA, 2236 bp, Cannabis sativa
gagagagagagagagatttgagattgtatatatgaaacgggatatgaaattggggcttttgtatttacatgagaatccctgacagtttaaaatagtgcatatactataggcgatggtttttaaattttgatctcgtgattgttataaaactattcggaatagtaaacatatgtttaaaattatcgggaatactccactattgctgacgtttttaaagagttacttacttttattagcgacgatccttaaaaaaattaattttgagactgacagaaatagtgctttttgtagtagtgactgtaaaattgcttattcaattttatgttatctccttattgagattatttcaaacaatactaccaatcaacttttgtttaccactttgcttttgagattcaaaattacttttctaattttgaaatctttttttatatttttttaatccagcatgatccacttatttgagtttaaaattgcacctccaattttatagttaatcttacaattttaaatttactttaatcactatattcttactataaaaagataaatctcataaagtttaactctcatatttcaccatttttatctcttaaaataagataattatcactaaagtataactttattttcaagtaattcattttcgcaaaataaattgctactcacatatagcaataataaaaagatataacttttattttataattattataatatctacaacatatatacatgtaataaatatcatatattaatacacaaaattaatatataactctcataaaattataacattcaattttatgttaattatatgtatgttaatatactattgtatatgacatacacaaactaattattaatttcacaaaatgaatatatattatatattttatgtgtatatataatatataatcatattaatctacatatacacaatatatatcatatgcacacaatatatattatatatgcatgttatataaaaaattactcaaagctaaaaaaactcaaaattcccaacagttttacaccgttggataaagaattcttgacgctctataaaaccgtcgcgaatacttggtagaataggcgacggtggaaaagtattggtacaaaagaatttcaaacggtttaaaatctccggctatagtctttaaactgtgacctatactatagatgacgattttaaatcctggcctataggatagccaacgattttaaatcgtcgctatagtggattgtcccccaaaaaattatcgtcttcatcttcctcgaaaccacctctcgcatatattgcagccactccagaacctttacaagcttcatcctcctccactgtcgttgtgctcgtcttcatcctcctcgaaattttcttttacaagtttcggattgcttttcacttgatgatccttgaaactttcttcgatttgcaagctttgtattttattttgaacacacacagatcaagatcaacaaactaaatcatggctaatagaaatttaaacaacaaatatgaaaatattttgcttacctttgcctgccacgagagagcagtggagagggacataacaagagagagtggaggacagggacgacgcgactcgtggttgcggaggagagagagccgggaaataaaatgaaatttataaatgactttaaaaaaatgagataagatttttgtgggggtttatatcttaagaggatggaaataaaatttcagatggaaaaaataaaaatttgaaatttaagatgcgagaaataaaatttcagatctataacgtgtacaattgaagcacaagaattgccaacggttaaaaactgtcggctatactataggcgacggtttgaaactgtcgactttattataagcgatggtttaaaatcgttgtcaatagtatagccaacggttttaaaccatcaacaattccctattacaaatacataaaatttcttaaggtatgtttaaaaaccgtcgcctatacctcctgaaagtttaaaactgttatttttcccgacgattttaaacactcgcttaatttttttagagacaatttcccaaaaaaaagtgtttagaaccgtcgtgaacacccctttttgtagtagtaactatttctaatctcacaaatatatatacatgttaaaagtcattatcaaatctagaatatgttaaaatattttaaaatgttctaagaaatttgtaagagaaaccaagaacactctagaaagtttt

SEQ ID NO: 123940 - DNA, 1206 bp, Cannabis sativa
gcaaaagttctaataccaacattgatttgccaacccccttttgccaatacatcacaggtaagttctattttaccagcgcaataccagcttttgccagcacatagtaacatttcttgtagtgtatattatatatatgtgaaatgagaaagggcatccatgcacatggtgccctattgcttagcacccttgtcatgtgtaatatcgttattggtgtaattcaatatttaaccccacatattttacttatataaagattataaaccactaataacagttattggtgcgtgctagacatattggtgccctataataatactctctatgggctcgtttggtatgtcgtacaagggtcgtattgtaataaataataaataaacactgtttttttttttgctgatctatgtttggataaaacaatgtgtaattattacgaccaaaatttttaatacaatgtatgctatattatttaatacataacaaatggtcacctgattatctttttttatatatttcattatgtcccttattatttattattttaatttatgtaaaatctgatatgaaaatatacttaatatgcatatatatatatatatattatatttttatatatacctacgtgctacgtgtctactatgtatgtatgcatgcaagcagctttagatattttcttactctcatgcagtgatttgtctcaagtctcaaccaaccaattgaggttctttttcaaaaataaaataaaatctagtagttttaataaaactttgtaactagatttatcacatttatattattagcttaataaatatataaatataaatactttacaaaatacgcatatatatattaataaataaaattttattagcaataaaaaaattatttattattttttaatgttaattgtgaaaaaaaaaaaaattaaacaaaatcaattattcaatctaaaatataaatacgatcaaccatgtcaagaaaaatcttatgaaaaatttatatttacaaaatataaggttaataaaaatttaaaaatcctccaaatctaaaaataatcaatatccctcaccaccataaacaaagattgtcctatcctcaaaatcacttcttgtatcaccattaatattaaaattaataacataaaaaaaaaaaaacttgttgcagataatttaagatgtgtcacataaatataaatattattattattat

SEQ ID NO: 123941 - DNA, 634 bp, Cannabis sativa
aaaaaaaaaaaaaaaaagcattactcttccttctctctttcctcctcattcccacgtccaaatgagttctattttttttcttccttttctctctaaacaaatcaataattatacaagattttttcactaaaatcttgtaataaaaactttgatttgaagaactccaaattggtggcttgtgactcgaggagcattgtctcattttgtttaaaaataaatgggtacttgatttttgtttctactaatgctgttgatgattgaaaatgttttttagatgttggatatgtggtttgttagtatttctttgccggaaatttgagtttggaaaaaatttgtattttttgggctttctggtttttatttggcctgatagttgataatggtggtatgatggggttctgagagttaaattatttaaagattagggataaagttctgacagttgtccgatgccggcctgctattttgtagcatattcagtaggacgatatagaccgatagttgtctgataccaacttgatattttgtagcatagtaagtaggatgatatagatcaatggttcctcgatatacatgtttagtgtaaagcccgcttagttaatttggaaactagcagttgtttatgattaattat

SEQ ID NO: 123942 - DNA, 973 bp, Cannabis sativa
ttaattattcatgactcgagagcccccagtaattgtgaaaccaagtcatttgttctcacaactcacaacctcagctaatctctcacaatttgaagcctaatttcgtactatcagactgttataatattagcctaacatcaatgataatgataatgatatttaacctaacagaaaaattaaatataagcttacataatactgataataacaatatttaatgttaaatataaattaaataaataaatatttaagaagaactatttaattaaaactaatattaaaagaatcattttctcaattttgaatcattactttataatgttcattaaataaaaaattaatggtgattctctaaaatattttttttataaaataaaattgtatcaaaagcaatttgagtaactaattattgtactttttttttaaaaaaaaaaaaattaagcaaactttattaaactgaacaatgacagatcacaatgagaatatccctccatgagaaagaacgatacttaatattttctatttataacactaataaaatgataacaataataactgtatagtaccttaatcatttaaatggaacatagacacccattaaacaaactaatatgactcgtaattattattatattattattagaaaaggggactcggggacttgagaaatataaaaccactagaatatacctataaccaacttaattaatttattttttaaaagtttaattggtcttaatgcaaaatatatatatatatatatatatttatatttgttaaatttggctcaaaaggtaaattgttttaaagttacaattatatatgattcaataatcaagatatttggaacttattacactaaaaaaaaaaaaacagctacttttaatgacaactttttagtcacaacataaatattttgtgactaaatgtgacttttagtcacaacaaacaactacttgtgactaaaacatag

SEQ ID NO: 123943 - DNA, 741 bp, Cannabis sativa
  modified_base (35)..(51): a, c, t, g, unknown or other
gcataagtgcggatatccgcattttgcggattggnnnnnnnnnnnnnnnnnggattggattggatcggataatttgtgaacacccctacagagaactatcaattttaacttttcatccatccacaggataaatatatatttatgtataaacacatatgtataatttagagaagtaaattaactaattaaactaacacatgttataagggaagaaaaagtaaacaacacactaatacggcctcaactaataatatttttatttttttagattatcatgaactcgagatgactagctaactaattaataagtgagatcattcatatataaaatttatatattcaataaaatataaatagattacttaagttaagctaaaactttgttatgattggcctagtccattaatttatatatttttcttgccgccactataggggctaattaaaattaaatgaaattataagtcatggctttggagatagacagtattgtatatataatttgtatagaatatataaaagttttttttttttttctggttaaatcctctcaattattctctacttgtatttaatattttaagtttaaatttgacgataaaattcactaaatttttgaattggtagcaaatttaagatgccatttattttccataattcactgacaatataaactgtttatgtttacactatacatgtgtcaaatttagtacacttaggaggtgtttggttgggaggaat

SEQ ID NO: 123944 - DNA, 987 bp, Cannabis sativa
aatctatatattatattattataaataatataacatcatgtcaatatttttaaaaggtaagtctgatatggctagtagacccagtattttcgtaccatgtcagcccgtatttcttaaacatatcagtctgtttttatattcatgcttaaattcgtactttatttttttcatatttttttttataattactaaattatatatatatatatcaaaactttagttatatttatataacttttgagtaatattttacagataatcatataaaaaaattattaaaaacattagaatttaaatatttatttataaatacttaaattttatatcacatcctataaataaattaatatataatcttaattttgtatgttttaatatttttaattataaaattataatattcaacattatatttaagttttattattatttaacttatttataattgataaattcatatcttattttaataataataaattatttagctttttaatatgtcgtgtcgtgcttttcgagcttgtcgtgtgtcgtgtttttcgtgcttctcgtgtcgtgttgtgattaaggatatatttttatatcatgtcatttcgattcgtaacatcgtgtggtgtcgtgcccaaacccatatttttttgtgcctagtcgtacttatgccaatttcgtatcgtgtgaaaagtctaatccatatttacaatactaattgagttaaccatgtctgtatgtatattttattttgcatattacaataacattttacttcaaatattataattgataaattgtttaaaatcttggtaaaaagaatgaattgttcagtgtcttaaagttatacacaaaacaagttaaaactcttaattcaaacataattttattataatacacagtaaaacaaacatcgtattaaaatttaacatgattttttatataaaaaaaataaggagaattacctcatatactgtttttttttttaaatttacggtt

SEQ ID NO: 123945 - DNA, 1377 bp, Cannabis sativa
tgataactaatcagattataaagagttttatttagggcataaaatccaacattttgtaccctgctgaaatagagaatctagttgttgtaaactctcttgtatcaatcaaactcttcacttgatcctttagagccactaacttcttccaataccagctagcatgtatggaggaagtaagactccaccagtctcctttcttcaaatagacactatgaatccattgcatccatagagaccccttattatttacaattgcccaaatgtacttgcacattgctgctttgttccactcttcaactcttttaataccaagacccccagctgactttggagtgcaaaccgtgtcccacttgattgctccacccccttgaaacaaagactgacctttccaatgaaaagctccacaaactgcctcaatgcctctaatgattttctttggtagaatgagaatttggctccagtaagcttgaatcgccattaaaactgatatactgttaatatactgttataatctctttttaagcaaacttgaatatattgttaatgatttatcactttgtatatttttgattgcttatatgaatagttaggtcttctattcatatgttaggtttaagtatttttttcaagacatcttggtgtcttgtttaatactttcctgttcaatgcaagccattagtattcagctttacatgtagcttatgagttatatctgatttacaacttttgattttcctttctcgccagaaaggtttaatcaaacgtcattcatgattttttgattttcctatctcgtcaaaaaggttccattaaaaaagaactttaaaaaattttgaaaatttttaaagtggtgggtttgcaatatatcatgtatttccagatgaattctagttaatcatacacatacgcccctcaagtaattttaaagaataacactttataattacctagaaaaaatgattaactttattaatatttgaagttgaaagtattacaacatcaatttgctggtagtagggtcacaaatgttccatgtgccagtagttctttattagcgagccattcagccgagccaatttatgaaccctggttcctactatcgtcttgatcacataaggacactccatgtttagtttgaatactcctgctgattcatctctcgtattttcaaacactcgccttagcaccaagtctccaatgttgaaaagcctcttttttacccatttgttgaagtatcttgttactcggtgttggtatctgcgttagtaatctacgactcagtatgtttttcatcaagtagatccaaggacaattttaaaagttcttggttttcttcttgattataaaactctcgtctgtgagtcgagatatttactt

SEQ ID NO: 123946 - DNA, 1433 bp, Cannabis sativa
aaataaaaataaaaattattctaaactagattgtcatttgggtgaattttcaactaatttatttagaagtggacttaaaatgaaacattaataaaagaatattgtgttaaagtataatttgattttgttcaaaaagaaaagtataatttgatttgtgtaacagacagctacttataaatatatttttctttatttatacaatataaatcttaatttttcttactccaatataacccacgtgtcaagatttattgttacagagtggtagtttatgttgtcttaaattaatctaattctgacaaattaattaatttaatttattaagtatgctaattatttttgttgacctaattaaaaatttaatttatcaataaataaaatattaatcgacgtgtcaaaattaatttaatttaacacagataccaattttcaacaaggcaacgacttaaaaaagacaaaataaaagacattttattaatgccgacataaactcgttcatattattataaaaaataaaaatttaataaaataaaaggaaatttatcagcattttgaattgtattcataaactaggagtggaaggcgtgccacggacatgtaacctccgttaaaatttttgggttataatcatatagtttactttcaataattatgtttataaaattgttaaaaaaatgtatatttaaagaactgttaaaagaaatatagttaaccaaagacatggtgtggcataggttcacttattaaatctaagatcatcaatcgttctattttaatgtaagcacatgtgatttgttctactattatctactattaaaaaaatttagaagaaaaataaaataataattataaaacattatatatattatatatatatatatatcaaaaagaagaataacacaaaaaaaaaaaaaaaaattaatatcatgtgttctacattattatatatttacttctctaccaagattatcgaaaacctaattatttaatattagagctgaagaaaatacaagatcgataaaagaagaagatactcaaagtttttatgtcgttagagtgctaatgagcctttgtccacgaatcagtattgttgtcagaggaatttggacaacaccaaataaaaaatgaataataaatatttaataaaaaagaagcgagtaatcaacttaaaactaggagtatctgaacgacactacctagacaatagaaaaatagtaaaaacaatgaacacaaagatgtatagtggttcagtatgatcacagtctgcttagtccactgttgccaaggatttccccctctgtttattcatgttggatcactcctttatatacaaaacaagtgtccttttagttacacagaacataatcggttatagaacctttttacattaaatattaacattaaattataataaacgtaaaagagtaaatgaa

SEQ ID NO: 123947 - DNA, 996 bp, Cannabis sativa
cactaaaatagtaaaattgaataaaattagacaaaattccttaaatctaacaatctcaagaattcaggagaaatttttaacggctagaatagtttagtgagcaagatttggtacatgttaaagtttaggggacaaaaatcctattagcctaaaatttattaattaaattatacttttattattaacacatttattcttatacatgaattgtacacagtaaaatcttgaagactaggataataaataaaaaatttatagttaattgtatgtatcttttttttttggaggagatttattttatgtaatcatcatagtacattattactgataataatattagtggtgaattttaaaaatttggtaaattttttaatttttctaaagtaaaattacaattttaatgtgataagaatttgatattttctccccttttcattaattttggcaaataaaagaaaaatacataggaaaaaaatgatgtattattagttattgaaaaaaaaaatatttaagaaaaaaattataaatttagatataaaattaaaatttttaagaaaaataataagttagatcgaatttgatttaatccgagtatctaatctaaaaggacgggacgaatcattacatgatctgaatcgaatctaatcataaccgaatcatatccaacatgatctatttacaaaacactttattctaaaaaaaaaattataattgtttgtagaagtaccacatataaattaaactagtagggaggcacgtgtgttgcacgtgctcccacataattacttaagggaaatttgattttctatactgaaaaaacttaatttttttttaaaccaatacattttacactacaaaaaatatgataattttttgaaaaccccaaaaatacccccctcataaatcaaacactttctctctccttcctcaaactctcagccgactctctcaactcaccaaccccccacgattaacccacggcacccaccaccctca

SEQ ID NO: 123948 - DNA, 528 bp, Cannabis sativa
cactttgaacgcacctcggactaattttgcatagatgcaagaagatctttgactgctggatcattagggtcaacctaggaatggccatatgcacccctgctctttaagtaatcacaaatgtgggcatggattcttaaaagctccacagtagtagaataatatggatcaccgctcaccaatttttcattaagagggacaaactcttcataaggaactcctaaaataggcaaactaccaataaccttcaagtcatacaaagatatactcatttcaccactactatgatggaaggtgttgggcaaaggaccccaaagttctgcaaaagcttgccaaacatgaaaacccataaaaaggggtacctggacacagaaacaacaccataaatcctagccttacttaagacaccttggtgttgaactaaaatctcaaaattccataaaagttcatccacctatgaatttttctaaattttcaaatagcaaagaattcctgaaaatggtcatctaccagaattcttatattcaaatt

SEQ ID NO: 123949 - DNA, 1305 bp, Cannabis sativa
  modified_base (1248)..(1249): a, c, t, g, unknown or other
cgttgtgttaaacaggtagttttttcaacgtaccccggcccgaaggtcctcttgaataacatcaacacaccagagccttcttgtctgaacttcgttgctcatcttatttaaattgtaatattatcttttttatataaaaataaaataacaacttcattaattaattatccttcaataacaaagataacaaatcagttggtataaactccctactcatgatacaactagctatagaataggagtattgtgtaagaaattgggacaccttattcgcagattgtttaacaagattaaccgacacattatataattctaataataaaagtttagactcattaattaaacgtcgtatggaaagatcatatgaccagtactttgaatagcatgcacaacattaatgcagtccgcttccattactatgtttgaccaatcttggtgcttgatccaactcaacgcctttttgatgctgacttcttctgaaatgacagcagaaaccatactcggttttgatgcttgaaaggctttgattagagttccttcatgatctcgagccacgaagctaaagccaaagcacttcacttgggtgaaaatagccccatccacattaactttgatcatattaaagtaagatttaacccattgctcacctttctcatcatttcatatcaaattgagaaaattttttggagtaaatttgagtaaatttttattgattgaaagtatgtttgcttaatgagactaccttatccatcgacgacagaatgcttgaccaaactaaatcatcacgacattttcataatgcccaacaaagcatagacaccaactccacttcctcacgaacccaagaagagagacttagttgaaaccaggtcgcaaagaggccctctaaaatgtccctaataacaccaaaaagacttctccaacattgttgagaaaagttgcaacaaaccagcaaatgtaagaaagattcaggagcaatgttgcaccaaaaacagttgagatcggtagttacgtgcttggttttcaattgaaccttagtgggaagacaattggaacatgtgttagggtttatgccctgaaaaacctataaagatatttctaattattaataaagagttgaagattttttatataagcttgaatgttatattattatttataatcgaatgatttacatgaaatatcaaaaaattctttatttatatatgagattgtagcttgtagttgtacagagaactaagaccactnngctatgaataaaacagtcaacaacatattaaagttatagaatctttaatcaatagt

SEQ ID NO: 123950 - DNA, 673 bp, Cannabis sativa
ttagaatataatttacttagtcccaaatgtattcttggatagaggttctactgtatattgttaatgccacatgagtttttccttttatactttttacctttttcaattaaacttttttataagttgtataattacatttatacagtttatacatatttctctagctctttttctcttcctcatgttgatacgaatcactaaattcttattctttaatcgcacaattgttatattattttgaataatataatattacataggttaaatatttgtaacatattaataagtgaagagttacttgttactataagtaacttctataattatcatcaatattgtaaaaggtgttatccatcatagtttaaaattcttaaaagctataagagttatagttgttagagaatgagttgtatattcatttaatgagtctatatgagttaaaatttcaaatgatgatatcctaaacactatataaaaatgtttaaagtattcatattaagatgacctaattttctatataaaaaaaatattttgctagaaaatcttaactgataattctcaaagctatttcctagatagttctcttagtgcttagaggtaggagaagtaagcttttggacaaaagtgataatacactgttcaagtcagtgacgaagccagaaatttggctgag

SEQ ID NO: 123951 - DNA, 1403 bp, Cannabis sativa
atcttccaagaatatactatttctctaaagtattttctctgatagggaaggagagaatacaagaactcttggtatttcttggggactattatctatttataggctcattatagaatgagttttgggtatttataattcggctcctcaacaaactataaattaacttatgtctacacaatattttcatgataatttaatactcttttgatatccataacataattagtcacttatttttgtatcacaatttataatagcatatacattatacatatatatgtgcccacaataagattttaatctaacatttaatcgacaaataaatatttatcattgttattattatcaaattattgaactttttaatgtgtcatgcttttgagttaatttattcgtacttacgtgtcatgctttcggatttatcgtgtcgtataatactaagcccatattttttcgtaccatgtttaagtacaaatttttcgtatcgaattaggcttgtgtcgatttcgtgctatgtcaaaaaacctgacttatatttacagcagtatgattaagtgatcatggattgtacgagtacaaccatctttctgagttgtcatgatgtgtcattaagggtgcgcctccacttttccagtgtgtttttacttttatgttaggtcttgggagccacattaattcattttgtccttattttgttgaagaagactactccaaaaagtactttgccttggtaactaattttctcaagggactagaaaaatgcttaaaaatacccttgattatattattattagtacaatgctctccatgaagtacttggtttaaaactattgcctaatcgatagaaaaactaattatgatatcaaagattttctttgaaaatttgaaatggcattggttacttgcttggaagtggatgagtgtgcaatggactcagacccaaacactttctccaatatcacactattattagaataaaaaaatagtcagttagtaaataaaattgttaataatagcattggttgatgttattattaacatcaattacacctgtgttgtaattaatgacactaatggtgttgatttaaacaaacactattaactcaaaagtcttttttattgaattgtttttttttttttttttataaactaagcatttcattaaaccaaaagaaatagagaaaaaaatacaaacacaaaacagtcttgttcccagccaccaacaacgcaaaatcagaagagagccttagagtttgacagcctaggaaactaggaaattttacaagaattacagtccgataatactgataactctatggtataaagttatttttatgcttttaaactaaaagtattgtgagaagagtagtgaaaatgtgtttatttgcttaattttaattagt

SEQ ID NO: 123952 - DNA, 2323 bp, Cannabis sativa
  modified_base (47)..(72): a, c, t, g, unknown or other
  modified_base (151)..(157): a, c, t, g, unknown or other
ggtataacggtaatttaatccctatattatgtagatcatctattagnnnnnnnnnnnnnnnnnnnnnnnnnnaacaatggataatgaatagcgtatctatatcggggatcatatagagcgttctacatgactgagagtgcaattctaagtnnnnnnngtggattcaacaaggaattaataacttagggaatttacttggtaaattcgatttggcttattggggtccgcgtgcaggtcgaggttggggtctgattctggatctgggtttgagttcgtgtctcaggttcgagttcaagtttgggttggggtttggtcgttgtatgggttcgtgtccaggttcttgtcctggtttggatcaagagtaggttttgggtccgagtccgggtctgactacggattcccaggtccaggtcaggtcctagtttggggttcaaatcccaaatttagatctaagtctcggttccggggcctagttccctgaactaggtcccccatccaagtccagttcttacgtcctggtctgggtctaggttcgggtttgggtcctcagtcttggttatagtctaagtctcggtccgagttcaggtctaggtgtcactcccagccttggttcgggtacttgttagggtctggatcctagtctaggtcacgggtctcaggtcccggtgagggtttaggacaaggttaggtccaggtcccggtccgggtcccgatccatgttcgggtcccaggtctcaagtcctagtcatagttaaggtctcagtgtaggttctggtttgagtttgggttatggtttgggttcggttctagtcacagttccaattctagttccaagtcctggtttggttccgggtctgggtatgggtctagatttgggtcagggtccaagtcttagttcgagtccgggtataggtttttcgaatctcggtctgggtcaaggtctgagtccgagtccgagtcaaggtttgggtgttgggtttgggtcccaggttcgagtctgggtctggatttgggtctgggaccgggaccaagacccaagactcgagactcacacctgggacctaagaaccgaaccgtgacctagatgggggacctgggcccgaaacccgaacctagacccagacctggaacaaggatccagacctatgggggaattagacacaaaacttggccccagaaccgggactgagaccaaaaactcgaccacaaaatcgagacataggacccgaccttggacccaaaaccttggaaatgactaccaggacacaaccccaaacccggacccaaaccaaaacttaggactcgactcgggacacgggacctgaactggaacaagatcgggatcaaagactgagatctgaatctggacctgaggctttgacctgacccgtagtcagtgtttgaatccaggacccggacctagatccgtacccagacctagacccgaaacgggatccagacccgatcccagacccgaaatcgaaatcggaccaggactgggacgagaacctagacctgggtgtaacaagacccaaacctaaaccgaaactcagactagaaccaataccgagactttgactcggactaggacctgttacctgggacctaaaccaaggctgggacctggacccagaccgggacccagacccaaaaactcgggccagaccctggacccaagaaccaaactcggagttgggacccaaaactctgaccctgacttggattggcactcgaactgagaccctaaacaaaaactgggactgggactcggaccagaacctgagatccaaagatgaatcagaacacgaacttggacccagactgggtcctaggacccgaacatagatgggatacacagaatcgggaattgggcccccaaaccgagaccaaaacttgggcctttgaacttggattgggattcaagacccgaccccaaacccaaacctggaccttcgacccaccttgggacttgggatctgggactcgatgcttggactcgaccagtaccccgtgacttgaatctggaaccaaaagcagaagtggatcgaggcccaagaataggaccaggacctagacccagacttaaaacttaaccagaccaggacccggactcggacacagacccacactcggattcctgtcagggtttgggtttaggttcgggtctaggtctgggtcggggtctgagtcctggtctgagtttggatccgagtttaggtccaggccttgatcccggtctgggtctaagtttgggtccaggcctttgatggaaatattttaccaggatcttgatttactaccatgtatgtttcattaacatcct

SEQ ID NO: 123953 - DNA, 1201 bp, Cannabis sativa
  modified_base (1112)..(1117): a, c, t, g, unknown or other
  modified_base (1158)..(1176): a, c, t, g, unknown or other
ttttcaaaatgtataaatttttaaaataattttttttgcacattttttgtaattattttgtttttgttgtacatttatgaaaaaagcccatagattaaacccaaaagaaatcaagattcacagtagaaaattcctccctttcgaagttctgcctgccaacttgacaaattcaagcgaacttagctaaaccatcgacaaaagtaagacaatctcttttagcaaaaacaacacaacaacaagtaaaagtagataacaactgtaaaataaaagaaaaaattgcagtcaacttccaatccggagctttcttcacacgaatagcctccaccagggatttagaatcaaaaatgatcgacaaattatcccactgattcatagacgcccactttagaccaagcaaaaccgcctgcatttaagcttccatagcagaaccacaaaagctagaggaagagcacctccaccaatccagagaacctttggacagagtaagcagagcgcacccataactcctttcctgaaaagaagtttccaccaaaatacatctgtccgtagagagactagggggaatggtagacagggcctggaaaggactcatctgcaaaacactatcagcatccgcacacacttcatggtatctgctaaaaatttccttcctaacagaatccacacaaggccttgtactagtggaatgaataatcctatttctggttttccatatacaatcaaagatcacaccggcacaacaaagcatattgactctcaagatagaatctagagaagaataaagagtacataagagcttacctatgttatcgccaagaatcgactcgaccctaactggcaatggaccggtaaaccagaccgcagaggcaaaactacaccttgcaaacagatggatgggagtttctgaggcagcatgacacacagggcaaacgttctcccacgaagaaaagaacttgtcacccgtgggaagagtcttggtgcaatctctccaaatcatgctcaaccacagatgaacttttgaatcccaaatccatctccaaagcagattattgtctccaaatcttgatttctgatcaacccaatatgcaccttttgttggaaattattttacnnnnnnctagatttactaacaattatgttggattaacaacctaatannnnnnnnnnnnnnnnnnnaataaacacatataaagttagaaaa

SEQ ID NO: 123954 - DNA, 2041 bp, Cannabis sativa
  modified_base (26)..(29): a, c, t, g, unknown or other
ggtttctttttttttttttgtttttnnnnttttttttttttttttggtgaaagtgccctaatcgtttggtctattgtcaataataattaaaattaaaaagaaaaaaaaaacataaaacataaagggcggggcgtatcattttcagaaaaatggggatgccaagtaggacgagccttgtgggcagagtgacacgtggcaaatcgtgagcccgtagatgggtcgagcattgatagccaggaattcctggaagtttctggaaagtcaggggtctccagagtggagagagcaagggtaagagatggcgtgttcgatatggtagcttgacacgtattcgattcttacgccaactccaatcattgtgccttgccacgtgtcactcccttgattctcttctccaacttcctgtactttactcaattcattcatgccgacctaagttattttttctaattcttttttcacaatcctaatattacaatttgaataaattttccttaaaaaatgaaactcggacaccataacgtgactccaaattccaaaacagaaaaactaaagaaactaatggacgacaatattcacttctaatagaaattttgctatttggtaatctaaactccttttactaaaacattatgggagcatttggaatgaaatattcaaaataatttaactataggaaatattatgaaaaaaaaaatatgattctaacaaaatatgtaaaatataattgtgtaggataatatgtaattatattctcgttagtagaattatattgtttggttgaataaaggaatcttatatattattttaaaaaattaaaaataaaaatatttttttattatattgtttaatgttaattatacataaaaataaaataattatttattaagcaatatatttattaattagtcgctatatatgtccaggtggtcagctcgtacttcatgtgccaagataagccagcgattaaggcttcgtatttagcatcattgttagaggctttaaagtcgaatttgattgcaccgtgaagttgttgccccaagtgttatgagggcaatgcctgcaccgaacaactaaccattcagccacaaagtctggaagggcttgaccctttatggcaattcttggttgatatgtgatattgaattggccaagttcaatggcccacttgagtagtcagccggaggcttcaggtttttgtaaaacctgccgcaatggttggttggtgtacacctttatcaagtatgcttggaagtatggccttagctttttgaatgccaagagcaagctttaggtcagcttctccatgagtgggtatcaactttcagggtcgatcagtctcttgctaatgtagtataccgggtgttatatatcgtcttcttctcttattaagacttcttctcttattttgacaagacaggtggttgagccaattattttttttgctcttggaatgctttttcacactcctctgtctacttgaattttttattccctctgagaatgttgaagaagggtatgcacttttctgtagagttgaacacaaatcttcttagtgcagcaatgcgtcctgtcaagctttgtattccttgatggtagtgggcaaattcatgtccaaaagggcttggatcttgcttgggtttgcttctattcccctagcgttgactatgaagttaagaaattttcctgagtctactccgaaagaacacttgatggggttgagcttgtgcttacgaaggatcttgaatcaaacgtctagatcttccacatgcccactagcctttttggacttaaccagcatgtcgtccacatacacctccatattacgaccaatgagatctttgaatattttgttcacaagcctctggtaggtggcccttacgtttttcatcccgaatggcatgactttcactacaacaaatttaattattaccggcggaggattccgccggtaataagtatgtaggccgccggtaattattaataccggcggaatccgccggtattaattggtcgctaaaaatggttattaccgacgaaa

SEQ ID NO: 123955 - DNA, 516 bp, Cannabis sativa
tctaacctcatttgtctatcaatactagggttggaatcacgcatcatcttgtgattccaacaaagaagaaaaaaaaagtggtttgaacattcacgtatacggaatcttctactcttttgggttcgataagttttcgacagccattgttggagctactgacctttgactcacgactgaaacaaagaataagaattgttatgatttaggttggggttccagttgtgaaggggtatatgtgagattgcgatatagtttaatggttatttagggttgcaatttaggttgtgactaagcatgacttagattgcaatatggtttaatggtaatttagggttacgatttagactacgacgactgagcatgactaagattgtgatatggtttaatagtgatttagggttgcaataagggttgtagtatcagttgtaatttgtgttgcaatatcagttttgtttaggaaattaatggaagcttcatgtaatggtcttgcaatttagtgttggaatttattttacc

SEQ ID NO: 123956 - DNA, 1972 bp, Cannabis sativa
ttttttttttttttaattttctgtagctaaaattttcaagaacatttatgtacctgaagaagtgtttggagtatctgaaactggtgttcctgctggagagtctgatggagaagcagctgtcacacatgatttgaacaggttagtatcagattactagtattattatgtaccataagttttcatagagtatgaccatacagattattgttttatattaacactcacctccattgcagcggctaagtggaggagtctggacattgcaggcaccagggagtgccaaagcctgagtttgattaatattaatgcctagtgaagagccaccgccattgaggacctgacacaagcactgtggctcagagcggactactgtggcgagctgagagcagcatcctgaagatgggctggaggaatttccggtgatgtagttcaggcatggtgacatgcccaccagtgcattagtacaactctgctgtgcagccaccattgcccaacacgatgtggctagtacaacagcaaggatgaagaaacttctttgtgccattcttttaagattggttttttcttgaatatagaaaaagctcaaagcgccaataagagttgtatgttctgatggtgtttaattggtttgtccaggttgagaattagaagagacgtgagtggcttttgtagggaaatgggaagaggaaagagacaaaagaaaggatggggtatattggtgaccaactcttcctacttctggtaaacgagtacttgtttgaaacctcaaaatatgttgtgcttgcaagatgaatttgacttgatatggaattgattttgtgttattttgatagtcgtttatactggtgaacgacccattctaaactatatatgaaattcaatgtttggagatttacttggaatgaaaatgtttttaagaacaatttggtaatttgagccacaaaggttgtttagttaaaagtcaaaaagaatcttaagaagatggatagagcagatagaagggtggtgcacttaccccgtccggaatattgcatggctccttgtgactgtgacatctgtccctgcttgattgcttcagattctcagctttcatagacacctgtaaaagatcgttccacctatgcttggctccatccatcgggctagactgagaccttaacgggcggttcgccccgttttagccgggctgtagtggaaataggattggacagttttgtcaatatcaaataggataaaatgggtttttggtgttgtgttttttgtaacagtaatcgttaattgttaatgaatttatcttttatataaataaaactgaaaacatttaatctgagggtaccgacctgtttcatttaagcaaataccaaagttgaagcaagaaccataaatataaataaggtaatttgtctacgaatgagaaccatcagctgaatgagatttcaactaaaagaaaatgcttttcactgaagattgaataaactcttttccagtggatcaacaatacattgatcagtggttattgtcttatcgaaaacttttactgaagctaaattgtgacgtaatggtggaaacttttttttatgtcatgactttgtacctgtaagctatgtaattctgattttgaaaatgtaatatttggcttattttcctatttttattttacttgtggagttgggatacttttttttttttagaaagttagcataatttggcacataattccataaaataacataacataatttgagaaattattttttttattgatcactacctttaatttgcaattaatccatcattttaatgaaagaagaaaattattgaaataaagttgcgatggcgtgtgagatttaccagcatagctcataataacattttgggtaaaaattattttggacgatatatttttatgaaagttattaattggaccatctattttattaaatgatataatggaccatgtattttttaaaat

SEQ ID NO: 123957 - DNA, 1488 bp, Cannabis sativa
acaaacggattgacacaataagacttgtgttttaaatatgtcaactaataacatgtttataatccatttgtgaccagttaaagtactaaaataactttaaataggttattaacgagtcaatttcgtgttagctgtgccaactcaaacacaatctgttagacaagtcaaactaaacacgactagaacccagttaaggaaaatccaaacccactaactcttgtgcgcgcttcgaatcgtattatcgtgtctcacccgttttgttggtacatatacaacaatcaattcaattggtttaattagaaaaatataattgtgtattaaagtaggtgattacgccactttacaaacagatataacatatattggactccgaagtcaacggtactggggcccattgggcccagcgcaatgtcagtagccgaactaacagtgttctccaacacccccggcgcacgatagcagcagagaccccaagtagtagtagtggtggtggttcaagcagtcaaacaaatatacgttgggctacgtgtcacgcttttaaggtgtacatttacacgtgtcgtgtttctattagtttctttatgacaacggctatataggatgctcctctctcgattactgctctgagaggcgtgggccccacgtcgagccaaaaactctttgccttattggttttggtttgctaattaattaattaaatattagtctttgtcattaattaataaattaattaattaattcatagtctttgcagttttaatatttgaattgttttaatccgccatatgactttggttttgggcttagtcatcactgtttcccgtaaaaatattcttaatcatcaattactttgacttttaatccatttttgatcatgacaatctttagtgctcttttataaataataataataataatacttactaataataaataaataaatgtataacatgattagattagattagaaaacatcggaagaaattattgaatcatgttgtgtaaataattattttcatatttagaagatttgaccttccttatcattttaatcatttaatcaattggttgttaatgtatgatattttagaaattggaaaaaaataataatattatgtagtaagtataagtttgtttatgatttttagagaatcaatttacttaattgatgaccaattaattagatgtaaaagttgactatttatgctttattttctttaaaggtcacttattacgtaaaattgcagaacaagtactctaaaaacttaaactaaagataaattaaatattgtacaacatacttcaactttaagtcttaacacaaagaataaaaactaataatgtaccttcaaaaaaaaaaaagatatcaatttatttaatttttttttgtgaaaaaaaaaactaattcttaaagataatataatcaagtaacaaaacatatcatttaagctatatttggaagttaaattttagtaaaaaaatgtcaat

SEQ ID NO: 123958 - DNA, 2335 bp, Cannabis sativa
ccctacacgacgctcttccgatcttgtgcattgtcttgagcttatgatattggcggtgaagggtaatatgactgctgcgaagataaaatttcaataaattgtcgagtctgtggttgttgtggtaaattcggagattgttgttgcaaaaaatttagtgattgctgctattgcaaaaaatttggtgattgttgctgaaactgactatgaaaattatatggattttgtgtactgaaaaaattgacctggagaagattgctgcattaaacccccaaacatcatcggctgctgagatgaactcccaaattgaccaaacatcggctgttgcgactgtgatcctccaaagaaatcagagtagtaaaattaaggagattgggatgagcgtccaaacatgttcgaactaagaggagattgggaggaacttccctgcatgttaggagactgctgaaacggttgttgttgcggccttggacaagttgcaatactttgaggttgtgttggtaaatattgttagaggaaactctcaaatcgcaagtcatgcaaatcagaagtgtcgtgtcccggtggaaagtgttcacgcaatctcttaaacatcttagccataataccgacatcttaggaaaaagtagaccctgcttgagattgagtttaactttgacttgaagagccagatgttgatttttccccttcttccccatagtgtaaccaactcctcgtatatagtcactcctctctccatatactttgcccataaccttgtactggatgtcagacggcagctccaaggttccagaatcactgccagattggctttgaagtctgcttctagccatctcttcctccatttcatgggtcaatccatcctaaccatatatgaaaattatgtaaaatttaacaatgtgataattttaaggaaaaaatacaatattggtgtaactcacccatttttctttagcaacgtcattgactaggttttgtccttttttctagtatggctatctctccaagtttggaagacatatttatttggctccttctgtattgatattagtgttagatattttaaaaattataattttattaaatgaattaataaaattcatgacgttgagttgtcgttgattttgtaccttgagttgaggtgtactttatttattttctgtttttcttattttgattggaacgctctataaatttagggttcaaaaacagatcaataatctctttccaatgctcttttgttacatactcaggcttagcattgatagccacctccagattatcatggttgtcttcgtaatatttttgaatctttctgaatatattttgcccatctcgtgatatagagtcctcatgacttttcatgttctctgtgaccatcaatatcataatataactacacttaaagaaacaattgattaattgactgattatttataaataaaaattagttcgactatcaattgtttaccttcattctctgcacaacttgttccttaaaatgttgagatatatcagcaaaatctaagtagttccctaggagtaatgtactaacttcaactcccaactggtggacaaaagtttggttctccaagccaacaacttttctcattgctggatcaagcgtaagtggcaatggtccctgatttgcccgcctacgagcctctaatggtatattactagcaacaccacgaccttttcttttgggcggtggagctgcctcgcaagttgagggtaccctattaggatccggtggatcaaaaccatcaccgtctcccccgtgacaagaagctatatcggttgacattatgactctttaaatgaaaaattatatgagtaattagtacgaatgtaaattagcaaaaaatataattagtttgaattaaaattaacatcatattcgccatttataaaattattacaaaatatttaacacataagtaaactaatagtcacagtcacactcattatttttagaaataaaatcgtcttcacatcaatcaattagcaactcgccaccttcatcatcaacatcatcatctacaacattttcatcaatctgattaacaatcaaattttatgtagttacaattattgttgtcactttagaaggttgcaaaattaactctcctagatccacagtcaaccaaaaatttgacgagcttaaatcgtgtacaacatcttcatcatcttcatcctcctcaatgtcccaaatttgtcgatggtttacttcctccactattttctaatttctacctcttagcagatcaccgagataaaatacttgcttagcttgggtagtaagcataaatgggtcatctttgtaccattcaccact

SEQ ID NO: 123959 - DNA, 1377 bp, Cannabis sativa
aagtgcagggtactccatcttgttttcaaccttcttaattatcatgccttcatatttttcatgcttttttctaaccatgttactttcatttcgcgtagacatgtctaagaaaatggttgaagctctgaaaaagagagtgggaggaagttcgggcttatctcctccggccaagtggtccaaaggcggtgagagaaccctgtccagggagaagacaccagctgaagcggtcattgatctctccgacgaacaaactgttgtggaccctcctttctcggaaatgactaagtccaaggattctcggggaggtatcttggataggccagagcaatcgaagggcagatccgagctgatcaaggcacctgccccacatcgagtgctgcacccggagaccaaaagaggcaaagacatgctcattcactctgtgactcgatcggtccctgaggcaaacgagcagttggctggggcagacaatgacctttccctaaagttgatgagatgatgggaggagctctgaaggagtttgcaagggtaagtctttcttgacagtttacttttatccttcttcacatagttcagattttaacactctttctctatacagactggtctaaacatagcttacgcttattccagggccaaatcggctgcctcaaagaatgccgccatatccaacactatgctggccgaagtggatctggctaggaaggatcctgatgaagccagggttcagcttggggcagtccggatggaactgggagaggtcaacaagaaacttcttgctgttgagaagaagatggttgagctgactaaagatctacaggcttttgatcaacttgaaaatgccattgcctccttgttaaaagaagtgaccagccttgaggaagaaagggaggttcttcgagctgtcttccgcaggttggaagaagagcaaggagggggagcttaacgctgaggttgagaagtacaagtcaaaggccgagcaacaaaaaactaaagttgcgaggctcgaaggataggtaaattccttagagacagcgggtctcgagattttttatgacttctggaaggctaatcctcaggcaaatttcgattacctaggcgatgccaaagacatgtttctcgagtactgtgcttcttcggtggcttatggggaacccaaggcgaccacttccgcctctggccagactgttgatgtgccccccgctcaaacaaacgatcccctagctccaactgacctagaagactcgtacaaagagcctagaactccagccgtttaactactttctttttctatctcttttttatctgtcctgccaaaaggccttttttaagacaaggtgatcgaccaagcggtctttaaacttggaattatttttc

SEQ ID NO: 123960 - DNA, 641 bp, Cannabis sativa
tgtaaaaccaccctaaattttattgtatatgatcaaagaagctatgatagagattaaataatagacaagaatatattaccaaatcattttttctatcttttattatctccatcatatcatcatcatcaattgatatattatttcctgcaacttaaaaaatgatatcttattaaaaaaatatatggacatctagaaaatcttttcaaatatgattttttgaagcttaattttctttctgctctcacaaattgtatttttattaaaaaattaataatgaaatcattatcctatcaatttattgtactttttttgaaatttttgagaagggagagcatccaattatgactaaataatctagttttgcactcttatatataagcgatgaaccattattaattaaagtcaaatcattcattttcaatatgagtcatatgaccagaccagaccaagcacaaaggattctcttttactaatccctttcaaaaaaaaaaaatgtattctacatatctaatgtaataatcaaatttcttaaatgaatttagcaataatattcacttaacataaaaatagatagcaatcatagcatatcaactaatacataaattctttttcaaaaaaaaaaaaaaactaatacataaata

SEQ ID NO: 123961 - DNA, 899 bp, Cannabis sativa
ccaaccacgacgtcgacgaccaccacccagcctgcccctttcgtccctctgcttcagcgagacaccaccggcactacacgcacacgcaagtatgtaccttttttattttttttcttctatctttttgtttttaatttgttcgattggtgtctctactcttcagttcagttcgttctcccttggcggtcagtgggcgtgttccctttgaaaatggtaaataaaaatatactatatatatcttttttctaaaattatatgataaaataatatatatttgttttgtatgtgatttgtgggtaatgtattgagtgacagtgagtatgtatgtgatttttgttagtgttgaattgttttgttatttttcatatattatgtgtgtgtatatttattttttcaaaattcatatatattagtgttaaattgttaatctgttatttttgatttgtgagcgtgtggtataataagttatacatatattttatttatatatattttgtttgaaaattatgattgttggtttggtgaatttgtgatttgtaagtgtgtttattgtattattttgtatatattatatttatatttattttgaaaattatatatatttgttttaaaaaacgatgattatttattgtgaatttgtaatatgtaacagtgtgttaatgtattattttatgtatattaatatttattttgaaaaatatgaattattgaattgtcacttgtggtaaacttgtgagttgtgtgtgtatattatgttattattttgaaaaattagattaaatttgtgtataaaagattgttgaaaaatgttgttatatgtgtgagtatgtgatatattagataataaattatgttgagtgtgacatattatgttattttatatatttaaaatcttagag

SEQ ID NO: 123962 - DNA, 1194 bp, Cannabis sativa
tattataaacttattacaacttaaaaaaatcaagttattccaccgttaaaaaatatatttattagaaattttaataacaatgtattttttacaatagcacacaactatttagcaactattatgtaactttaaaaaaaaaaccatttcaatatgtgaaaacttcttaatcttgataccaaaagtgttatgaacttataataaatgttttaaatatattggattggcacataacttaaacaaactattatgcaactttcaaaaaaccaatattgtaggaatcttaattgtagtttttaacatggctcacaactgtctagcaactattatgcaaccttaaaaaaatcattccactatgggaaattaatagcaatatatcaacgtaaattttcatgttataagagttctcatagaaatttaaagattcaaataaatattctctctattaattttcttatttgtgacatgtctttcagttgtgaatttttttgccacagttgttgcacctattatatttttgtttcccatctacctataaatcttcttttccttagtctttcggatctcactttctggtttggttacagacaatgatatctttgatgttttgagatacacaccatgttttgtgattgtgtgcaagataagatatattgacccactatatgttctgttccaaaccaaaccatattttattttgttttggtttggttgtgtaatactgtgaacaataattttaaacatttaagttcatatctttcatcacaataagacaatgagcacatgggagttcgtttgtttggaatctgttgcaactacaaattttttcttttagattgaccatccatgaccttatttgttgtaccacttaaaccatgttattgtttattggtttcatctacagattttgtaatgataataaatgtattttatgttgacaaaacgaaaaccaaactacaatgaaactgttatgaaacttatagtttaatgaattcttacattttctgtcaatgagtccataaagctattgattaacttcttcttagcagtaggtgtcaaaattgttgtcattttttatgccgtttatctgtttgtgtatgtccattattgtatcaaagctcttaataagtccatcagtgtagtgattggtagttcagtagctgctaagtttgttgagtttagagattcaacaatgtt

SEQ ID NO: 123963 - DNA, 1955 bp, Cannabis sativa
  modified_base (646)..(657): a, c, t, g, unknown or other
taaataacaaatttatttgataattaattataattattaaataaaacagatttgacatttataggattaaaattaaaatatggtatttgtaaaagaaaagagaagttattaaataaatcgcaaaattaaaactagtgggacccattacgtggtcggccacttaagggagtatttagcctttattttatcttttttaatttcatataatttaaaccctaaccctagaaggaatcttataaatagagaatgagaggctcataacctcatagccattcattagtctattctgttagaaaattgaaaatggagaggctcctctatattttcaaattctctctctcttctctcttaaaattttgaagtccctatagtgaagagtaccttgcccactcatatcaagttagtactcaatcacagtgtctaagattgtgaagaattccaacacctgaaggagatccaggttcaaatcttgttattactctgtgacagaaaggaacaagggttagagatttgaacagaaggagccataatattctgctgccactaatgtaaggttttctagaactttatatgtatttattttattattttaggtaattaatgtttaggatgttagattatagaatataatcaaacatacatgttnnnnnnnnnnnntcctgataaaataacttccaacaagaggctcataaaataagaatgatcttgactctcgcctactaggacaatgttggattcttatcttgatcgaataaaacgttgctaaaatggtgtccattttagatgagctgaacactctattcaactaatgttatctttgactatcacctaccaggatactgtatatcatttagttgaaaaccttagaaaataatttaatatgtattattttggtatttttgcaaacatgtcttcattacttgttatttcctgaatatgtgtatgaatttatatgaaccaagtaattgatttctattttattgatatttgtagtgtcaaaatattgtttaacaatactcaccctaatcttcacatactcaacgcatttgtaaatgagctcaaaagtgcaaaagatgactctggtcagagtatccttcacacttgctcatgatgaacttgaaattccagaaagcaatcatgttgggaattttgttatcaaaagagaaaatagttcaatttgttcttaatagtttatctcctgagtataaccaatttgatgtatcctttatgatcaataatcagaactcgtccgacatagacaagctggacgctaaactgcgtgcttataaaatgacaatgttgaatgtaaggagatccttctccagtactgcaagccacaaaaaaaggaaaggtgagaatataatgagattttgaatgtggtgattgaaaatcaaatcgttcatttgaaattaacacgggggctgtggggcatagcttttaaaaccaggtggtattgagattttggatgcctcgattgagaatgactattgaaagcaaatcattttttggagtttttttttttaaacgtagtaaagctaacattctgttacaaaaaaatctttaaatcaaataatttcattaagcaactatttttaatatataaaaatatttaatatttttgtagtaataaaaaatgttaaaaaaaaagtaaatactattttagactctatgttttgcaaaagttatcaattggacacctctgttttgttaaatgacaaaatagaccttgtatttcccaaaataatacaaataggatcctgaaatgattttttgtcaaaataaaatttaataataatctgatctaaagttgttatgacaaatctgtttacattttatgtatctattcgtgttagaaattgtcttcaagttggttatttaaaaaaaaagttgtcacaaattaagctcagggtcgtatttttaccattttataaaatacagagtctattttatcattt

SEQ ID NO: 123964 - DNA, 565 bp, Cannabis sativa
tgtagaatctattttcagtgaaggttgatttgccagataaagtatgtggagaatgtccgataccaaggggcatggaacctgaaaaagttataagaaagcagagattgagtggattagcaaaggctaaggctctcatgagagcgaaaggttttaaatctaaagacccctttttcgtagttcttatgcaaccatcttttgttggagctgggtttcgtatggtaataataaataagcttctttcatgttgattttcaaactatacattgaaaattttatcatattgactctctgttgatcttcttcatgttttgtcaagattgtaccatttccctttgcaaaaacttacctcagtaagtctcaagatgtgatccttaaggttcagaacgggaggaggacctggtctgttgattacatatgtagacagtacaaaggatcttcaagtacaagattcgattgtggttggaaagcatttgttcgagataatgatttgaaagtaggcgatgtttgtgcctttgttttgaaaaagagcattggaataatattattcgaagtggttatttttcat

SEQ ID NO: 123965 - DNA, 1652 bp, Cannabis sativa
tgctggacatccagttaatgattttgatttaatcctgcacttgcttaatgggcttggtcccgagtttgattctgtggtgtctagtattacctctcgaagtgaaaacttgtctctggaagaagttcaagctctcttgatgtctcatgaatcaagacagacttgaaagacacaccacggttctggatggacatctctacctacaaaaatggctgcaaaccttactttgggatcaagaactgggggtaacagacattatcacaatactggaaagggtcaacatacggataatgctggaaaaactggtaatcgtggctatggattcagatctgtcaataacaacaggcctttgtgtcaagtgtgtatgaggtttggacacacagcagctacttgtcactatagatatgacagaaattgggtcactccaaaagctccccaccctcagccccaagcaaaccttgctgaacacaccatcgattatgatcctcaagcatttcttgctcaaacagttccggattttggtgatgatgaaggctggtatgtggatactggtgcaacaaatcatattgctcagtctactgataatcttgaatctatcattccttattctggccaagaaaccgtagctgtggctaatggtaagaaattgattatttctaacattggtaaagctactctttcttccaaatcttgttctttaaatcttgattctgttttacaaattcctactatcactaaaaatttggttagtgtttcaaagcttactaatgataataatgttttcttggaatttcataaaacttgttgttttgtaaaggacaaggaaacgggggctgtcttactcaagggcaaaattaaagatggtctctatctcttaggggatgatagttcaaatctctctcaaaaggctcttcaggtgcatttggctactgctgctagtccatctgttttcagtttgtgtccaaataaaaactgtactcaagattgtaccttggttgactcttcaacctctacttgtaataatcaagataataaagagtcattttctttctctccaactgtgtacaattctacagctttcattgctcaaactctcactgatgttaatgtttggcacacaaaacttgggcaccctgcacctgatactttaagaaaaattctcaccaaagccaatattgcttgttcacttaaagatcttaagttttgcaaagcatgtcaactaggcaaaaatcatagattaccttttcctctatctcaatctcgagcaactcaacctcttgctcttgtgcacactatttgtggggtccctcccacattctatctaaagaaaactatagatactatattgttttcatagatgattatagtaggttttcttggattttccctctttcaatcaaatctcaagcctttgaaacctttataaaatttaaaagccttgttgaaaaacaattcaatcttcccatcaaagctgtccaagctgatggtgggggagaattcagaccttttgagagatttttagcagatcaaggcattagatttcagcaaccatgtccccatacacatgaacaaaatggtagggttgaaagaaagcataggcatatcactgaaaccggtctaactcttcttgctcaagctggtcttgatctttctta

SEQ ID NO: 123966 - DNA, 906 bp, Cannabis sativa
  modified_base (26)..(55): a, c, t, g, unknown or other
aagttcttatttaggatgttaataannnnnnnnnnnnnnnnnnnnnnnnnnnnnntaaaataatttccaacacttccaaggtgtcgaattctacctagttgacccgatgagtggtgttctacgtcctagttggagctttcgttacctgagtagggtcttctttggaagctcccacatccattgttctcttcttggttaagaggtcatacaggtatgttggtctagatcttgtactctagttaacatgggtcttgctattgtctcttgaccacaatcatcttaggacaaaccgttgtgggagtgttcattcggagcattgtagtggctacttccctgaaagtagtcttcagttggatcacaagtgtaaagaggatagaattggttactcaggttcaattcctctccatgcactcgagggaagtgctcatactgttggccatcgacacctcaggcaaagtaacagcataattcacccctttcatctcaaaagtactttcgtgtatgaagcagttattagtccttccctgctagatattgtagccttcagtttcaaagtaatgtctcttactatctccttcagtttgagcagcaggtccatttcccttgcaggatctcggggcttagtttcgtgatgagaatgttgagaaggtcctggtggaggagtccttttggctctctcgttgttatgagatcactgaacacttaatggagggcccattggttggcacccacgatcttgagtccttttggactctggctcgaatgtactttccctctgggaggtatccacacttggtgtttacttagcacctgctcagttaccaggtgtggtagttccatatcaaggattaagggtttctccttgagcactagtcccttctgttgggttttaagatcggaagagcg

SEQ ID NO: 123967 - DNA, 1810 bp, Cannabis sativa
ctccaagcaagcacaacttgcaaaagacaagaggtttactttctcactaggcaagaccaactcacaaaagttctctagaaattcaaggaaagatgtacctggaacattgtttatatgaagggaaacacaccattaaaccagactgctctaacaagaaggcagtaagatgcacagattcataggggtgattacacaaagagcactatctttggtagggatagtgtcttgacaagctctccaaagcatcaaagctaattataggttgcaagcccggcttccatatccatttccacttttgatcttctaagtaggctgcttaaaccgaatgcttgcccgagtgagcattcttccgaacgacacaatccttttcattatgaaacatcctagcaatcttgaggatttgattccccatgtcagtaccaaatagctctaaaaccatgacctctgtaatttatgcttttttctttttaaaattgacaagttcaacaaaaattaagtgttgcaacaaacagaaaaaatcattgtagtactagtcaaatacatgtttgataagtgctggtaaaaggcaagaaaattgaacgatcattcaaatgtatataaatatttgaacctttttttttgaagatttttttttttgtaagcttagagaaaaaaaatgctaaaaagatgaaagtgtagacattcctaaactaacggttttaactgtctggtgttgaaactcaagactatatatagcaaattcatttgtaaactgtttagagagaaaagaagagtgaaagagggttgtatagtattggcgtagggtgtgttagaccctattgccacaagtgagaattctgtgtaattgaagctaggcttcattgagagattgagtccgagaactcatttcataggaacaacttgtaattcaaatcagttttcagctcaataaagactcaaaaccatttgggctgttttattcatttctgcattgtgtttgattcggttcatcatatttttgtgttagttgcttaacttgtttctaatcacgttgcatttacttgatattgtcgttatttcttgatcgaggtattgaatcacaacaatatttatatacatatatatataagcagtactgcactgtctatcatcacaattatggtcagaatctaactttgtattggaatctaaattagtttattattgaaacaaataatgtaatgttaagaataaatgatgtattgaagaaaaattacaatatatattgatgtgtcatcaatttctacctcataattcaatatagaatgatatgatctggacggacagtgagttgagtgtgttggagtatatttcgactaaaatttaagatattttgttggtgatgaattgaggattataaagatacgatgccgtttcaccccccaaatgataacttcttcgtcttctctaataaaataaaggcatatatatactttatctttataaggcttggaatactcttgtcaatggatatgcctagtgaaagcaagggagtcttgctgtggagacttttatgaaaatggtggaactccaatgtaaatccagatgaaataacttttgttttactatggtcaccgaaggcttagagtatttttgccatagatgatgaggaaaatgttagatattacaaaactgtatgctgacagtggtagatgggatgaaataaaagggaaagttcatgattttctaagtgatgacaattgccatcctcaaataaaggaatagaagctattttggaaagcttttgtgagagagaatgaagttgaagttgaaagaggtcctatagatgaag

SEQ ID NO: 123968 - DNA, 1106 bp, Cannabis sativa
  modified_base (881)..(887): a, c, t, g, unknown or other
  modified_base (1057)..(1062): a, c, t, g, unknown or other
ataataaatatttttataacaattaagcccccacagatcaaaaattctgagtccgtcactggacataattatataattattatattttaagaacaattttcaataatttatatattttaggggataagataagttcaaagaacaaaaaatattaattattattttttttactattttaagtatttggtatatttaatttatttttttcttaaatttttgaaaaaataaaaggattagatttttagaatttgaagaaagacatgcatctcccttcttctaaacaataaatgcttctgtgcagtgcagtgagtgcagtcgtcccagtccaagttcagattctttagtacaacacgggtaatgacaacatttcaacatttctgcattgtgcttcccgctattgcatacagctgtcccacaatttttaatatatacttttctgataagtatatatatagtatactgattgtatgatgtatttttttaattcactacattacattacatgctatatgattatagtgcaaaaaaaaaaaaaaaatgttaatgatttccaattacaattttcaactcaaacacagtgtattatatggatatgaactcttttcaggataatgggaagaaacaacaacaacaccatttttggttaccatcactattacttgcgacacaaataaatgcacatataaatatggatatgattttgtcttgttattgtacttttacggattgtaatccgtgatgtacgacagccgtcagataagggagttatttgatctaacggctgagattgatctagaggtaattaggattaaaaagtagaaacgtagcctgacattcatttaatgtaccctgagacccatctaatgtaccacggaatacannnnnnnaaagtacatcacgggacaaaatcatatccccatataaatatacaaataattctataatagaaacattttatttgtccccataagatagtgcattttattagctattaattatgttaattttgttagacatttatatgtataaactgaaatatatatgtttatgtataaannnnnnaattaaatcaaacatatatacactatgaataaggatcgaaatac

SEQ ID NO: 123969 - DNA, 536 bp, Cannabis sativa
atacaacgttatcaggtgtgatagtgacttcacatcttgtggattggacatctggtgatattgtaaagtgtcaagggctcactataaatagggcccttgaattcattataaagagatgttttttgaatgaatgaaacagtaacttcttgagattggaaagcttatgagatttctattttaaagattcttctattaagtttttttagagatagttctaaatcataattatatcattgacgagttctaaccattaacaatttggcgttgtctatgggaattgatacataaaagcaacgtcatttccttacctagagtcgttaagaagatgcagagacgttctcgtcaccgttaggatgtggaagtgcgacttgatagccatcagttgatcgcttcaaggcctgctccgccaactttcgtctctgagaaaggaggtgcaggtgactacatgcctcagaatggaggaggcacgaacggtcaaggatccttagaaaaagaggaaaatgggcagcctgaggactgttggaaatattttacca

SEQ ID NO: 123970 - DNA, 879 bp, Cannabis sativa
aataataataatgataaaagatgttcaataaaattgttgaaccaaccatacctgccgtacatagatgaaaagaaagtacaaaaattattatgaaatatttataattaagaatatatatatattttatagatgtaatatgacgtgtcaaacacccaaacccctccaccaatcactctgcaaaaaatataataattttgaaaaaataaatgaaatgtattggagtgaaaagagtgatttaattttttttttattattattattttagttgtatgataaaataatacaatgactactattggtaaaaggataaatatacaagatgtaaaatttcttatggtgtcgtattttgggttaggtataatttaatatagaatcaatcctatacataataattttttatttttataattcgattttacatattttaattaaataattactctaaaaaaattattaatcactcaaaggtgaaaccatatgcccttctgttaaaacttaaattatttttaatttaaagagtttcctgattgatatctttattataattagtggtgtaaatataggttagatttttcgacatattacgaatccaacactgagcataactagacacaaaaaatatggatttagacacgataaaatacagtattataaactggcaaaatacgacacgagaagcacgaaaaacacaacatataagtactattaaactagcctgaaaagcacggcacacaacaagcccgaaacacgatataaaacattaaacaaatcctataatttaataatatttataatagtatatatttacttattaattataaataagataaaataataataaaacttaaatataacactgaatattataattttataatt

SEQ ID NO: 123971 - DNA, 823 bp, Cannabis sativa
tccatgaagcagccagagtgacgcactcgtgtataagagccattcattctgtgggtgtaagagcccaatggaggcttgtagcggggacattacagtgaacccacatgggattgaggtcacgacaacaacgacccgacttggaatgccaatgccgaaccagtgctccttgaggaggatcattttaagagtacagaatgggagatggaccacctccctaacaaattctgtaattacaagatgctgacacatttgaaagaagaatgtggcttccaaaatgcccatgcctattctggaataggctctcaaggaggggcaaagctagcactagtgtagacaacttcagagtgttgagcattggccacattactgccagagcccacctctggctcaagaaatctttgcaaatttcttgactttcgtcaggatcaatctctttcagctgatcccatagaagtacaagcttttagtaggattgtacatttcagcaaggagacaaagatgatgatgcctagacccgcaaaggttctcttctttaatgagctagaacccgtcttatgcaagaaagacaagaacaaagactacttctaccacttgaagaagaggaagaaagtgaagtgccccatgagttcttggagtcatcctttggatgtgcgcgagtattggttctatacttctgggtaccacttaagttggcttcccaccctcctcttagattttcatagagtgagtaagtgttaacccaaaaactttccctgatgatgtagacatcaatatttaacatgtggcaagaaggatgacgtcacagagttgagtaaactcgagt

SEQ ID NO: 123972 - DNA, 1005 bp, Cannabis sativa
aaaaattaatatttcctattttatcacttttttctttgatttttttattttctatattcctaaaatagataaaactattaataaaaataaaaaatttatatatggaattattatttaagaagtaaaacaaccgaaaaaaactaacaaacaattttttttaataaaaattattttaaagattaaaaagaaaaaatgtgtatatttatttttttttttataaaatttgctcaaactagaattttaagttgtatcactgagaaaaaaaaataatcttaaactttaagttctaataaatatggaatgtataatttttttctacatagaccaacagcaaccaaataagataggcaaaagaatatcaagtaacatgtttttaaaagatcttagtatcaactttgagaaagtgcctatagctagacatatattaagaaatgatgaaagagtgaatatgtttcaatactaattaataaattttggtgattactgtaagttaaaaaaaaatattggacataattcatctttacataactaacatgagttgttcagctaaaatatggataataatcataccatttaagctaaggcaaagaatatatgcccttacgtaaggcaatatatcatttgaattctcctcaatattaagtggaacattcataaaattagcagctatccagttcacacgaatctttgaatttttaaaggctttatctggaagttctctttcgaaagaattaaaaaaaacttgttttattttttctttatctttaaaatcttctccagtaataggtttgccatcaattggcaaacctgttaaatagagaacatcttctaaactaaatactaacttttctccggctacttgaaaccaaaatttgtccttctgaaatgttctaaaaatggcagtaataaggtctagaggaacatttttttttttttgaattaaagatgatgattttattaatgcatttcttgctcaattacatcaaagatgttactcggaatgga

SEQ ID NO: 123973 - DNA, 1214 bp, Cannabis sativa
ggtgaagtccatgtcagggttagctgaccaggtttgataaatggttctcctgacaatgctattgaccctgtttttggtgtcaaccttcgcctctttgagctttttgtgagctttggcctagatggacttgatggaatcctcaagttccttaatcctcttctagtcgccttgacgttgcttttcagcctcctcccttgtgcgagaaagttcagagcttgagtcgttccatttcttggccattgtatccctatgctctctagtctgacaaagttcagtctcaagcatttcaactccctgaaatcctctatgtttagtagagaaggaaagaagaaatgcctacgagaaaaagacagactaagaaaagattaaaaaatgagaaagaatgagaacaagaagataaagagactgacctgatgcatgaggtcataactcctttgcgcaagaccctcaaagttaccttttgtaagaagctcccagtcactagactcaaaagtttggtaacgacactagtcgttggtagcatgcagtgagcagagttgtgaacctttagtcccaatctcgaggggtagaggacaagaaggcttgagaagaaccatctctggacaagaaccaaagaactttacttggtgcaccgacctagtaggctgttcattagcgcttgttgcagaaggaaccatcttctctagagacttggctggctcgaggatgagttggctcgatgacttcttcttgttggcggtggttttagttatttttggttctttggtaaaacctgaggcatcactagtttgagcagctcgtttcttggcttttttgtcaacaagtggaggactgctaaacatgttttccaagccaagatccatatctgtgaggcaaaggaagtatatcggcacttaaacaaaaataaataagaaaatggggaataaactctcacttaaggaaagttaccataattatcagaaggtgatgaggaagaattataataattactgaattccctagaccctctgatctcataaatatcagaaggatttagtggagataaatcccaacttgaatctagatggctcgccctatccaggttgctcccacattgttcagcaattttgtagtatgaactagtgcagctaagctggacatgaaacctagggtaccaactatcaaacctaagtgttatgcgatctatgaggaaggggttccaagtgtaaaaatta

SEQ ID NO: 123974 - DNA, 574 bp, Cannabis sativa
acaattgtatacttttgataattagataaataaaactgcttctgatttagagatctagagaaaaagacttagttgatagtattgcactatcaaattattgtaattgctatggatctatattatatacaaattttgtatcttgagattattaatttttctaacaaaagaatgaagttggggtcaagcctcaccaatcccatgtcgtagaggaattttacatgaaattgtagctccatgttgcctgtgctaggcgacatgtcatctggcttagtttcagcatactaagttttggagttttataactcctcgacctctttttatttttaacattttctacccaattttaatgatttaaatgagtgtaataatcccattttaacatctatatgttgataatttagattccaaatagatttgtacaataattctcttcattacactcttgaaattgtaataaagaattaggaaaaacgagtttcaagatttttattcaccaaaaaattagagcatgtttgatattgttttctgtttttttgtttgtttttagaaatgaaaacaaaaaatagtttttgaa

SEQ ID NO: 123975 - DNA, 1181 bp, Cannabis sativa
  modified_base (1118)..(1141): a, c, t, g, unknown or other
aggatgtaaaattgcatattttttaagtgttaattgggtaaaataattataatttatgttaatttatttcatggttttgagttattttaatttcaaattatttaatttaatctaatatggtgtaaaaaaaattagattaaaaaaaaagataacaaaaatgaaaggtagaaaggaataagcatcaaattgggcccagttctaatgtatttcaattggtctttccaatcactaactagttagtaggggtacacgtacatctggtgagttttaatgaatttcgggttttggggttcagattttcgggtttgagtgtgcgaatactataaaccgaacccacccgattgtgtgtgggttttcgagttcggggtgtgcggatactatcaacacaattgtcatgtgcgattgagcccacaaaactcacggtccaacttataattctaagctcatggaagccttcgctaaatttcagcaagctttcacttcacttacaggaaatttttaaaaattataccaaaattaaaaaaaaaacaaaattgaaatatatatatatagattttatttgaaaaatacgtaatggtattaattttatttacaaaaataggaatcttattttttaaaataattttaacaaatatgtaaacattttttcacataatttgtaaataacatttacaaaaactaaacacattatatttgtaattaactatttttacagttaaaaagtaatattttttctcaacagtcaacaccatgtcaatgtaatttataccactttattaagcaacatggacctcatacaatcatttcggcccaagaacaatttattaaagatgatttttcataaatataggaatttttggtgccatttactattttatggcataaaaaaataaataaaaaagatatgaaaaaaaaataattaaatgtaaaaatatgggaaaccaaaaaatatataaataggcttaaattcaaaaacccatactttccaaacagaaaaccatctcactcgatctctctttcctattccctacaatttctccgatcgtcactctaggaattgatcgcacgatcaccagctgcggaattgaccactgcaattctgttggaaattattttannnnnnnnnnnnnnnnnnnnnnnngtatgttgattaacaccctaatatgaactttctaaaacga

SEQ ID NO: 123976 - DNA, 1825 bp, Cannabis sativa
  modified_base (1782)..(1800): a, c, t, g, unknown or other
tgactgaaatcaattggatcggatcggatagtaaaatctaacatccaatatatgattagatcggatctagataggcctaaaaataatggatgtgatctaatgaacacccctacatcagttggatttaacagccggaatagaaaagtaaaataccattaaattaaaaaatttcgttagataattacttttaatatataacacctcttaataaattttaaaaatattacactgttaaattttaatttgatgacgaataataaaagataaatttaagtttgtatatatgtatgcattatagataacttaattaaaaaaaatatttcttcttatattatttttaaaatacatttatataaaaaatatttaagtaaaatttaatatttttttctaaataattttttttttctttttcttttctatcaatggaacaatcctaatacattaaaagtgtactcatataagaataatcgacaatagttttgaagaaaaagaaaaagaaaataaatttagaggcggcagaatgagctcactttatttttttttttcttttgaaggatgaatgtgtttacttgaagagcaattaaaggatatatgaatttgctgaagtttatttgatttgaatatatattttaagaagtttttgtagtgtactcttttttgcaaggctccctatttgtttaggcttttagaatatttttttaatttaattattttttttcatgaatgtttatacaaattataattatttaggactacctataaatttttaaaaaattatgcataatgtacaatattaaaaataaggttcaaatagatacttaccgcgagtttaagaaaaacatgagtcacacgtataacaaaatatttaaatcttactttcggcattataaactactcaaaaaattttaaaaatttagtcctaaataattataatacacacgatcatgaaaaaaaatagattaaaaagctctcttgaatgccgaaatagtcaagagtctaccaaaacactactttaaaagggtttactatagacatatctctatatttatattttatattttatttatatatatatatattcggggaaggatttcgagtcttttcgacctacatcgttgattggaaggtgaaggctaatcttggctccaatgaccgtacacttgatttagggttcgaaaccatcgagcccaaaggttgggaccaaaagttctgtgaggttagggatgagagattgaagattgttattcggagatggttcagatctacaacatcggacggttgtaaattggtttgaaaaacatgaaaattgtaattataatgtcattttctttttttataaagttttgtttatagaatatatttttttatttctttaaattaaactaggtaggaaggagtagaaattgttaggttatttttaataatttaatatgtgggtttataaattaagataatttatttgagttaatattctaaattggactaaataaatgatctaattaaatgagcttaataaatattttattcggtataggctttgtaatgtgtaatacataatagtaaacctaattagagtttatgaggttctaattagtttgttatttaaaaaacataaaaggctaatcttaaccactcttctcttctattctcatcaattaagtgagaacatatagagagaatattagtctgtggaagaccatatactcacaatcttatctcgtatctaatattatgaaatcaagtatgtcttccatcttatttatgttggaatatattttaccnnnnnnnnnnnnnnnnnnnaagtatgtttttaacatcctaaaca

SEQ ID NO: 123977 - DNA, 1678 bp, Cannabis sativa
tttgcttatacctcaattccttattgaaagaatttttcaaaaatatcatttttattaaatgtatgagagctataagaactaatcacaacgttcataaaacattaaaaaaatacatgctgaaaaatagtcgggcgacatgtcgccttccttggcaacatgcaacatgtcgcctatagtgtaaaattttaaaatttggtaacaagtaactagttatcaatttttttagtatttagcaaaacaactccaaacagtctaaaacttcacacattgactttatgtcatctatgcaccctataagaaataaaaatatataagtcctctaacaactgtatttccataactatcatttaatcacattcaaatacaatagtaactcaatttactaattaagtgataatatgaagatgggttacaaatcatatgatcatcaatataaaaaatttataattccttttagacaccataattcacatacatgtaacttcatattttttatattataatttgacaaatattatttatcgtactaattgatttaatataaatattatattatataaaatgatatagtaaattattacactactaaaaaatttaattttaatcataataaaacttgtgactaaaagtaaaaagttgtgactaattataaatcatcattcttatattgtaactaaaaagtctgtaactaaagatattagtcacaaaaatcataatttattgtgactaaatatatttttactcacaatacttgtttgttgtgactaaactaaattggtaacattttgtattaaaatattatattttagtcacaagtaactttttatattgtgactaaaaatcaaatttagtcaccaaaaatttatattaaaactaaaaaattgtcattgaaaataatttttttttacagtattatatattttaatttaaatattatattatataaaataataaaacaaattatgattccttgaaagtgggattgaatattgacaaaataaaaagctgtgaataacaataatagaaagaagaaacaaaagaaaaggtgataaagacatgaatgtccataagttgtgtgagtttttttcatcagaagaatttttatacgacaaattcttctgatgaaaaaaactcacacaacttatggacaaaaaacaaaacaacaaacacatagtttcaagtttcaatattaattattacaaatgtatgtccttcctttgaaaattatacatcattctactatatagtgctaatgtcatcatcaatatatagtacacttttaaaagaaaaaaaagagatcataaattattaagataaatttaatatttgtgaattttcatcacatggtagtgtattatttgagcattgttattgagtactaatggtgttcaatacctattatatgagatttgatacttaattaattacagtaatagtactaaagaggatactagtcaccaataatatattttagcaattctctattaataaatttttatttgtaattaatgatatttgtctgtataaatatataatacacgttaatgagatagtaacaactcccgaacaagaaaagaaggtaataacatcatgaaaaatcatgtgtaaatgtaacgccccgatattttgccttattttacaaaaatactattttcatgcataatttgaaaagataaaa

SEQ ID NO: 123978 - DNA, 1661 bp, Cannabis sativa
tcgatactctactagagggccatccaaaccctattactaggggaaaaactgttgccaattttgctgtgaccattgtcaggcacacttctgataaaattccttccaagcgtaggataatggtgcagactaaacaggctgttaggaaatcttccttgactgatctaaatattccccgcctagccactctagctaagacagaatagacccgtcctgccactgacgaggaagatactactagggacattaaagtccaaaaagtgaaggaccaaggcgatgtccgtcctgctactccttccaatgccaaaggcgataaggaagaaggggttgctgtcgtgctgccctttggcggctacaatgatgaaggagagccagtatccaagacaggcaatgttttggaggctggccaggactacgttgtagaggagtatatcgaggctcatcctttgagaaggaaaggtctaccaggaggtcgatggatttctccaccatttgtggcaaccatgacaaagatgactaatctgctcgagcgcgatctcttagggattgtcaaatgcttccttccctccctcgtcgaaatggctactaaccctagagaaggttattgtgcttggttaggagctcacaccaaaatggtgcaatactacccttgcttccgtacttcaagaagatagccaattattaccatatcagccagacctagtttactcccaagggccttaagtacgtatctaccctgttcatgtagtacgcctaggaccctcacagtcacaacccatgtgttacccctgtggtattggttgcactatctacatcccttttggggcacgtgtccctcatgtataatgtctagtgagctaaataccttgattttacctcttaggtgaaggagtcaaggtagcgcatcttctttgaattatgtcatcctagcccatatctggggtcggctactaaagtgatgtctcctacagtcaaaatcattgatattttgccctctaattcagatgatactcaagagaacccatgcgctagatatgttaggttaatgtctgggagggccaatcacttttaacatatcattgcctgtcaagagtgtgttgagaggattcaggctaaaatcctctcagttttgagcggagagcaacatgatctggttgtcaactcttgtgtgtacctctccaggcttagagcttctcttgtagaatcccaacaccacttagggttccttgagagctctcttcctcccatgcctgatatcccttcatcttttgaagctgtggagccccccatgggtgaagaacgggtagtcacttctatcacccccactcccgagagcgcctagggtgaagacttgagcttgtaagaggcctgaaggaaataaaaagaaaggggctcatgctgaccattatttctatatatttaaaggtatgattccacccaagcactcagcggcttccactgcaccccgtgtacgtgcatcctcataccgacctaggcggcacatccctccgttaccatggaagtacccttcgtttattctaatattcaaagcactttatccactgacggtatatgtttgaatttattttaccaggatcttagatccactcacaagtatgttgtttaacaccttaaatatcaactttctaaaacgataattaaac

SEQ ID NO: 123979 - DNA, 791 bp, Cannabis sativa
caataatagtaataattttaataatatctaccaacaataaaatgttacaaaaagcatcaatatctatatatataatagtttggtgcacgtatatatataatagtaattttaatcttttcagttaaatttaattaagtaatattaagtacaatacttatatatatatatatatatatatatatttttaattaagtacacaatgtatgtttttttataatttttgaaatgggttatggacagataaacttcatgacctttcaaatttaagtctttggatgagctactatgcacttctaagtatgggaaagttacaacctaatgttacaacactgtaaattcttaatttagtactaattaattcatgagaatcgaagaaggagaatcaataactcaatgccacaacacaattactagtactctaaaagaccaaaaagttgtactatggcacataagactagggtatatatattagtgattagtgaaaaagacttacaggtcatgagtgattagaagcggctaggaaaggacagggtgagcaaagtgaatttctaagaatcttgtatcctaggtaaacatcatagactcatgttcaaaactggaatacgcaaaactaagaatatatactagagtatgttcactctgacttttgggggccagaaaagacttcaactcatggaggtaatgtctaatttttccaaaaaggtctgggttttttgttgggttttatgccctaaataaaactctttacaatcaaattagttatcaatttaagaaatttgaagtgattgatg

SEQ ID NO: 123980 - DNA, 744 bp, Cannabis sativa
  modified_base (702)..(714): a, c, t, g, unknown or other
acccttgccctcacactcatcaacaaaatggtcgagcagaaagaaagcacatgcatatcactgaaacagggctgacacttttggcataggcccaattggatctaagttactggtgggatgccttctaatgtgccacttacactattagcagattaccaacccctattattggcaatatcagctcctatgaatgcttgtttcacagcaagactgactattctatattaaaatcatttggatgtgcttgttgtcctcatctaagaccatataactctcacaagttagatttcagatctgaacagtgtttgtttttggggtactcacctgtccacaaaggctatctatgtgaaaataaaaatggcagtgtttattgctcgaaatgtccttttcaacgagacacattatcctggcatgcctcacaatttacaaattgcacaggtacatactgcagctccttattgatttactcctattgctacattttttactaatcctgtttcatgcactaatcttgtttctgttggtcatatgccccataatactgagacaatggctcccccaataacacctgtgctgaaaaaatgactcatcccttacaacccataccaaaaaaccaccctcagtctatattaaaccctacaacaaacactgacctgattgtgttgggttttatgccgtaaataaaactcatttcatataatnnnnnnnnnnnnntaataaagatcaaaaataacatttaatgtt

SEQ ID NO: 123981 - DNA, 855 bp, Cannabis sativa
atagatattaattactgtaagattaccaaaaacagagaatattggttaagagaaaatgtagtgattgattttgtaattaatactcacaaaagtaaaaattagtaggaaatggtaagttatttataattttttggctttgctttatatgatttattaggtttatgtccccattaaagacataaaaaaccctaaaaagtcaaaaagttaaagtgggaattgtttcaaataaaccaggcaattttactttaacctcttcattacaatctcccattttgtagcatagaatatattttacggaatgtgtccaatataaatatattatttacatttaggaattttttttgttttttttttggtaaaagcattaattttgctcaagctaggaaggatcatttcttatttatggtacataaagaaaattataaattatttttttttatatgatgatgtacattataatagtcatattaggaattttgtttgatttaaatttttttttgaataatttagagtactaaaatagaattcaaatatttggttgcatacatctttattttattttataggtgcgcattacactattttaaattttattttttgcatcataaattaaatagtcaaaattttttgaaaacaaacaaaatatgcatggtcaaccttaagaatatataagtctaaggttatttaaattttgagaccctcactttcaaaaatatatataaaaaaaaaggtcaattttttttgaaaacacacaagatatatatatataggatgagaatatatgagcctaaggacattttaaattttagggttctcatattgtggacaatgtcccacatggaataaatggtagag

SEQ ID NO: 123982 - DNA, 1316 bp, Cannabis sativa
tgagtatgaatctaacttctcgatttgagcatctcactctacaagaggttcaattcatgttacaatgtgaagaaatgaaactaaaatagctcaccacatattattaacaaattcttaagcacacttagctaatgtcaatctgaacaatgtggaagagcatctcagtccaaccacggacatcgcggctaaactcaaggtggaagaggttttcattgttcgcgaacgttgtgcttgtgattgtactagtacgcacatcttcccctcattgtctaattccctcaaatatctcttttgagaatttctcacccttcatgcaatatggggtcctcctgagatcgtggccacatgtacatcaacggtggcaaagctatacttgtgggatatgggttccctggtcctagagctagtattgtcatcgcagtttgagctggcagagtaggtaaggctgaagttgtgttctaggagcttgaaggcgacttactccttgtagagattttacagctccctgttatcccgaaatgtgattttgcagcagtagtagaatcttgtagtagcaacaaaaacaagcaccagctactatgccaacctgtggtgatacaggatatgttctttatgctactatatcttacctccaagggaagtattcagtgttgttaagactttagacattttcaaagttataggtactgaagatagacttactgcccagatttttttgatttaatctgatagcttgattgttttttctaacttgaagtagcttggagtgtgccataaagactgtgggttgcgatttcttccattaagaatcatagattatttgattcttgtattcatattcaatgtgtcatgtgttccttgtaataatgtagctcatgttttataatgcacaaaattctgcatagctaattcttgtattgaattactgcatttattcaattcctaaatgtagctcatgttttatagctaattctgaatttcacaaattgaattacacaaaattccaaactaatggttcagatcatcaaacactgatttttatcaataaagagtttaatttaagaaagaaaaaaaaactaaatttaattttttaaaatatatacatatcaaagtttaatttaattttaagataaaagggatatttgcggcataaatactatacgttttcgttatacacttaaataccatatgttttatttcgatagattaaataccttaagttacatttccgttacttccgttactactttttagttaagtcatattcaaacatagagtatttgcggcataaatacttgatgttttaaatttcatac

SEQ ID NO: 123983 - DNA, 1016 bp, Cannabis sativa
  modified_base (27)..(30): a, c, t, g, unknown or other
atacataattatctagttagggttttnnnnatccatttcttaattccgggtattacattacttgcaccgaataccgctgctttagcaactattgattaaagattccataactttaataagttgctgactattttattcatgctatgtgatcttaattctccctacaatacaagtcacaatctcatatatgaataaagaatttttcggtatttatatataaattattcaatattcaatattaataatttaacaatcaagcatgtatgaaaatattcaacttttatttataatcagaaatatctttacaggctttttagggcataaaccctaacatgagcaactcgtccaggcgagatcccatccagcatggtcagcatccggaagacatgtaaccgtgtattcggaagaagccttcaacatatatttgcaatcccagtgtagttttccattccctatcagatcacacaagatcagggattgtctcccaataatctcgaatagaagattgtatctttctaaattaagaaagataataatagacaatcaagtaattaatatgtcattaattcctataaagatagaacacgattttgacaaccagcatcgtgatgtgaaatccacgtcagcatacacaaggcgctccatggatcgagttttaccagataagccataagttaatatttcatttgtaaactattaaagagaaaaagagaaacaagtatgatctctctgccaggggcagatgcacacttgaggctatagtggccatgcctccccaagaaaatagacatttacatatttttttaacaaatttatattatgtaaaccttttttttttggtatttattatatggtgtccccattgataaagaagtcaaactaaaatttcaaactgttaattttttttatcatcataatgttgaatgctaaattaaatacaatttctttcttttattttttttttaaaaaaataaaaatctatatgtttcctttttacaaaatatttatttttcttt

SEQ ID NO: 123984 - DNA, 1876 bp, Cannabis sativa
actgtagcgtgccttagcattagggcgttacacaacctgtctactatgtgggaaagaaaaagaaactgttgagcatttattttttaactgtgaatacagaaggaagtgtctgatggaagtgaagagagatttgaactgggggacaccagcagtcaaattgcagaaattactgcaactttccagcaagatcaaacatgtgacagcagttagaagaagcatgctgaagacaatactagctgctttagtataccagatatgggaggcaaggaatgatgttttgtggaatcaaaagcaatggcaagtaagtgtcattgcaaatagagtaaaatagggggtaaaaagagattaacaggggtaatgccaagcaaaacaaagaatatagatagacaatggttgagcaatttgtaatttttttgtaattacggtaagtagatgaaatagctacagcactcggatatgtacactggaagtgtaatttgatagtttgagcaatacaatttccttattcataaaaaaaaaatacaaaaagcgaagacaaagggagttttttagttgtgactaggcagactgagctatgctgaactactatatttctggtatcattgtttacattattgcttttatctgttgttttacttatttaatatattcatttattgattgaataatttttttattgtgattattatgtgagtgttttttttcttgttgaatatttgcagtttttagtgttatttattttcctccaacaataaatattattttattatgtttatttaatagttttctatgaaataataataatatatacgatttcaggtatttcttaatatattttattatttaaaaatataaaaattattagtttcttattttgatactaatttgcagtaattacatatatattaacaatttaattatactatattcaacaaaatataaagtatatattcaattaaatttgtattaagtaacactatgttatttttgtatttattatgaatactttatttatttataattttttcaaataagaaaaaaaaaatccaaaaataaaagttataaaatctttcgaaaatataaattacgttttatataaaattataataatattaatatttatgtttcaaaaattaaaaaattaaacctttagaaattggtttaaaaatagtgaaaaaaagtagtaattttatcataggtcatattatgacatctatatatatagaaaaaaaatatggtcaactgatttaataaaaaatgggttgacacatataataaaaacgagctaatttattaaagcacagacccgacacaaataattcgaactcatggattgttatagcctaattcttgaaatatggttcaggcccgaaatgaaccatattgttatacgggtcgtgtcggacttttatgagacgcaacctgtatttataaaaataatatattttaataaatttaaaaaaataaaatacaataaataaaaacttataaaaacaatatattttaataaactttttaaaaaataaaataaataaaaacttacttaaaagtttaaacttgactattattattttatttatttattattttttatttataaaaaatgtgtataccacaaaatcggttttaagagtgtaccacaaaacttccaatattatatgataaatctttagaaaaataaataaataaatattataaggtgcttctgcaatgcaacccccaaaaaaagtgcactgaagcatcctttactgtttcaacatttaaagaagtttttttaatctatttcttttcatagttgtgtactttataattatttaagacatccaacgaaattttgagaaattcagaataagttactgttgcccctgattttgcc

SEQ ID NO: 123985 - DNA, 865 bp, Cannabis sativa
ttgacatttttcgtattattttttttgttattttttgtatttttaaaagttatttttttgggtacaatgatattgataaaaactaataaattactgaaaaataaaatatttttatatcatataatttgagaaacatattggttacgccttaaaacttatttgtatacattttagtaattaattagttatttttaaattatattatgatagattataatttaaaacatatttaagtaattttaaaaattatcttcgaaactaatgagttgcatttttatataatataatacaacaaactaccatttatatatattaattattttatatgcctttttagtattttgaaagttaattagttaccatataatataatatagtttaattaacaaaattctaaaatgaatattattaactaagatttaaaaatattatacaacgataactaatcactatattagtaactaaatagtttcttatatggaaatagcaacaaaaaaaaattatgtttcaaatattttaaaatgttcacattgaaaagtaaatcacaatagtatgttttaggctcattcgaatagcgtaaatacccaaataaataaaatgttattatcgaaattattttgataatttgataagaaaataaggtgttaaaggtataaatttctattgtttgcaagtacttccttttcttttcggtgtgtatattgtataatgttatgtgcatttttaaatttttttataaattaaaggaaaccacttattaatttattaatttttttctaaaaaaataatattaaatttttaaaaatagttaccaaattttgaaatgatatttaggttagttgaaacctaatttttcacaattgta

SEQ ID NO: 123986 - DNA, 623 bp, Cannabis sativa
aatacaatgtctaatttatcatttcataaaacaaaaagtttatttaataaattttgtaaaatataaaattcaaaatgatattaagttagtaaatataaaaaattatcatgtaacatgtattactcagtacaaaatttgtgcatgccttgtacaaaagttaaccaaatttattcttaatatattatcaaaactcttactatactgattcattattgtttagcttttaaataattttttaagttagatttaaagaaaaaaaaactaaattttaaatattttccaaatgtaagcttctgagttctgagactatatttacatgttttataaaatatatattttaactattgctcatttaataataatttgactggttttgtacactaataaatagatacattaattcaatccctaaatatttcggcatctgtaataattttttagttcaaaattttttataggagttatttaagacaaattctctaaaattttgagaaatttaaaataatttacaatatagaaatcaatgttcaaattagagatgtcaattatatactcgcgggtttcgggtacctacgggtatccgccctaatagggcggggacgggggttgactttcgggggcgg

SEQ ID NO: 123987 - DNA, 1848 bp, Cannabis sativa
tttagtagtatttaatccaattccttgtggttcgacctcacttgcgtgagatactacttgattgcgtatacttgcgtaataaacataaaaattcgtaacagtcatcaaggattagctacccttaattgacaataagaaatacgctcctccacgcaaaaatcgctaagtcaaaagaggtcttgatagacacttgtgtcctattgctgagatgagagggacgcctctcaagtgtaagcaaacactcaaaaattaagagggtatgtagttaagtacaataagtcccctcacatccaaatgaaaggatgaataaatgataagaggacaagactgctcaaagtgacatatccctcaaaataaacccacttgccacagcgggaaaagttgttttggtcaaagagtggccccaagagacactcggccaacatcatcttcaaaactcaaagattgaaaaaaaaaaaagcaaagcagatggtccacttaccaaagtaaggagaaccactcggtcaaagagcaacccaaagagtactcggccaagaatgattctaaatgttaaaagtacataaaataaaaatagagttctacagtcatcccaaaatatgaaacaaaaagtaaaaagaaaagtttcaagggtcttcataaatatggccacgagaagatttcaaatataatttttttattttagatatgggtttgttgtttcacatcttagatagtagaggaggcgttggtagtccctcgtaagggttttggggtaaacatgagggagagaagagagtgatgggggagtagaaggggttatgtgttccatcaacggcaggtggtggtctgccatctgattttctttccaaatttgattggggtttttagggttatggcggtagtggagagagaagaagaagaagaaaacattaattttttcaataattatgtaaaattttattaagtattttttttattttttattttgatatgatttatttatcttttttatttttttttaaataatgtaattaggtggagtattaaaattgtgtcacgtgtacattgtatccaagtgatcaatccggcatgacatttaatagctaaaattagatagaaatgactaactgctaattcaatctaagttttaggagttttaccatcaaaatatgagttcttagagttaattactagtgaatgatactttttggggttttgctatataatgtaagttgttatatgtacgtgatcatgtttaaattaacattcctctaagtagaacaaaaaccaaattatataagccaagtaaattaatggttatgattactagagctaactagagagatttgtttagaaaaaatagcttttttcagttttaaccaaataagtaataatattacaaaaatacttccagctggccaaataaacaatacaatccaaataaaataattacacaaataccacttacagacaccttcaacccaggattcatgcaacctgggcaactatcgcgcaaccacgcagcaacccaacgcaacctaaacgaaaatttaactagaaagagaaccaccattaattctatcgacttcacctgagaagatgaccaaaatcaatcaaaacatggggtgtttcgaatttatgaaaaaaaatgtagaaaaactactacgaaattaaaattcaaccagaactctagtttaatttgcataaaactaatatcatgacttcaattttcagatccatggaaggcagatttaaaaaagttgaactagaattcccaaacaatccaactcaagtataatccaaaaaaaattacatcaatactatagtaaaatatttatcctggtatattttagttgttttccaaatttt

SEQ ID NO: 123988 - DNA, 870 bp, Cannabis sativa
actggattcaaatccaacaataaacaaaaaattataaaaaatttccaagttaacacaaaaacccaaattgttcggtgagggcatctatgtcacacaatactagtctataaaagggatgatcttgcaatctatttgaactagttctaaactaattactttgaatttttgatgtattagaaactggtttcaagtgtttattgtggattgttatattttgttcagagttttgttaaatattatggctaatatctagcaaaatattacttctccagtgtcacaccccacgtgtagacaagagcttggtgatataaggtataactactttgccagatctgctcttatagttttcctgagataatccttattatagtttttattagactcatttaaatattttagttaatatacgaattatattagattttataaaattgtaattacattggattttatttgtgacaaataatagacattatttgatttaataattatactctagaaatgttaaaaaaaaatagaaaatttaacatttataaattataacattaataaatagttattattaagaaattacaaataacataaaaatataattaaaaactatataattacattttaaaaatattattgaaatgaatataacacaaggaattataacattaaaaaatggttattattaaaaatatataacaatattaaaatgtaatatttcttcatatataacataataataataatgtaattaaaacttatctaattacattttgaaaatgttattaatgaatataacataaagaactataacacttaattaatgttaactatttataatatataacaccaaaataatgttataatatgctatttaat

SEQ ID NO: 123989 - DNA, 902 bp, Cannabis sativa
aagtttgtattttatagtgtttaatttgaaatttagaatttatagttgataattttgattgtatttgaatattgaagttgaaatttaaaatttacatatgagtatattgtttttattctattttttttaaaatattatttaattctttaatgtttatttaatttatatttattttttaacactaatttaaaccacaacccttttaatcctgaaaagcgtatattatacatttattttttcaaatcaattatttaaacaccaaacaataataaaaaaatatataaaatgaaaatcggtttaaacaggttaacccagccgaaccgataaaaattattgggcaagttacacttttttgtatttttttattgaccaagttataattaaatatttgcaatatataatatttatattgagttgataaaaatacattataacctgtacactgatcctttgtaaaatcatgcatgatcatattctgctattattaaataatataataagattgaaatgtgacaattaaataaaaagagtaattatttgtaattgtagctcttttaaatttaaagtgtgtaattaagtgagttattatacaaatttatcacgagactgaaagctatcaatattatataattgttagaagagattacaacactcatttaagtggtaattaaaataagtggaaaaacgttgggaattgaaagaagttacaaaaatttattcatgtgtatcctggaaaagtgtcagaccacatgttgtttgaagggtttttaagagaaatattgttggagactcatttttttttttgaagataacaagctgcaagagaaagaaaacaagaaaagcagcagcaaagaaggtgaaaaaccgtgtttttgcaaaatgtcagttatatataagaaaat

SEQ ID NO: 123990 - DNA, 807 bp, Cannabis sativa
ttactggttgtatgatctaaaacccgacacaagtgaatattggcgtaagctttgctactagaggaagagattcacggaggatgacataaaggcagctgggagtataggttaattcaaaactggtctattctataacagcttgcttgatcaaaatcactttcattgccatcgagctatatggagttctcttaacttaccaaagcacagatttgttctttgacaggtggttaactcccatttgttcacaaaggacaatatggctagaatgcacattccgttggagttgaacaagtgcccaatatgtgaagattgtgttgaaactcacgaacacttatttttctcctgctgtctttcccataaagtggttgagttagtgtttgactggcttggtaattgcatgtggccttcagattataaaggttggataagctgactgtctttgaacatggacaatttggtgagaaaaatcagtgtagcagctgctgccgctactttttattatctctggattaatcacaacaagtgtgtttttgaggggtacttgcataaggatactcgcattgttgctgatattaaaaatatagtgagttatagagttcaaattgtaaaaaaaattgaagattgaatagagtataaagcagttttttacagcttatacaaatgtaatttactagttgttgtgcttcggttaagggcagattggctcttttcttgattgtttgtattggttttgttcttgattaatgaaggattttccttcttgatcaaaaaaaaaaatagtttgtacacagttgcataatagttttt

SEQ ID NO: 123991 - DNA, 1483 bp, Cannabis sativa
tttttttaaataatttacctctataataataacatatgatttttttattatttttttttaaataaatttacatacaatctttaactatatttattatacgtgcaacgcacgtcccaaaactaatattcatataagctgttatcaaaaaaagaaaatattcatttaaggagcggggaagtaatattgagtaaataaaagggtccacctttaaatttcatttttggaatgacattctttatctttatgttaaaggacgaaaaggactaagatagtaatgtttgtaaaatgcatatacatgtgccaattgccaaaaataccaatatatataaccaaatcatattaggactacttttcttcctaataaacaaacaactctttttataagcaccacgattagcgacccaactatttcattgttttttttttaagttattttaagttaaaaaaaaaatatattagggaagggaagtttgaacttaaataaaacattattgagcacttattcattccaaagtgagtaatgtacgtacatacaaagagaatgcattcaattaggggtgtttgcggtgcgggtgttgcgagttatagcaatttttttaaattaaattgcatatgcagtttttgtaatttttaaaatcgcaaccacaccgtgagattttaaaactgcaaaaaccacactgtgaaaatccaatgtggtgcagtacgatttaagcggtttacactatcatcattatcaaatattataatgaaaatttaaaaataaaactaataaatctttaacaatacaaaataaaaaaatttattaaaattttcacatcataacatatataataatcatcaagtcattatattaaattgtatctaaaaaataaaataatatacacatacattttatatatatttgttcttatatgaaaaaaagaataaaaaaaatatattctaaaaattagtacttttataatatatagtgcggtgtggtttgaattgcaaatattaaatccaaaaccgcaaatccaccgtaccgcgtagtttggcaaaaatgcaaactgtaacaaatccaccattcactcattattgagttaaattttgtttgtcttatttcaattgaggtcatgtttgattttagttttgaattgtatttcttggacattgttactgctgtaacaacttgttttgagggtgaggattcaccacaaatggtatcagagctcagggtttagagttcaagaatcacattcaactaatcaagactcatcttcaacatttcaagaatcaaactcgaactttcaagaatcagattcaagcaatcaagaactggttttaatggcttcagcaaggtttgaggtggacaagttcaatggttcaaatgatttcagcctatgaagaattaaaataaaggcttttctagttcaccaagggatctatgaggcacttgatgatgaagccatgaaattaattgaagacaacaagaagaaacttgaga

SEQ ID NO: 123992 - DNA, 1684 bp, Cannabis sativa
agggcataaaacccaacaattcagctattctgttgggcttggagcccaatttgcagtccatctttgttgtccatgtgcaagagtgtccagtgaggcctatagagcatcccttggctggccaagccttgtggtggccaggtaagctggccatggtaatgtcttagggttggctggccacctgagagagggagctggtttgtcacttgatccatatttgagtgacggggttttcgtttgctcgggtgctgacttggccttccttttagtgagttgtactgccacatcatgaggacaaaaattaggataacatatatttaggtttttaaaataattttaattaactaactatgagataagataaatgtgcatttaggttagtttaaaataatattataaaatacttttaaaaataagttataatcacttataactagttttccggaaaaataattaatttattatataataatataaatataaataactaccctatttattcaaaataaataattattcatcaaatattataagtttataataaattttcaaaaaatattattctaatatatttttaaaatatatcaccaattacttttcaaaaaatattacttttatgtggatgtatatcatttttataaaatataatttaaaaataaaataaaataaaatatctagatatttgtttatttgaaaaaaaaataataaatatataccaaaaataataaaactacttttttgaaaaaaaaaattattttaacatgttaaaataaaaggataatgcacatatcaaaatatcccatatttttagttttatttttttaattaataatctaattattaaaataaataaattaatatatatacacgcatatacatatatatacgaatgtggccgaccttttagctgttaatggtggtggcagagttggtggtcttcgaccaccttggtcaacttgggaaggaagaggtcggtggttcgtcggtggttcaccagcggtggtggaggagctcacaaaactaagctacgtttatggctccaaaaagtcgaaggactcgaatgctcctccaaggagcttcgatggccaaggaccaccattgtcttccttactgctcgttgacatcgaccttgggcccttcaaggccagtcaacacaacctactctggccacagaatcgttgggtccctttggtggcctttggttcaacccgaacccaagttcagtttctcctacttttgtccacatgcataggctacatgggtcacatgcacacatgtaaatcacgtgtttcaacccttttgagcctcatgtcctgcatctgtaaccctttgggatttgtggctcatcatttgatgttcaaaactcatcatctcgatgaggttggggtatactgcttaaacccgagcccactcataaatagaggtattgtggatttttaatattacaatttttgacaaaaaattacaaataaaaattacatcaaaacctataccacaaatgtagtgtacaatttttctagtaaaattgtgaaattcctaacataaatttataataaaattaacgattcacatttatgcataaaaaatttaattccatctgttgaccgaaattttcggcaaccaataaaataataataatttagagagctgtcagaaagtaagaaggagattttttacgtggttgggg

SEQ ID NO: 123993 - DNA, 1240 bp, Cannabis sativa
  modified_base (1014)..(1033): a, c, t, g, unknown or other
ttaaacaagtttagactccctctaaatttttgccgcaatcctttgtaattcacttcacgaatctaatttcaacacaccatcaaacaacgaacttccttcgtctttaatgtgtgagtgcttacttcctctcgaagtaaagcttgaactagtcttctaccaaagacctttctcttgttcaattaagttattccactaatcataagagcagtataagaacaaaaacataaacactaaaacctagctgaacaattaggttctcacaaaaagaacactttgctcacaaaagaaaatatgtaaaaatgaaaaccagaaaaggtgaatcgatttgctactctctaggttctatttatagattatagcaaccatatagacaaccacaaaatcgatttcacaactgtacaatactttcctaagaaattcttgatttgtagcattagaatcagactctgaagcaagagatgaggactagaaaggaaacttatcaaaatggagcacgatcatgaatatggacttcaaacctaccaaatacattgtgtgtgatctgatcttatcaagactcaaccgaaattattaaagtgaaagagcaaagtcaaacattccaaataaaaataactttccataagagaattatttctcttagaagaagtttcctaaataagaaagtagccaactgaaaatgaatattttcttagaagaaaattagcaataaatgcacgaaattaatgtaatcaaaaaagttcaattacacaaaaaaaattacatattaaataaaaggacttcacaaaatttttacctctacaacgacaagcccaaaacatacgacacgacatattaaaaataataataatatatgaatttattaattataaataaattaaaataataataaaatttaaatataatactaaatattataattatataattaaaactattaatacatgaaacattaagattatatattaatttatttaaagggtgtgatatacaaatttgagtatttataagtaaatnnnnnnnnnnnnnnnnnnnnaataatttttttatatgattatttgtaaaatattattcaaaagttatataaatataactactaaagtcagggccgaccctgagttgaaatgggtcataggcaaaaaaaaaaaatttgggctcactataaagatagatggtatttttaaaaattattaaaaaaaatatgtatattttttaaaggatatttttttagggaaatttacat

SEQ ID NO: 123994 - DNA, 559 bp, Cannabis sativa
ctctctctctctctctctaagctttcactctctacaagtcccccaccgtctctctttcagaaactctctctcaatctctctctttgcgactcagatttaccctaaacttagccatccatatccaccaccattccctttccctaaacctagccgccgtaaagctctacctaagctgtgaagctccacccaaggaacccaagttttctcccagccagttgcgagcttaggtcagtcacgtaattattgttagcttcaaggaaggcaacactgtcacccaggtcaacacccagattaccaatgcatgtgatgttattcaagtgagatattattgtgtaaggggattcggttgatgtttcagggacgatgattgggaaagggtatcacggtggtatgaaacaaaaatacttgtaaaggggtctgatgacttatggattgaaaacccatagtgtactaccctagaattatgaaatggattagcaaaaccttaactagataattatgaataattgagaaattatattattatataatttagtatatgagaatttatatgatttat

SEQ ID NO: 123995 - DNA, 665 bp, Cannabis sativa
  modified_base (615)..(617): a, c, t, g, unknown or other
atgtccttttcttgattatcactgataaaatttcctttgtactttctgttcacctatggtcaagtaggccaaaatcctagtttaaaaaacttaggtcctttactcgactggttctgttgactggtttatctttcagtataagtgttgtgaaaattaatgtgcaagtgtacacagttcaaacaagcaataaaataataagtaataataagtatagaatatgtctcaagtaaaatttagtgtaaaactaattatttaagaaaataaattgattggaggttgtgaactgaaataaaataaacaaaatgaaaatatgcttaaaagtgaccacaattgctagagaaatgacatcaagaaagagttatcaatggaaaattggacttgaagagctaaaatcctcctattttgaaaaatgtctagaatgctatagcatcacttcaacaaattgcacgaagttaactagaattctcaaaaagctcatgagattttttcgaaactcatggataaagctcttccacctagttaaatatattcttatatcaaatcggaattaataacacaattcaaagtaccaattctcaaaagttatggaaggtaagtgtgacagtcagtagtccnnngatccgtaaggggaaatactgggtaagctgtgcaatcccacatcgcct

SEQ ID NO: 123996 - DNA, 843 bp, Cannabis sativa
tattctatcggtaattcgttccaattttactgtatttaatttcggtataacaattttcgttttgagagcttttggatccgagcaccagtgaagagaagacatcaaccccgtcgcctgagaagaagtcgtcgcctgagaagaataaaaacgatgggagttcagttttagggctttggtttatttttagtagtgaaaattacagggattttataaatgacgatgatgaacagtttcgcacgtgccaatataattgtgttcgccattgataaacgaaattggaaaaatcaagtggccatagctgggtcgtgagtgtgtgttggaggtcctcggttcgagtcccaggtaaaacagtattgtaatatataaacacttaaataaaaaaaaaagtttgagtgagagaatatatatatatatatattatgagacacgattttgtcccgtgatatacttttacggaatgtattctgtggtacattagatgagtttcgttaccattttttaatcctaattacccctagatcaaccccagccctcagatcaaataactctcccatctaacgactgtcgtacatcacggattacattccgtgaaagtacatcacgggacaaaatcttgtccctatatattatatatatttatagaaatatttttaattagttattattatttatttacattactaatgtcgttgtcttgtcgttttgacatgtctggtatgtgatttttgttgttgagtggtgtgtgatttttgcgagttatgagtttgttaagttggaattgtcgtaggcttggaaacccccaggttgttcaattccttgaagaaatagtttttcaaaagagac

SEQ ID NO: 123997 - DNA, 3543 bp, Cannabis sativa
  modified_base (37)..(38): a, c, t, g, unknown or other
  modified_base (3100)..(3102): a, c, t, g, unknown or other
  modified_base (3380)..(3384): a, c, t, g, unknown or other
gctcttccgatcttgattatatgaaatgagttttatnnagggcataaaacccaacacgaaggtcatccatctccattatccttctattgacatggaagagaataaaagacagatgggactccacatcattgtggattctgttattacgctccctccaaatcttttcgaagataatcgcggccccctccaggaagacattgaaatttatcccacttggatagtttgtgtccaccttaaaccaagctagccaagagtcccaatcatagatacttgggctatcggttctcaaatgctatacgcagccaaaccacagtgctctagcaaagtgacaattccagaagagatgcagggaatcctcaaccaccagggagcacataggacattcagtgtcccgaatgtagaacatggagagcaatttactcctagtgaggaggttattggagagaattttccaccagagcatctttagtctattgtggatgtgagatccccaaataattctccattttgcattgttggaatccaatgcatcgacatttttaaccacccgatatgctgactttatagagaagtggccactgtgatcagggagccacatccaagagtccgcggaggggatactaggaagagtaatattgagaattctcttggcgtcatcatgattaaaccatcttttgatcaggtcttcttgccactgattctttcgaataaagtaactaactaagctcacaccttccgtagcatccaaacagggatgaggttggagaacaccattgggaacccatggatggaaccaaatcgacgtagcgtttccattgttgatcttgcgacatactcctttggttaagaggcttctcgaatttagaattgctttccatagtatcgaatcggaacctcgtacatggagatccaagaaatcgtgatcctttatatatttatcattgagaactctactccacaggctactattttcagttagagctttccatgcccatttcataaggaaagccaggttgatggcttccgtagtgtgaaaccccagcccaccgcagaccttaggatgacataaaacctcccaggcagtggtgtgcatcgaatgtcttccatcaagatcgccccaccagaaatccctaagagccttatcaatcttttttgcaatggaaatgggtatgacatccgacgaaaccacgtagtttgaaatggcagaacccacggacctgatgaggcatgactttccaacgcttgatagtaatttggctttccaaccttggacccgatttagcaccctttccacaatgaattcagcgtctttggttcattttgatgatctaaagagcggtatacccaagtaagaagcattagtagacattctcttcattccaaggaattgagaaatagcatgagtcctagcccgagggacccctctagtgaacgttacggatgatttttgaaggttgatagattggctcgaccaactgcagtacttcttgaggcagtccatgaatgctttggcctccttcaaagtagcttggccaaacaaaattatgtcgtccgcaaacatgaggtggttgactggcatacagtgtcgtcccattttgaacccctttaggaggcctttactctccatctgcaagaagagtctcgataaagtttcagcggcaatgataaagagggagggagaaagaggttccccttgctcaagcccctagaaggattgaattttgccatcaccaaaccattaagaagcagttttatctcctttacagatatgcaagccttgacccaattaatgaacggtgaaaggaagctgagggaagataggactgagatgatgaagttccaatctagcttataataggctttttccatgtcaatctttatcatcatgaagcctctcgatccccgtttcttcttcatggagtgaactctccctcgcaatcatagtattttcagcgatactccggcctttgacaaaggctatctgattaggaaaaattattctgggcagtaagtgtctcattcggttagcaaggatcttggatattattttgtaagagacattacataaggctatcggtctaaagtcttttatgtacgcagggccctccttcttcgggatgaggacaaaggaagtgtcattgatgaaatggggcaactctccatggttaaagaagtacaacaccatttcgatcaggtccttgcttacagtgtcccaataatgagagtaaaaactgggggggaggccatccggaccgggagctttatcatgtcccatttcattcagcgccgtagagatctcttcaacagaggggattgcgctgagatcacagcaatcctgagctgagatacatggttcaagaatactagtagaggggggtatcattgtcgtagcattttggccaaacagctccttgtagttctcaataaagacttcagcgatttccttttgatctcttgtccaggctccatcatcgctcttctttatacactgaatatagtttcttctacgtctgatagccgttgatgccatgaagaatttagagcacatgacccctttctgtaaccattgaactcttgatttttgtttccagtggatctcctctcttagaagagcttcgttgaggtcttgtttggccttatggatggacatgagatcattcgggttacgttcttctgcttcttacagggccgatgtagctgaattgacttgatattgtatagttttgaactgttttttattccaagaactgagcttacgacaagtatgctttatctttctatgaaagttaaccaaaggattaaggtggagtctttttgcccatgcctcttggaccatccagaaacaacgtttaacgcgagcccacatgtagtatgcttattcttcaatttagtttaaggtaaatgttcaatgtatttaaaatttctagatattgaattaattatttattttaattacactatctatataaagcatgcatgaactagttagtagtacacctttttaacataattaacataattatatattttttttatcacaccatcaacaacattagcaaggtatgtgttttttattcatatatgtatataatattattgnnncattattatattttttattcagtgttgggaaccccaaaaatgtcccccacaactcaaatcgagcccaaactctaccatactctctagaacacctgcatatactatactaaatctatttcaagcaactgaacacatcaaatagctcataaattaaaaacatcattagagagccaacttaagctctcgaactttcaagtttgagtaatctgtagcacaactagctatctcagcacaaaatcaactaaaataaacatatcgtaaccccagaattcaaaccnnnnntagctgcacactacagaacctcaaatcactaaaatcatgcaataaacctatctggagctaaagaaaaccataaagaagaaggctaagcattataccttgaattggacctcctatttctgattgaaaactctttaattgcaacaagggtagtttagtcat

SEQ ID NO: 123998 - DNA, 1023 bp, Cannabis sativa
agtttcctcatgtggggtattaacattttctgggttttcagccatgagggaggtggtttttcttcaaaagaaaggagggttttttctaagctttttcacagttatggccttaataaagatcctagggcctggaatcaaactctcaaagacactcttactcaatggggtttttgtccatcaaagtttgataactctctattcatttatggttcaggaaaccaactaatcattttgatggtatatgttgatgactttcttatcacacgccctaatttgactcacatcaacaagttcatctctgacctacaccaatcattttcccttaaagatcttggtaatgtccactacttcgtaggagtagaaatattcagagatcccactgggatgtacctatctcaaactaaatacatcactgaccttcttgtcaagttgaaaatggagggggcaaaaccttgtttgtatcccaccagtgccagcacaaactgtacctttcagatggtgaaccccttgaagacaaaactttcaatagaagtacacttgttgcactacagtatctcactctcacaagacctgatgtttcttacatcatcaacaaacttactcaattaattcatgctcccacttcaacacattgggaagcttgcaaaagacttatgagatacctcaaaggaacaatttcacatggcttgcatttaactcctgcaacttctttcacaatttaagggtattttgatgtagattgagcatcatgtattgatgatagaaacagcacaggtagatatgtcatgtttttttggagggaacattctatcatggtctgccaagaagcaacatgttttggctcgatctagctttgaaagtgaattcagggcacttgctaatgctgttgctgagataaaatggctagtttccttgctatatgagttgcacatttagcaacctcattgtcctttattatgggttgacaatcaaagtgcagctgctattgcagctaatccagtctttcatgctagatcaaagcat

SEQ ID NO: 123999 - DNA, 808 bp, Cannabis sativa
atatccctaacctaacttgtcaaataatccataatcgagcttagaatacgttatatcttttcaatgttattaaattaagctacgataatgaatacactagagtaggaagctttgtgggaaagcaagaagtcagaaaagaattaagttgtagttcttgtcaaaattaataataaataaaaagaaaaacaatataaatagtgaattaataataatagaccaattattccattttataatattgtatgtcacatacgtgcttcctattcctttcctttatttctttttttccaggcactctatcttgcaagaatattttcttgaaattgtattaagaagaaaagaaaatgctacgtgtgcagctagaagcataaattccaattaaattaaattctattatttggttaaaaatagggataaattatctggaaatattttctttacagtttggcacaaaaaaggcaccgaaagatagagttagccagactttctagcatatatataaataccctgtaaggagagaatttaatttcccattgaatatatatgtatatttaaaaacttaataatatattttggttgaaaagctttttggcaattaactaataagttaagcaactataatgaaacgagtatcaaacctgtcaaggaaagttattgggtgtgtgctattactggatttactctaaaagcaattattaataaatccaaagcaaattcaaagttgagcatgcatatgcatgataaagtttttgctagttattcttgagaattatggggttccatctcaaaaccaattggcaatgagtgg

SEQ ID NO: 124000 - DNA, 2181 bp, Cannabis sativa
ggatgcaacaaaattctatagatttcacaaggacattgggcatacaacggatgaatgccgttagttgaaagacgagatagagagcctcaacttgcgtggctactttcaacagtatgtaaagcgacaaggcaatggacaaaaccatccaaatctaaccaataacccaagcaatcaaagattacaacttccttctcttaagggaaaggacaatctggttatctcgggagggccgcatctcgatggagaaagaagcaatgcccaaaagagatatgttaaggacatcaagaatgaccggtcatcttttgctccagaaccgtcaaagaaatctaagattgaggaacctccaattgtattctcggaggaagacacaaaacatgtgaggtaccatcatgtcgatccgctcgtgattgcaatcaaacttgccaacaagagaataaagagggtgtaggtggataatgaaagttaagtgaatatcctttacaaggatgcattgaaaaaaatgggattgcaaaatgagaagttaaaaccttgcatggtgagtttgtgcagattcactggggacattgtcgccagtcaaggaattatcgaactcccattaacatttggcgagccgcctatatccacaacattgatgcaagattttcgagttgttgacttgccatcgacctacaacatattgttgggtcgtcctgaacttattggactaggggtagttagttcaattaagcacatgtctttaaagtttcaaataccggcaggtgtaggtgtagtgcaaggtgaccaactacttgctcgggaatgctattgcataaagctgcagaataaaaaggccgaccatcaattcatcacagtcataacagggaatagccagaaacagaacaaggatatagatcctcaagttcaagatgaaaagaacctattaaaactaatcgaggaattggaggaagttattctagatccagagaatcccacaaagtgtgtatgataggaattgggaaaatctggatgaaaaactaaaataacaactaataaattttctgaaggcatactaggatcagttttcctggagccacttagatatgatagggattgaccctaaagctatctgtcaccacctgaatatcgacctaaattatccaccaaagaggaaaaaaagacggcccttggattcggaaagacaaggggaattcaaagaggaagtggataagttgttgactaacaactttatacgggaggcattttaccccttgttgatatctaatcctgtccttgtcccgaaaccaaatagaacttggagaacttgtatcgacttttcagacttaaacaaagcgtgtccaaaggattgctttccactaccaaggatcaaccagttagtggatgcaactactggacacgagcttatgacgttcatggacgcatattctgggtataacaagattaaaatgcatgtccctgatcaagaacatacaagcttcgtgaccaacatgggactttattgttataaagtcatgccttttggtttgaagaatgctggggcaacgtatcaacgactagtgaatgaaatgtttgaaaagcaaatatgaaggaacatagaggtctacgtcgatgatatgttggtgaagtcaataaaaagtggagaccacgcaaaagaactcgcaaagtgctttgaaatactaaaaaagtacaatatgaaactcaattcaaagaagtgttcctttcgagtttcctcaggaaaatttctgggattcatagtcaacgcgaggggcatcaaggagaatcctaaaaaaattaaggcattgatagatatgccgttaccaacaaaaccgagggaagtataggccttaacaggaagaatggcagctctaaacagattcatctcaaaaacaactgacaagtgcctaccattcttcaatgtgttgcaaggcaacaagaagttcaaatggacagatgagtgcgaggaagccttcggaaacataaagaaacatctgtcaacccctccagttttggccaaaccgataactggagagacttaatttatctacttggctatcttagagaatgcaattagtgcatcactagtgcgagaagagagaaagcaccaacaaccaatttactatgttagtaaaaggttactagggccagaatctaggtatccctctcttgaaaaacttgccctatgcc

SEQ ID NO: 124001 - DNA, 2144 bp, Cannabis sativa
atagttatacacttataattatatataatatgtttatctatagaattgaattttgttgttgcatattttatgagtgatatagaaactaacatctagtactaaggcaatcaagaatacttcgttacatttatcaatactttcccaatacttatcatacttctccttcatgctcttagccaggctcactaataggtcttcgttttctgcaagagacaacttatataaatgttgttgtattccactaatcgtaatgaaatatttatttgaagtgacatatgttgagtcactaaacttcacgatgacttcgtggaaagctcccaagaattgtacaaagacctttgcattctcccaatctaattcaataggtggcccgtctttcttgtttccatctttgtcaacctcatcaaaataagccctgtagttcaaatctttcaacaaactcttgaaagcatccttgaattttaaagcagtcttaagcataagaaaagtagaattccaccttgttgggacatctaatttcaagtcccttgcattcaatattagccttctcaacttgctctttaacattttcaacctggcaggggaagacctcacatatctcacgacatttcttatagctaaaattgaatgactattttcttttagactttcaacaacaatcaaattgatgatgtgagcacaacatctcatgtgtaaaaatttcccatttaatatgagaccatttgccatttcactatacttctgccgaaagctacaaataacatcagtcgaagaagcattgtcaattgtgattgcaaataatttagtaatgccccattcatccaaagactcatgaatgtgtttcacaattgtatctcccttgtgatcttcaactatacaaaatgtgataattcttttttgatagttgaaatcatcatcgacccaatatgccgttatcaccatataattcaagttctgaattgatgtccatgtgtcagtagtgatggacaccctttgatgtttcaaaatattcttcaacttttccttttcttcacaaaaattcttgagaacatcccttgcaatagtaattctagaagggatttcaaatctaggttgcaaggttcgaacaaattctttgaaaccttctccctcgacgtgtcgaaaaggcaactcatcaactgcaatataccttgccacaataactctacatgcttctttgttgtaagcaactgtaactaaatttttttctccttctttaagcgtctcgaaacttaacaccttctgcttattttcattatttttacacgagcttcgcctacaagattttcgatagtaattgtttaattgagtcgtatcgttgctagtaggacaagagaactcattgtcgcagtaaatgcactcacacttaggagtttcattctcatctttaggatcatctttagataacttttcaaagtgattccaaacatgtgatgtttttcttccttcaggagattttttccttgctcttgatttcttcatccttttcttgtcccttgtttcattctcgttgtcattggcagatggtgatgatccaaattcattagtatcttctatatcgaccattttttaaatctgaaaaataaacaaataacaatacaatatatatttaatatataaaaatagtaatccaaccaatcactatagtacagttaatcacagaacctacttcactacgaacaaatatataaaatattcaaacacctctaacatatatttctacgttcactcagtacaagtacagttaatcagataacttacttcactatggatgaacacgtaagatattcaaactcctctaacaatttataaataattttaattttttaatacaccgaccaacaaataattaagtatcaaactgtaatcacaactttccaataataacataatctgttaaaaatgtagtatttcagagagaatttaaccaaaaaaaatacacaaatttaactctaatctaactactaattctaataattttaataatatttgcatgtaaaaaaaattaaaaaaacataatatatttttttttttgtaaaaaccgtacatataattatatattatttttattttttctttatcatataatatatatattttctatctgtttaaactaaaaataattt

SEQ ID NO: 124002 - DNA, 677 bp, Cannabis sativa
tgaattaaatttttcatatatatcaatttttttattttcatatttttgtaaatagcagtttatttttttccacaaaattgctcctacttgatttgtaatgttttattattattattatattgcatcgtaatgtacaagatttatttattaaaaaaggctgctgcaaaatatgtgtatttttttttaaaaaaaataagaattggaaaaggcagcacattcccatcagacagtgacatggtttgttctgctgtctctgtagcaaccttggttgaaatctcaaaaccctaccaaactaaacaactaagtactgcactcccacataaacacacaaatcccacgtacaaaatatcttattcaatacttattataattgcaaccttccttcctatgagttgtatcgttggttgagactttgattgaggagagagagaaaaagaaaaaatataatacaaatcaaatgtgtgacttttttttgtttttaattctattttattattcttatgcagtattccttgctgttgaatgaatcatgattaatatgtgatatattttgtttgaacttttttaattttattatataaaatatatagttttgttttggggagggaagaaattgctggtgatgggccatggcaatccacatttcacacccaccttttattctctctctctctctc

SEQ ID NO: 124003 - DNA, 1049 bp, Cannabis sativa
ttctttatataaaatatctataaatatctatataatttttatttatctatataatttttattttaaattttattttaaatatatataataatattataaaattaataaagaatagtctattaaataataggatattatattaaagttaacttagaaacccaaaaaatattattaaactaagaattccgttatatagttacattttatataaaatagatgtatggtaacatttaagtattgaaatactagcctagaatatatggttattaggagagaccaatcaaattggttgaatttgctccgcttttattttattttatttttatctttttattttaatttattttattttattgaaataaaaatgtttttttttattaaaaggtaaaaatgttaatatttgtagttcatgccaatgccaaaagacaattagtttcagtgaattattgggttgtgcttttgtagtctagagatagtcatagagtagcagtagtagtaaagtcaataaacaaaagaaagaaagtaaagaagaagaaaccatgcaaataatttttgctactttgttgtgcaaaagttcaattcactgcatgatcatgttttgaacaaaaaattgtttcattaaaattagcaagcaatgattgtgacatttttcagtgacatgtggagctggtcaaggattgtaataataataaataacttcattggagatgggattttgttatattattaacatctataaggataatggaatatgctttccagtcttcaactggggaaaaatagtttattagtacccactttttatctcacattggataataggaatatttttaattatttatttatttcagggtggaacctttaggtctaagatatacatatttatttatgtataatattagtccccataacctcacctaacaaggtttaattaaactacaatttaaagcataattggatcagctctatggtaactactgactggtttgtaataggaatggcaaatggggcgggtctgccccgccccgcttctgacccgccccgccccg

SEQ ID NO: 124004 - DNA, 558 bp, Cannabis sativa
gttagatggaagaaactacagagcatatgttcttcgtttgttcaaaaaatgcaaactgcctcgtggctcttaaaatttagctgcaatggaggtcttcggcgcaaacagttggagacatagtcaaatggcggttagtgttgctctcatttacaacatttggtgtggtaggaatgacaaatattagagcctaaataatcatactattgagtagatcatacaatgtacaaagagttttgtcaaaggtagagaatagtattattaataaaattttatttgtttattggggtttatgttctatagtaaattttatttgtttattggggtttattgaaattaatttatttgtttattggggtttattgaaattaatttttaccattttttatttgtattttttattttcaccagcgcttgcatttgcgcatgcaaattaatgttcatatttgcaatattttaattttatttgttattttgaaattttatattttatattttttttaagcggacaaattttatatttgtttcaatatttttatagtaacattatttcacaattta

SEQ ID NO: 124005 - DNA, 819 bp, Cannabis sativa
atatatctccatctaagactaaccagcaccaaacaactgaaattttaatgaatttagactacactttgatctgttgtacaactagtcttttagtattagaactcactaatttatttcaaaatattgtgatcacatgataatgacttaaaattaaacctgtaatatattttttttgtcttgttctacaggaacctatcatgtttgaagttcttgatcaataatgcttttgtgtaatggtcagaaacaaatgcatagctcgttgaaaattgtatgtgcaactaagctatatgcttttgcattgcaacttgttatcacattgaaaatttgaaataacctttttttttcattcacattctcattaaaataattttgctctcaaaagaaaaatcgaatatggcttgttattttatttcatttattataaggatataaacaaatatgattggggttactttttataataagaataaaagattcatggtttagtgattccattacttaatattcttcgaaatacaatgatttagtaaaagatttatcaagtagttttgagttagaaaggcataacatggaattcctctactgtattctcaggcatcacagttttgaaagattctgggtttggtatattatattatattgtattgtgttagatgagactgtattgtattgtgtaatattttttgtgtaatttgcagttaaattatttatacttttcaaagcgtctaatacttttcactagagaaactgtaggaaaacatgttctcctgcctaaaatgtaatgtctctgcgcttcggatcagcataacttttctgtct

SEQ ID NO: 124006 - DNA, 2683 bp, Cannabis sativa
tattaataaaatttttattattaatagttatcttattattttttagccattcagaaatttgtatttttaaggtatttgaccaacttcgagtaccctaaaatacccaaaatactctggtatttctaaaatcaacttatcccaataattctattaatatttttaactaaaaccgttgtgacatctaatggcaaagctagcactggagccgtaatcaatcactgcttcaattcttgaaaactagtttcacacttgcctatccttgtatactattgattttcttaattaacttaattaagagcatggagattttagaaaacctttccatgagttgtcagtagtacccaacttaacctagaaaattctaattttgttaactgtcttcggtcttgaccaatccctaatagatttaatctttcgggtcgaccataattttatctttactagcaatacaatctaggaaagacactaggaataaacaaaattcatactttttgaaattgatataaagtttatgctgtggtaatcactacaaaaccatccgtagatgtcgttcatgctacgcttttgattgagagtatacaaggatatcattaataaatactataacaaatatatcgaagaaatccttgaacactccagtcatcaggtccatgaaggctgctagagcattggttagtccaaaagacatagccaaacctaatacgaaaggcagtctttagaatgtcatcctctcaaattcttaactgatgatagcccgagcgaaggtcaattttgctgaatactattttccccaaaactagttgaataaatcattgatcttaggcagagagtattgttcttgattgtcaatgtgtttaattcactatagttgatgcacatacaaaatgacccacctttctttttaacaaacaacactgaagcttcctaaggtgatacactaggttgattaaaccccaaatcaagcatcccctgtaattgtaacattaatttccttcagttctactggagccattctatagggtacctttgaaatcaattctgcttcaggtgccaaatcaataacaatatccatatcttgctgaggtgataatccaagaacttcttccagaacaaatccaaaaattttagtaccatttgaacatccttagaccaaactatgtcgggctaggtagcgtctaataccactgctaagaatcctatacatccaactcgtaataggcctctagcctttaacatagagatcactggagttcgagaaccccaaattgataccatagcacgaataattctttgacttcagattgaaaagttaccatccttcgctgacaattactactagtggcatctttaaaccaaaagtccattttgagtataatatcaaactctactatacccaatcttacaagatcaacactcaattccctattctcctcactaattgtcgtagacttccttttggagctaactaattctctatgaagtaacaaggttcttgaccctgtttcataattatttcaaggcctacccaatttatcaattatcttgaccactacatatgaatatgtagctctagaatcaaatcatacaaagtaaatatagtagttgactaaaagctgacctgacaccactgaaggactagcttcagcattgacttgggtagtcgcaaacaccaaaaatggagtgggtttcacctcttattccgattcccccttcatcagttgtgggtagtctttcttgaaatgccctaccagaccgcattgaaaacatgccttacagttgcactgtcctggatcatgcttcttacaacaagagcactccaaataagtatcgtgacttccaaggccaccttgacctggtttcctacaaaacttctttttctgacttgagcccaatgctgtcaaaagagccttctattggtttttatggtactaaattaggtacgcaacagatgagtttcgtattatctaattatcattgtaccatagcccaaaggatctccagctgtgtgtacattaaaattaaaacaataaaaataatgagttttgagtatacctcttgaagcctatccgggtatcctcaaaacttctcgtttgttgtatatgttaattcagttgatgaggaaattgcaatttgactcacacactcacatcagtatcttccaaatcaatctatcacacacaaggaatagtgtgggcttttaggataaattctataacctttgttcttattcagttctcaacacatgagcaagaacaattgagagaaaaaaaaaatttctttttctctgtatattacaaaaatttagtttagaaagagttttgatttctcaaattaggcttctatttataatagttaaatccctttaattaaattatatttaattgtttaaataaatatctataactgaattcagttactgatatttatgagggaatctctcaactacttgagaaaatatctcaacaaccttgaaatatctgtaactactttttaaattagatatttacctaattgaattaattaacccaaaagacaaattctgtagggatatcataatgctataggcgcctacccttttctttagggcaatgttggtgtcttttgtcctcacaacttttgtcttgacaaattttgtcttaacaatttttatttttttccctatttaattaattaaaaaaattat

SEQ ID NO: 124007 - DNA, 1483 bp, Cannabis sativa
  modified_base (1117)..(1122): a, c, t, g, unknown or other
ctgatgagggtgaagaacgatgattccctggttcgcacccctggttctcaaaaggtgatgagggagaagaagttgaccccctgaatcgcagaagagaaaggggagaagaatgggatattagtgttctcagataggtttggaatttaattttgtatttaatttaattttaagtgttgatgtttaattattttgtattcacacggttatataggatttttattattaattgattttgtaggaattagattttaagttttatgtgtttgttaattttgtaatttttttaatttaaaaaaaaaagttttatttaatttttaaataatatttaaagaaataatggttaaaaatataaaagtttgattatatttaatttttatgattttaaaattatttttaaacatttacatgatcatttaaatcataaataaaaatttaatgaaatgaaccaataaatgagtgacgcgtggacactaatttggcacttaacggttaggtacctacggaagtactaaaaacctaacagaaggtatttttaccgccaaaaaaagatttaagtatttaagtacaactcgaagttaaacttaagtattttcgccgcaaattactctaaatataaacagaatcgactccaaaaaaaaaaaataagtaaaacaaataacacataataacccaaaaaatatcttatcaaacttttaatgtcataatatatataataattaagttattgtattgaattctcgctaaaaaaaattatataatgtacatatatatatacattatatacacatcaataataatatgctaataataagaagttaacaaaaaactaaaaaatgagaataatttataagagtgttccttaaatttaattgtatgacttgatagttttgtaagcatatgagttgttcatatataaaaaagagaaattataatgtaaaatttaatatttttgtaatatataatgcggtgtaatttgaaccgcgattattaaattcaaaatcgcaaacaacaccacatcgcgcgcttggcgaaaacacaaattgcaacgcaccgcaaagaatttcaaaccgcactttttgttaggagtgttcactaagtatccgatccaatccaatcnnnnnnatccaatccaatccaattcgtaaattttaaaaagtaaccgatccaatccaatcagcacttaattatatatatttttaaacaactataatatataatatatattatttttttagtaatattaaaaaaagacataaacttctaatttcttaatcttttttagaaatatattgggttggtgtattttatttgttttataaaaaatacaaaaaaaaaatattcttattcacatagacagacacatgaatttaaatatgaatactcacttatttattttagtaatgaatacatatatattttagtgtaaatctaaagattagtacatatatgtgagtttgatttatatataaatggagatgaaaat

SEQ ID NO: 124008 - DNA, 684 bp, Cannabis sativa
tattattattaagccgaaagcctaaagtttattattaattttatcaaacattcctattgtaaatttgcaattttacaattttttatttttttttaccatatggtaccatccatgcatgaaaataatgtattttgtttggtagtgatctaggtatacgggtagtaatagtatcatgtaccatatatggggacaactggggcaataatccatctctctactttattaaacttttttccatattcaaaaaatgaacttttcatatatatattaaaaataaaaacaatttctgattggtaaggtagtgaagataaacttatatataaaatatattaaaggtgcttttttgttagaaaataatgtgtgaaaacttgtgctgtagaaattagactgccactactgtccctgtttgtgttgtgtgacatgaatgggttttttccctttaacaaaagctaactctctttgggccactcctcctctgtgccctacaaatctggcattttttggacctttcctttgctatatattaaatcatatataaagagaaataacaagacatgaaatgaaattaatatataaagatgttaatatattatatgagatatgattttgttctgttattgtacttttacggattgtaatctgtgatgtacggcagccgtcagatgagggaggtatttgatctga

SEQ ID NO: 124009 - DNA, 1373 bp, Cannabis sativa
aactgtgcttgcacagaaggatctcttgttgtggggaccttattgacttgccctccttggggaggctgtaaattttgaaaacataggggttgactagccataccctgggagagtgtatgttgaagatcagccaggccctacagacccttgccggccattcccaagtatgagagtttctctaagctggttaggcctacacaaagttgctaagcttggacggctagacctccattaggcaggatttggctgccgcatactcctccatggtcgaccgaacctgcaaaggataaggtcttgttgcctgtgatacttcctttgccggctagacctgcattgggcaaggtctgaccactcgtgactccacaatcttccagtgttcgctgtgtgtttattggggatagatctcacaaattgttggaggacggtggatctagatgactaaagtgatcgatttcacttcttgaatcgtcgttttgggtgttttcacccactctcgatcgtcatcgatcgaagatcaacctttgcgcacctccctccccttagggaggaagtgatttactcaagccgaccatgagtattccttttggtggctggccgcccagtggctgcacaacggggggtgctactgagccagaaatccctagctagccccccatgctactggttatcgagatctgactgttctcattgtttgacttgtgaggaaaggtttgtcctccctctggctggggaagatctgtcctagttcttgagaaacttggcgacaatcttgcatcgagtgattctctaaagagatcatggcctcttttgtttgtttttgattgagctgtcttattagattgttggcctcccagttgcgacgatctaattttgcttggtgagatcaaaggatgtactcctggtcatccatccatcacaggaacttgcatctttacttagcaaaaacatcgcaatcagtagcgcattgttctttagttaggcatgcatggcctacaacttccctgagtcttgccaattcaaggtcttctcctaggtctagatgaggctctccaattgttagctcactcactctcgggcctgtgtctccagcatgaaattgaagttaaggtctagtatttgttctaaagggttgtcgccctagggtccttcataatgttggaggtgccaatggtgggtctagtcttagaggcacgggcctgccgcttgggtgctcgtgttagttttgccacctgtagtggcaaaacttgtaacgcctattgtggtgatgggattcaacacatctgcggtattcatggggattccagttttgactagaatgcgagtccctatatttgtgatctgtgggtcttgagggagacccaaagatgcaaatg

SEQ ID NO: 124010 - DNA, 784 bp, Cannabis sativa
ttttctactctaataaatttttttacaaacaagttttcggtgtcacatattttacttgttgtgctggtggatattcacttgttgttgtatatgaaggttagtatgattttataatatgttactttagttctgaaaattaaaaatacttgttagtagagtttgaatattttatatattcatttataatgaagtaggttctgtgaaaaatataatgcgatcagatgagtgacatatattaatgtttaaactgttctgatattgtgtttgtagttttgtttgtagatattgaaaatttgggaatgatcaacttttaaggtgttatgctccgaatttagttattatttttttaaatacatattatcaattatttttttaaaaaaaaaaaattgttagaatatcactaatattatatatagataatatagttagtaaaataatggttgaaaagaaacaaaaagaaattatcagaataaaaattcaaattttaatactattttcaacaaattctagctttggtaattgttctagactttatttacaaatataccaaaactatgaatttatctaagctatggatcccaaagtaatgaggttaatttaatacaattcataatttttaaattgacaataaaagtttgtatgtggtaaaacaaaatagcataagacattgtaagatagcataaaataaaattcttatcttgatttaatctcttagttataaaccaaagataagataaaacaattgtgtttgtatttttacctagtgataattttttttcacgcg

SEQ ID NO: 124011 - DNA, 885 bp, Cannabis sativa
aaaattttagaattgggggttaattgtaaaaacctggccacttaaagaggttatgccgcaaattaccctttttttttaattccattcttatttgattattaattatttaggaccaagtgtagcccttagtttagtgttccagacttctttttataaagaggaggttctaaatttgaatctccctccccaatgtcaaatttttttttttattataatgtaaaatattaattagttaggaagtatatcgtttacaattttacttttagacataatattaagcaaataatttgaatccataaaaaacttacaataaatactgtgtaaaaatttaattaatatgtaaatttttgtgaaaatgaaaaagatttttcaattttatatttcaaagtaattctttttatatatatttttacgaatattaatatagcatctggtagaaaatttaactctaatataataggaattatcttgtgtaattccaacttcaatatcatacagataaatattaaatcaaaacattcaaatcaagaatcaaaattagcaaacacgtattaaaccataaagataaacatagatgcatctagatagcttccagacacaacaacccgagaattatactagttctgattctaagagcatcggtcggtttggtcggttcttttctatataaaaatccaaaattcagtttttagtctagattggtgcaatctaaaaaccgaccgatcaatccagaatctatcttaaaatcgaccattttgaacctcggtttggtcggtttaaacccgtaaaactgattttttttttaaaaaaaaagatccaatttattctataaatacattattctacattttacaactacaaatatacaaattaattgttcaaaaa

SEQ ID NO: 124012 - DNA, 1376 bp, Cannabis sativa
ctctctctctctctctctcgtcatggttttaaaatttttgcatgtggttcaaaccaaactaaaccacttaattatttatatatacttaatacaattttttttattgaatattgatatttaggaacaatcttaaggttaatattgttttaagaatatcaattttcattgttatttacatattataaattttaaagtaaaaaagttagtaaaaaagtagtaaaacatttacaaagtataaacagtggttttgaactaaatcagttcttaagtagattggtttgatgtggtttaagcatttaatttttctggtttggttaaaaaaaaaaaaatcagaccaaaccaatctatgagttctcctataattttgattaatttacaatcttgaatttcaaataaatatttttatatgtatttatcaaattaatatttttaaattatttattatttaatttaaaataaaaaataaaaattcaggacatgaaatataataacataagattatcaactttcatgtcgagcaaagttggacgtaatacaagcattcgagtatgtcccattattacgtccaacaatgttgtttttgcactaccctttaatggttctttatgtccaacatgaaaagaacgtgtcataaatgacatttttgtaataatgtttgtttcaaattctgttctaaatttattctttgtttttgttattatgttcttgattggcacttattgtttgcaaaataataaatttggatcaaactttaattttttaacagctcaatttttaagcagtgatgccaaacaccgacttcagaattaataataaaaatatatatcaataaattgaagtgcatatattttatatttcattcaagttagtaacttatttaatttatctatctatatccaactctttaaattttataatggaaaataaaaggtcatccaattaaaaacattggagattaacaagttagctcacctcagtgaaataaagaaaacaaaatgtttagagctcactaaagagaatataaatgagacgagtttagtttgttagatatatatataataatgtaacgacaaggtgttattgttaagatgtttgccttataattcttcattaataattaaaaaaaataatgctttccagtcaagtcattaacaaaattgcatagtaatgtaagtctaaacttacatgctaactaaagatacattcaacatatcaattttatttaaatttcattatataaaatgggattaaactcacttaacctgtgtcaagttaatatgctttgatagtaatttaaagaaatacccaccaacatttataaataaaagtgcctcaaaatttagagtcaagtttagagagagatagagagagagaga

SEQ ID NO: 124013 - DNA, 979 bp, Cannabis sativa
ttaaatagctaaattaagtataaaaatttaaaattctcttttattattcgtcattggatcaaaatctaatgattttatatttttaaagttaatatttatcgttaaagttgtttaataaacattgtccatcattgattaaatttaaaagtattaaatcatatataagaaaatgggctcctccactcatcaccaattggtttgagatggaatcccatgtttattgaagatgggtaataagaagcggtattccatatatatttttatgtatatattggtatgatccatgaatgagtattattagaataatttgttttcctatatttaattttgtaacgtaagtaaaaagatatttcttatttttacaatgtactattattatgataggggtgttcattcaggttgagagagataaaaaaaattgattttaattagtttatttttttaaataaataaatttctgataaaatataaaatagatatttatttaattaagcagctaaattaataataaaatcttaaattttttttgttattatttattattgaattaaaacctaataatttaatatttttgaaattaatatttgtaattatttttttaaataacagttgatgtttactatccatagaagtgttatacagtgcttatatatatatatattgaaattcatagatatttatatatttatatttaaaacttaggggtgttaatcaaaccgtctgcaccacaccacatcgcaaaaaaaaattcggtttgaaaattctttgcagttaggtcgcagtttgaatttttcttcaatcgtgcggtgcggtacggtttgcggttttgaattgttaatatgcggtttaaaccgcactacattgcacattataaaaaaggaaacttacaagaatactgtttttttaccaaatgttttcaaaaatactaggacatggcaaactttacatttttactgtccaagcccatttttatttcttt

SEQ ID NO: 124014 - DNA, 1281 bp, Cannabis sativa
  modified_base (1224)..(1232): a, c, t, g, unknown or other
attaaattataataataggccagagtttgatatcattctattatataataacagttggttgctttgaaactacttaacattcttctttttttttttttttaatcaggagatttattaattaataaactcgtttgaaacaatagaacgcacctcagaggaacaatccttcaactgaagcagacaacctgtaaagaaacaagagtctcttgccaagcaatgagccaacttgtttgcagatcgtttaacaaaacttaactcaacaaaagataaagacaaaagtaaattcctaacatcttgaacaataagactaacttgtgaggacataaaagttttactttggactgcttggacacacactaaactatccgtttctaacactacattgtcccagggatgagtcgcaatccaactcaaagcttctttgatacctatgatctcagcaatttcgggttgaacatacccaatctttcccttcttgaaagcttctgccatagttccacgatgatctcgagctacacagcccactccaaaccgcctctcttgttcaaataaagccccatcattatctttaatcttgtataacacaagtgcattccaacgctcacagttccacctcccatcattcaaaggagacaacgaaaagcccttcctatcctgagcaaatttatattgatcaagcacttaacattcttcctttatttctttctggtttggtcaaattaacatctaaatattggatgactggctatggattaatcgcaattgttttttgctctcaaaataatataattgaaccatcggcggtagtggtttcgttgggtgaggtggtggtggtagctactaccataggttaagtctctgaattttttttttatataaaataaaagtatctgggtttttttcttttaacaaaatggtggaaataaaaaaaaaataataactacatttttttttacagttagcaagagtatcatgtgtgggtagtgagtagaatatagatgagtaaaaaaataattgtgacctcatgataaaatacaacaaaaaattaccaccattagattaaaaataaaagattataaaaatatttttatttgtgagcaaaagtaatgctgtcaccgaataagttttttatatatgggactggtcttaggcatagacgggctaggcatgcgcctaaaaccaaggaataattacataaggcatcattttttgtaaaatatttannnnnnnnngttcaaagaatgttttttttacatgtttacggttttcctaaaaataaca

SEQ ID NO: 124015 - DNA, 1538 bp, Cannabis sativa
aattaatatttataattaaatttgtttagtaatcattcatggataatacccattaagaagtgttctatatatatatcttataaaataaatttaacatatataatacttacttaagacagttgacttatcaaaatgaatgaattactttaaaagaatacatctatgaataataactattattaggaaatatttttatattttttttttggttaatcaatgaaattcattactccaataacaatttacaacttattagcatcttcataattagaagacctgtttttctatcttgacattgatctcaaattataaacatacaattcagcaatctttgaacagttactaagttcaagggccaacaatagaaaaaaatagcaaaaaaaaaaaaaaactgctacagacttgtaaaccaatcggcctctacttgctgaatttttttttttggccaattacaaatcactctattcatcacagcttctttagtggcatgaatcacctgatcttgtgcaatcttccctgagttccacaacaagtcattgcgatttttccatatgttgtacactagagcagtcacgacagcagtaaagactgcttttcgaaacctgtttatcttgactctttccagccaccttaacagcttattcgaggctgttgtttcaactctccaacctagccaagttttaacttgagaaagacaaagaatggagaaggaacattggaaaaataaatgctctgaagtttcagattgagttttacagaacagacaatgatcttctccaataatattaaatttgtgcatttctctagttttaagtctgtcttggattgcaatctataaacaaaagctatgtctaggtgtgtttagtctatcccacacctcatggccccaataaactttgttttgagtggggcaaagggttttgtagccattagatatcttgtatttggttgctgcaaactgttgaatgtctataacagttttgatctgatttttgacagcattcaatttcctccaataccagcttgcttgaggtggagcttggtaatcccaccaatgctcctctttaatgtacatctaatccacagattattttccttatttgctattgcccacacatattttgtcatcgctgcaatattccattctgaatatgtataaaattcgcttaaatcgtagtttcgaaccaaacgaaactgttcttatttgttagatttggtttgagaaatttattggtctagtttttattatcttatttattatattaacaaattatccaatatatattattttacagtttgggatacagttgcaatacgacgaaaaaaaagacttgtcactgttacagtaagaatgcttaacaaaatattgatttcgcacattctctatgatttgaagattaagaatatttttttcatgtttaaataactattgaacactaatataggaataggaatgggaatgagaatgagaataggaatggaatggaataaaatttaaaatggataaaaaaaaattgataaaaaaataattaaatttt

SEQ ID NO: 124016 - DNA, 923 bp, Cannabis sativa
cgctcttccgatcttatatatatatgtgtgtgtgtgtgttttatgttttaaggaagggacctatatgtactttcattatagtttggggtaattttattggcaataccttacaagaagtgttttcatagattatttatctgtattggcatctcaaatatttttttaatataattttttttcataatcatatacgtagtaattatttaggatgatttataataaggttcaagcaattatttaacacgcatataaaaaaaataatttttgaaaactattcattaattttttaaaaattaacaaataattttaaataactactaaattacatattataaagagaaaaatgaactaaacttcaaacttttcttttatatataaactagggaatagattcaggctattattttaataattttttaaaatttacattatgaaattaattttagttacgaataaaattttaagtctaatacttttttaatgattttttatgaatattataaaattatataatatattatgtaaattatctcttttatttataattagcttaaaataattatatgataaagttatttataataattaaaagccattgaaaatataatctttttaaatgagtgagatattataatggtataggttttaaagtaattaaaaaatatatcatttttcttgtttagtcatttatagcaagcttaattttataatcatatatatttataatcatatatatatatatatttaaattaaatatttttatagagttaataagtataatactgacatagtttgtaaataatgtgggacacttacaaaaaataaaaaatatatatcatttagaagacatattataaaataaaaataatcataaaatgacatctcatttgatttatatttttctttatatacagaaaaaaaaa

SEQ ID NO: 124017 - DNA, 1312 bp, Cannabis sativa
tatatatattggtgtgtaccgtgtacgtagcaatatatttaaattcacaaatataaaagaaaaatgactaaaccaaaaaaataaattaggtggttatatatagttagtgattatgtgcagtacttttgccaaaaacgaaaggaaccctgcctaacgctgagttggctatagctgaagttataaggaattggatcaatggtcggcatacggtggttcttgagagacaaattattaattagtggtgattaattaaaattatttgcagttatttagtcataattaaactctcattttggttaattggttgttaattaatgattgtagacaattgattatttgtatgaacaaagtcttttcactgtatttatctccaagtcaaatttttagggggagtggtataattcgtaatgagtttatgtctatattgaaaattggagttgttttccatcaaaaaaattcttctgtttttctcactttaatattttctcttgtttaataggaaatctattaccatatatatgcctcataattaactacaacatttattattttttttttttttaatgaccttttggtttgtagaaagttttcattttatttgactaatttttggtctatatttagtgatcatatgacctggcactaaacatatagaaagtattactataaattaagtagcaaatgcaaataggcctttatatatatctttccacacagagtgacacaaataatatttagtcaaaaaatgcatggttaccattaaaccagtactgcattattatacgattcttttgagaactatatattctttttggtgaggcagacagccaaaaagaaaagccattgacgaagactctctccttttttttggggaagaaatatcacggtaattgggatatatatgtaaatgatcaatttgatctttaatatatactttatttatatatatatatattagggtaaattgtaagtaaaatacctaaactttgagtttaataattacttgttaaaaaaatggaggtaaaagtaaagcaaaacattaccctttattttattttattttcattcagtcgatgcgaaccgttaattcttacatattacatatgattaagaaattcgtgatttactatagaaaaaaatcttaagtttagtcatattaacaaattttgtgattaaaagtaaaaaatgtaaataattataaaactatttttatgttattactaaaagatttatgactaaagtattagtcacaaaattataatttgttatgactaaatatatttttaattgcaatatttgttgtgacttaaat

SEQ ID NO: 124018 - DNA, 1112 bp, Cannabis sativa
  modified_base (1041)..(1067): a, c, t, g, unknown or other
aacaactgagaagacagcaacaggacatactccattctcgctagcatttggctcggaggtaatgctactagtagaagtcaatattgtgacccacaaacgagatttctatagtaaagaagaaaatattgatattgtccttggatctacttgaagaaaaatgtactgagtcgcatattactaatgcaacatacgaacaccgagtgacgaggtacttcaacaaaaaagtgaagaagaggcccttcaacgttggagacatggtgctaaagcgagtatttgcaaatacgagagacgcatctgcaggagtatttaacccaaactggaagggtccttatgtaatcgaagaaatagtaggagccgggattcacaaattagctcggcttagtgactcgctaataaagaaccactagaatgtggaacatttgcgatcctactaccagtagactgatgttgtaacttctatttttgatgtaaaattttgaacttaaattattaataaagttgaattatttttcaaataattacaaagtttacataaatgtacatttgttcttgtgtgtaagcaaaaggtatattaatgtcaagcttccgtaaaatgtcaagaaacattgaaaactacttgtcaagtttcttctttttgagccattgaggatatagaattttaacgtaattctcatagtcgacttgtagttgattgttatcattattttaagtaacattaattttcttccactaaaccctcattctcaaacctcaatcttcagttcaagaataagcttcttggcagactcttctagctctttaccatttcttagagcgattgtactatagtcttatttaggattcacctcatatataatagaatgattaattttacataaactcaatatctaatattaattgacaaatatttttataaaccatctattacaacgggtccgacctcccattattgctctatcttgggggccaagcttggcattattgctagcaatcttatgttggaagttattttaccgggaacttagatctactcacaagtannnnnnnnnnnnnnnnnnnnnnnnnnnttctaaaacgatggaaaattaaaacacataaaagtatcagaaatc

SEQ ID NO: 124019 - DNA, 754 bp, Cannabis sativa
ttgcttggttaaagtgacgagtgatcgaaagcctaaattgccatcctttttggaattgtaaagtttttgccagctttgccagtggaccttgggcatattactagcattgaagccccaccaaaagttagccatgatggactccagagaatgataggtggcaactagaattcggaagcaagccatcgtgtaggtaggaatggcttggatgactaacttgagcaaaacctctttgccccctttggaaaaaaccttgtgtttctagtttttgagatgattccaaatcttatctttgatgtattggaaaacttgcttcttagatcagccaaactactaaggaagccccaagtacttttcaaaggaggctctcacaaggatacccatgtaattggaaattaagtttttatccttgatagccatgttaggagagaagtagagaaaggatttttggaggttcacttgttgtccaatcacttttttgtaaagatgtaagatctccttgatagcattacaagaactaataaaagcatggcaaaagaggatgttgtcatccacaaagaagagatggaatatagcaggggcggataagggaggagaaaccttcggaacacaataaaaagagatatggagagagagggtcgccttgaaggatgctctgagtgggaataacattacctgagatcttaccattgaggttgaattgaaatgtggcagttgtgatacatttaagcactattaccaaaaataaatgtaattt

SEQ ID NO: 124020 - DNA, 3115 bp, Cannabis sativa
  modified_base (158)..(158): a, c, t, g, unknown or other
gattcttctccctattttctcatcttgattaatattcttttgttattttaagtttctgaattattttattgaattcataaaaattattgatttgccggatagaatcataagtataatttagtggtagttaatccaatcccctgtggttcgacctcacntgtgtgagtttactacttgattgcgtatacttgcgtagtgttcataattttcgtaacagttacagattttggttctgatgtgaaagcttcactaagagtagtggagattgcttccctacttagtcaagaaaataagtgaattttatttacgtcgttgcattttagttttttatgtgtttcagtatagttgtttttaactattttgattactattttattacacagtgattgtggtacttttgttgctgcatttattgagttctttatacatgaaaaagatgttccaatagattttgatgtcaaagcttaccacacgaggatttctatacttttattcgcatatggtaaaagaaaaaatgaagaaaatattgatagtgagtaaaagaaaccttagaagtccatgaagaatgtcaaggaaagaacaagagtctggtgattagggactagtttctatagcctattgaatgttattatttattttaattgtttattaatttaatgcttgatgttaagacttggttattgatgttatggttctattgctattttttctttttgtttaagaattggatattagataattatcttttttttagacaatgtattattttgggttacaaagcgtatgtttttgcacgagcttctcgtttatgaaatatataaaatatttgattcaactgtgggacaaattttattcaacatgtctaattatgatatctaggaaagtagttggagaaatcccttaaatcttttgaatcaatgtgttatgtgtaacacctgctatacaactatcattcaacgatttggcaattgttgaataccaacatgcttgtcaacgtaataagaaattttttttgaacatctaattaatgttttaaatatggtgttgctaatgctttacatttttgataatatgttagatctgacattcaactacaacataactattatgcaactttttaaaaataaataatgtacaaatgtaatatcaatgtattaaagtaacatttttgcctgtaaaagttcacaaaaaaattaaataattcaaattaatgttcgctcaatatctagttctttgttatggtatgtattccgcttgtgacctttttggccatatttgctacacctattctattttttttttttgtttcccatgcacctagaaatcttcttttccttgatcttttggatcacacataatggataacttgtgaagtcatgttcttttaattttagttgtatgtagaaaagtatgcttggatcgtcctttatcctcaacggttggtatccctctttcacttagtacttgagttacattttgagtgttttcttagttgcattctaccacttgtttctgcttgtgtattagttcttcatatttgcaatcaattgagatgaattgtccactagcttcttaatttacataatttattccttcatcaagttgtccgttgtaaaatatgaaaaattgaattgcgtctttttcctgagagtataaaagtttgagtattataagtcaacttcaagacaactgtaatgtaacagttatatttgttgcgagccaactaacatgaaacctcaaaataactaataataccccatatgtaatacaaatgaaacttaccacagtcgtgttttatctattcaagttacgtattgccaatttcgagccttgtttatgtaatactataaaattatagtagcacaactattattcaactaaatttgcaatttatttacaactagaaatgataaatgtgaatgtgtatctataagaaattatttgtccatggtattttttcactgatcgataactaattgtacattaatagtaatatgtggagaaacaatcgttagacctctgtagactaactttatatcaactaatttagtatattaataaaactaaccatgttataaaagtttctttaaagagctttgtattgtattgacgatatgaaacacctacaaatatgataaaatctattgtatcgttatcaatttgtaataattgatatgttaagttccagagcattagcaaaacggttatgcaactgtgatacaacttttctaaaacataaaaaactaaaacagtatttccacatacgtgactctatgtacatgtaaatttactattttattcgtgatttaatatgaacaaatttaccattaaaatctataaaacaacaaaaatacaatgaggtaacttttagctatagtattgatgcattgtttttttttcttttttggattatacctgatttggattgattgggagctccagatctatttgttagagatctacattttatgaatcgaaaaattaatattaggaggattagttttttgctaattaaaccagaattttgggttgaattttagtttcaaaactagtttttctacactttttttcatcaatacgaaacagcatatgtttggatcgatcccggtcttcttctcatgtgaaatcgccgaaattaatagtgattctccgcctggttgggtttcgtttcgataggcttgctgtgttgatcgattaaagctttctgttgttgaggactttgcttcgtgcggctgaaggcttagaagaagaggtattattgtaatatttagttgttgtgctgtataaatatttataggagcagttcaatatatttttgtaatatttttacttttttttatatatatatacctgaaaaaccccctaatattattaaggataatttcaaaaaaaaaaatacaaaattagagttgtacgaaattttaaatatttttacaatttttaaaattttatttacaaaaaatatgacattttaatgtatttttaagttgtactcttattattttattaaattttttgttatctatatattattttttatgttgttttaatattgttttcttattactttcgtatgattttttttgttgttttttgtatctttataaaatactag

SEQ ID NO: 124021 - DNA, 719 bp, Cannabis sativa
gtggaacagatcttggctcctttgccaattgggtttgcagtgttcttagttcacttggcaactatccccataactggaactggaatcaaccctgcaaggagtcttggagctgcaatcatcttcaacaaggaccatgcttgggatgaccatgtaagcatattacgtatttttattttttctaaatttcattttcttgaatattttaactaaaaatacttgcgtttgttttgtttttcggcagtggatcttctgggttgggcccttcattggagctgctcttgctgctgtataccaccagatagtcatcagagccattcctttcaagtccagggcttgattttcaatctctttcgagtgttgagacacctactagttttttcttttctttctttttcatctttcttctcctttcttttctgagtcctcttacttttgtgtattgtattttggtggtagtgtgttaatttgtgtgtacattattgaatatttatgatgattttttttttaactatttatttagagtttcagattatttatgtgtgtacattattgaaagttacataactggaacaacaccatttcagattaactcctcatctagccctaaagtttttctagccaaattatgagcattagagcattagaatggtttctaggaacatgtttaatacaaactttaagaaataaagacaaggagtgcctaatgtcatcaataacat

SEQ ID NO: 124022 - DNA, 1481 bp, Cannabis sativa
taaaataatttccaacagataatatccacccattctgacaatggtaggagcaatacaacaagttcagcattggcaagaacaaagctctacttccggcagcaatacagtcataatcagacacctgaagaaccgatcaacctccatcaaaagatttcaatcatcaatgaaaagaaaaatctccgatcatccctgtcaataccggtgacaaaaatgataggtaaacatatatacatataaaaatagagacaatgataaaaagatacattataaaaaaattaaatgtatatgtatatatatataaaatttgatcatattaatattaacatatataaaaattaaagatgaatttgagtcaagaattgttttattttgtatttcttgataatgagacgtgaacaaaaataaattgattaaaactaaaaaatttacaaactaactacatgttacacaaaaaatgtaattttaaaaatcttatttttttaaacataaacatgggtaatcaaaaactggataatataatatatctattaaaaataaacaaagtgaagactgattacaacatgccaactaaacatatatatagaaattaacttcttaattatttcacaaataaaagacatataatttataataaaacaaaaaaaaagaatcaatttcctaataaatcataattttaactatttatctacaatattttgcaggaatagactcaacaatgttcgtggttcaatattaagagcaatggaacgagaagataaaatatgaaaactatataataactggactactaataccaaccaactacagtctaaacaatttgttggaattgataaagaatgaaatcaaatgtaatattcaaatcgaaatgcattaccagttataccgcgggtcaccacaactaaaaataataagtgacaactcactgttgttctacttgcaatgtaaaaagaaacaaaatgcagttagtgagtcttcactttgcatcacaactatagatgagacaggattctaaatcattgctcaacaaatatctgagaatgaagttgtaacacccgtacttggaaattgactaatttaaatttaaacttattttatcatatttataaaacctcgtaagtcaggatcccaattctaaaaccgctattgaaaatacatatactatatatatagttacataatatttttttttacattctacatggcaaccacaaaatgaaactcaaaatgtagtaagatccaaatctttcaggttgcactgtcgcgatatgtacaattattgcacagccccaactcactgctcctccagcttggttttacccttacctaaacaaagtagcaaactgatgagccgacagactcagtaagataagcatataacagatcacatataatcgacttgtgtctaggcgcccatacacctattcacaagactaaccaaatgattaagaacgttcttaatggttggtgctattgaccatgat

SEQ ID NO: 124023 - DNA, 1322 bp, Cannabis sativa
gtcactagccttatcgatcatagtgtagtagccgaaacaagggggttacgccatctgtcatgtcgtttatggagacttcaatacgtcttcccccatgcggcatcaaatgcgaagtgattgttcaatggattccaatacctcctggaactgccttagcacgtctttggcctccgggagtactaagatactcgtggtgtctccttcgggagacacctttcctgagtcactcttctctcgtctaagacttagctaatttccataagtgttggtcttttcggttctacgtgtcatccttatcctggtccacatatttcggacaaaatcaagggcaacattaatattgtcaattcattatctttctcatgatcagaacaaacattctctaaacttttgaagaccattgatttttcattttcttttatcttattaggtttctcattttgttagatttgttgataaatctcaaatgttcgaagtatcccactagctccccaactttcattgtgctaaagtctttagcctcctccatcaccaaaatcttcgcattaaacctatcaggaaaaattcgaattattttcctaactaaaatagattcattaagtttttcacccaaagaaaaaaattcattggtaatgtcagacaattttatgaaaaattcaaaaagagtttcataattaaacattctaagatcatcaaatctactttgtaacataaagattcgagaacacttgacatatgcaattccttcaaaattaactagccaagcttctcttgtagattcacataaggagatcaatataataaagtcttcatctaaacaattaaaaatagcatgcaaagatttattatcttccccatttgactattctaattcatattttactttagtattaccttcatcatcttcttcaaccggtggagaccaaccagttagaataaatttcaaagattttttattttgggatgatttgatgcagagccttattcctaacctttcaataagagtagttagaatcatttagcaatggtagaacaattgtagatcttgttcaaaaaaagaaacatattgcaaaaacacacaagaaaaaaaatataggatcacattaagagtttattgtcccgctttcataccaattgaaaatcagtattttgaaaaaataaaattaattctacaataattgtaattaaattgaaaatgtaacgagttgcagttacaggttggttacttgttactgcagaaactggacttgcagtaacatgatagttgtaggaataaatagtgtagaatttaaaacttgatacaagagaattatacatggtat

SEQ ID NO: 124024 - DNA, 1150 bp, Cannabis sativa
ggggctcgcatgcgagcccatgggaggctcacatgtgtgcaagggaagagcgtacaatcatgccttttgtagacctgaccaagggtacactgcaaccactctcctacagtatgtactttgggaccaccacgtatgtacctagggaccaccacacatgtacccgaggaccaccacgcatgcaaccagggaccacgtgcgtgcacctggagaccacacactgcaaccaccctcttgcaacctgcaactggggaccatctgacactagacaagggtacaaggtgccaggatgcctccagcacctgcagcatgcagcgggaaagcgacatcttgtccccatgggaccactttgtacaccgggtcattagagcctataattaccctccatctcagatgtgagaggggggttggaaaatcattttgtgtaacttaaatattgaattcaatatggagagagaggaatatccaaaaatcttttcaccttcatctttatcttatctttatcacattttttggtaaccttgcattttccgaccactaacttagttgatgagttctcaccgtcaacacaagcgagactggatataatgactcctggagaaagtcattggcagttagcttgtcaacttctatttttaccgcatcaactctgacaggatccaaagttcttcctttcttacttaccggagctgcatcctcgtggatattcaaggcatgtgaaatggtgtttcgatcaattccagtcatgtcagaatgactctaggccagtacatcttgattttccttaaccctattaattacatcttcttttacggtcggggaaagatgctttcccaccctcatggttttggtggggtcttctttgcatattctcacttcctcaatctcctctattggttctaaatttttctcgagttcaactcttggatctacctcatcttcatatccctctagtaccacctccgtgtccattgggtcctctaacacaagtgcttcgggtgcttcttccctaaccatatacacggttatggttgatacattctaaatttttcttgcgctcaactggttccccttaatggtactgatgcacccattattacatgggaacttcagacacaagtgtcggatggaggtcactgttgggttttatgcc

SEQ ID NO: 124025 - DNA, 576 bp, Cannabis sativa
tcgagcattttcttcatcttcatccaaaataagaaaacaagttcttcaggaaagaaatagatcaacatggaggacaaaactaggagccaacacccaggttgacttggtgctaggtcctagcgcaaaagttgacatgttgttaacctgtgccacttccaacagcagttcagacatactcttttgggcatattctttattttcatcaaaaatcaagatatgagtgctttcaagaaacaaacggagccatctaggagatagaactgggacccagcgttcaggttgacctagtgccaagtcccaacgcctagattaacatattgtcaacctgggccatttctaaacatttctccccgagaagtcttccatgcatattctccgtttttgtcaacaatcaagatacgtgtttctgagagtcaaacaaaatcatttggtggttaaaattaggacccaacgtccaagttgacttgatgcctagtcctagcgcccaagttgatgttttgtcaacctaggccattttcaagtattatctcagaaaagtgttctaggcatctttttgtttttcagaaataacaaaga

SEQ ID NO: 124026 - DNA, 1370 bp, Cannabis sativa
tttggttgcgatttaggttgctatgaaatttttatgtgaaatttaataaaaattagaaaaaattgttttaaaatataaaaataaaaaactcctataaaatattgttcaaattaatataaagaagagaataatttaaacttaccatttttttaattttctgagtagttatattattaaagaaatataatttaaggctaaatatcgttaaaataaaataaactgaataatatttcacattaccatagtaacccaatccagacagccatatataatttattttgtgatgttctgtactccattaattgaatgatttgttgcaattcatctcaagtcaaatttgactagaatgaaacatgacatcaatatattggcttataaacaaataaatattatataaatcaacctattatttttaaaaatattaaattaattaaatgaataaaagaaaatcatatatatagatcataattttactataagactgtgtaccgcatggcatgggttaatttttttaaccaataagattaaagttaaatagatgttatatggtatatgttagtgtgtatatatatgtaattattttttcgttaaaaaaatggttgttttataagaaaaagtgttgaaaaaaacagaaaagagagctttatatatgtttgtattatacattaatgaactatttttttttttttttggctttatttttttgttattaaagaattaataaatgttgttaaaaaacacatatatataattttaaaaatgaataatgtatatatatatatatatatgttagaatgtgttataaaaattatattatcttcgtaagaatatgtgttagcggatgtaatttatgacatttggttaaactaaaatttatacataaataagaaaaagtgtatgaatccgagttgtataaataataacattaaattaagagaggtttaaacgtagacttaatcttatataaaaaaaaagttaaaagttgtgtaatataaaattaaaattgcacttttttttttttttctttttgagatgaagataaaattgctcttaaaatataaaaaagttgtaagtttctctttgaagaaaatttttcttgtagatgtaattgactccgttttattaatagaaattatatctcttgataaaaaagaatattaaagcaaattaatttaaaaaataattatggtagaactatatgtatgtaaatagattggtggcaaaaatacttaattaaaaaataattaattttgttataatttactattagtataaaaaaaaaattgatggtaaaattcataagaaaaattattttttgaaaataaatacttgtataaaaataattcaaattatcttttttttttaaaaaa

SEQ ID NO: 124027 - DNA, 1705 bp, Cannabis sativa
aaaaaagagaatgtgatgagatttgaattcttgaccgaaaaaaaatactactaaaaatatgcctcaatgcatggtctaaatattcgtaatttgaaaaatatatttttaaacttgtgttactcgcttaaaatagtgtattaaactcaatttttactgaaatatttttacgatatcgcatactttatttataagttcattgactcatgtgcaaaaattaaatatttaattttttttcaaccaatttacaaggtattttttttaatagcattgactttcttcaaattcgaagatatttctctgtaaatttttgcttttagtgtaaagctcaaccaatattgatatcgggatcagaaaggagatccctatcaatggtaggagaaaccataactagttagaacaattatttagtaaaatatttaaaatatatatatcttattgaaaaaatttcaatttgatcatgtaacatatttaattaataacgatatttctttttgccatattgattaataacgatgttacctaattaattaaagttaatcataaaattaaaatatgaaaaattattaattattattagagaatctttgtgtttagtgggaaaatgaaacaaatataattaattaaataaaacaagtcttcactagttgctgtcttaatatcaagttgctaaagcctaattaagctactattacattattaataatttggtgtaattaatatttattaatggacttgatttttcattaattaattattatctttataattataagtgtctagctagttctagcacaaaatatatatatatatacctaacttaactaaatagtcaatttattattagtttaattattaatggtgtttttatggggaatttcaagatagcttattttaattaatttgacttataagttttaagaataataaacctcgattatttcaaccacaaaaataaaataaaataattattatttattatttttgtataaaagaaattaaagaagaatgaacctcgatcaaagcaaaggtcataaaatcattaatattattaatttaattaccattacttcttccaatgtagtaaacttttccagcacacacaaacaccaatacaattaaataaataattaattaaataataataaatattgatatatctttatcccatactgtgggtgcattatttaatttggactactatatatatactaacaacacaatatatcttttttttttattattatttgtttttttaattaattagtacaaataattaataaatgtgttttgtaatatttagtaatatgtatatatatattttaatatttatgccctaattactatttttttttttttttaattttcactagttttttttcttgggtctagcactattgaaatatttacacatatatatgggattatttcataaatatacaaaaaaaaaagaacttttttcatttttatggtttacaattttctttttatattgttatagattcgttttcacaaaaatatgaaatgttatttctctgttatttttgaaaaaaaaatattattttaatattgctgaaaaaaataaaaacaaatatccttaaaattgtaaataatagaagaaaaaattataaaaatgtaaaaattatcggtaaacatatatataacaaatcgtttttaaatatattatgtaaattttcttatatataca

SEQ ID NO: 124028 - DNA, 1842 bp, Cannabis sativa
  modified_base (1798)..(1800): a, c, t, g, unknown or other
gtattttaactgccttcctacaaggaagagactccaagacaggaaagtgcccttagatgtttgctgcccattttgcttaatttctagtgaaactattgtgcattgtttggtcctttgcgactttgcttcaggttgttggagtaagttgtgtatgaatggagttcaacgggagtggagttcgttcaaggagtgactacaagagcttatggacagcgttgaggacgagaaaattgctcaggtgggtacgttgtgttgggcaatttggaaggcgaggaatgagttggtgtgggaccaaaagactcgaattgtggacgaagttgtgcagtttgcattaagatctcttgatcgatggaataaggcttagttgggagagaattacccttcattgaatccatcttttttcaataaacgggacgagctttggacaaaaccagcaacaaatggtatcaagattgatgtagatgctgtaatttttgacaatgagagtcggtttggcattgggtttgtggtgcgggattgcaaggcggagcttctagtggctgttgctctgaattggtctggtaagattacaccagaagctgctgaagctatggggattcgagaggctttaagttgcttaaaggataagtcgtttcaacatatttgcttggagagtgataacttagtctccgtgcaagttattcatagtgaagtggtgatgtgttcggattttggtttaattgtgcaagattgtaagtctttgttgaattttataagtaatgtctcgttaaagtttgtaaaacgttctgctaatcgagctgaacatgttattgcacgtcagtcttgttggtctgctgagcgtatgtccacgaatgagaatgttccttcggaactcaaagttgtacttttgagcgattgctcttgagttaatgaagtggaatttccattccaaaaaaatgtattttaaagtataatctaccataatataactaaaaataactaattaattactaagatgtatacaaataagttttagaagtaacaaatatatatttcaaattatatgatataaaagtaaagttttttatataaagataactaattagtttcttatacacactattagtaatcaaaatgttgcttttgaaaaaactgaaaaaaaaaaaaaaaaatcataaaatgtcagatttggttgacgtggtacatatattattataaatttctcttttatatatacgttagatatgagttttttttaaatagtatttagttatattaagttttaacttttgaaattataaataatttatagagaaatttacattatgtactataaattttaaattgttgacaaatatactattaaacaatatattaataatgtgtaacatttacttttatattgtatttctttcttaaaattttattttttactattgagtgacatttgtcacgtcagtgttagcatcagcttttttcagaaaaaaaataatttaggctgagaacatattatctctctctcacacacagagcttagttgttcatattctcttctccataatcattgcagtttcttcttgttcttcttaacattttattttttctcttatttttataatttgatccacatttattgtgttgtttgtgattgccaacggttgctaagttggttatcacctttttggatcaattttttcttttctttttttcaaaaatcatattctctctcattttttcctcctctgttggtgatttttacctataaatattattcctttggatcaatggttgttacacgtgttgggttttgtgccctaannnaaatccatttcaatataatcatatttactaattaataaagat

SEQ ID NO: 124029 - DNA, 661 bp, Cannabis sativa
  modified_base (616)..(636): a, c, t, g, unknown or other
taattgtattatatgtattagatttttaaattactatttttttatattaaaatattatttgtatatttaatttttaatttattttataaatatgtgtggattggatttgattgactatttttacatgtcaattaacatcctatacacacaaatacggattttaaatttttcaatctaatctaatctgtataagtgcggatatctgcacttttcgaattgaattgaatcgaatcgaattgactattttatgaatatttttaattataccagacattttaagttgttttaaataacaagaaatatcaaaaatagagtttaaaataattaattctatctttatttatttattcatttaaaaaatatcactctataattaattcgtctaattatatttgttgcattgtaaattttttaaaaattaataaagcgtttgctataagtataatatctgttattatcttaatatatataaaattgagctgtaaatttttagaattataaaaaaatcttaacaatataattaagggatagttataaagagaaatcaatatatatctattctatataaagtgtgtctatataacaaaatttttagtttatgagaaatttatgggtnnnnnnnnnnnnnnnnnnnnnataaaatgatttattattaaaaata

SEQ ID NO: 124030 - DNA, 955 bp, Cannabis sativa
agagagagggaagtttttttagttcttaacaattttttttttattttttttgaaaaaaagggtaaaataggaagttcatgtaattaatggaattagtttgtataaattagtggaggatctaaattttgatattaggagttttattagggtcaaaaagtaaaatttcccttactttacacttgtttgccatagctacagttactactgtggttggatggtttaggtgtgagtaattttccatgtaaataatagatcacacctaaaaatattaatttcaatacttaaataaactaattaatttatttcaagaataattccctgaggaatcattcctggaggaatagtgtttgttgaattttatatatattgacacaaatataattaaattgaattcaacacaagtaataatttaaagtaatcattaggtaatttacatataatctataatgcaatactcacaatagtttttaaattatgtgggattttttttagaaagagtcactaatatgcaaatcaacaaaattataaaaacaaattaaaaatgtaaaaaagaataagaaaacaaaaataatatggaacaatgctttcttagtatgtcacatcaaatttttattattttcttttatatataaatatataaattagagtttactcttaaatagatagagtattcttagataaaaattatgtataataaatatttggtatttatgccgttaaaaataaatattggaattatacctcttacaaacttaaaactttgagtacttatatcactatttatcttaaaatatataacactctcaataaagaatgtcaaaaaaattagctggaaagtttccaaaatttaattttatagtttttttttaattaattttatttaaactaataataataaatatagtgcatgcatcacaggccggccctaggtataggtaggctaggcccgtactta

SEQ ID NO: 124031 - DNA, 2338 bp, Cannabis sativa
  modified_base (2304)..(2312): a, c, t, g, unknown or other
catcttaggaacatggtagtttaaactggtttgcttgatgcttctccagactatagctcctccaccaagagtaaatactgacctagatgtcgacttttgacaatctttgtttgattaaaagttaaaatcagtatatccagtaggatttaactctccaccaaaatatacaagcattatatctctcattctctaaagatacttaagaatgttctttataactatccagtgctcctaacctggattagattggtaatgactaacaaaccctataacgtagcatatgtcacgccttgtacacaacattgcatacattaagctcccaactactgatgcataagggtactttctcatgtcctccctcccctaatgattctttggacattgattcttacatagaataattccatgtctagatggtaactatcctttcttggaattctccattgagaatctatcgagcaccttatcgatataagttgcttgagaaagtgctaactgttgacctcaaaaattggccaaccgatagcagagtagaattgaagcttaccacgtcttacacaattagaacaaaaaggtaaatagacataggattttatagaggttcgaaccccttagttagcgggtaatgacctactccccttttggttatgtttataccagagataattccactcatattgctatagttgtgagatctaaagtggctctctttagattacaatgagggaaccaaagttgccaaatatcaattgagtgagagagagggcccttggggcgtgtagaagagagaggaagagagagttagggtttttaaacttagagtagagagcttagggagcttagaggcttaatgacttaggattttagagataggctaatgctctttatatagtagagcttacatgcctaatatccttagaaataggtaaataaagccattatttacataattaattaataaaatacaaatgactaaattgcccctcaacaatagatctattttcatgggctgttaaggctagtccgttgcttgacttgttgtccacaaatcagagctacacatcaaaatctaccgggccaaaagctggccgaccatgtacctacagaatgcaggctggctggccatacaatgtttgtaggttgaggtctggcgaaccatgttcctaccagggtctggcaggtcatgttcttgccagctttgttaagagttggcacagtccttgcatgtgttggccaaccttggttggtgatggccagccttggtgatgaccaaccttggtgatggaggctaacctttggaggtggaggccaacctttgtacatcttttccttatagaggtcaagcttccttggtcgaatggacccttcctttgtttgagagtcagctttggccagacagctagtgctcaaaccttggcaggccatacaagctcatcttggctagcctatagactccccttggccggctagacattgtggtacaacttcttgacagctcgcttaactctgttcgcttgctgcttgatgatttttccataacttgtatggagactttgtcttgctattggcaaggttgtattccacatgtactctgtctttgcttacgtggacatgccacatcaggtggaaaaaaattgggacaatattttcccccaagtcatcgttcgaacatctagtcggatagggacttcttaattctcatcttgcatgtagtagcctctatcgagtagccttgtctagccaagtgctggctttttacatggcatgcttttagatctttgatcttctctctccatatttgcctcatcttctcttctttgacatcttttcttttaacctgctagtgataagttttaagctttttaaacttttagaaactttttgattcttatgctagattgtattccttttggtattttgattcacatgatagttttagaatgcataatgtgtgattccctgatgggaaatattttattttggccttcattgtgattgttgactctataagtcatgaagaacacaaagaacacatttgagtttttaaaaaacaaacatttatattcaaaactaaccttgcgcggccctagggggtcttgtttgagacttagccagccctaggattcaatcatgggagttggctagctttacgctctcaccataggaaactagccagttcatgcctgggtttggtgaccctagccgattcttcgctgagtcatgggaccctggcaatattgggttttgtgccctaaataaaactccatttccatgtaatttctattattcaatatcaataaagannnnnnnnnatttttcattcatttgtgtattattt

SEQ ID NO: 124032 - DNA, 771 bp, Cannabis sativa
tgcatcaaaattagtattttgtaaaataaagcaaaatattggggcgttacatgatgatttagtgtcatataattgcattaatagtacttataactatgaatacgtttctggttaggctttatgcattatttgttgattttattttattatgtaatgttgttcattattatatcattctcatttttatatgctaaacatttttaaaacaaacttcaatttctttttctagaaggaaacaaacttgatcaatatttattagagtttgaaagtgtacttttttcctctgtttccttttcagcttccttattaatgtaatttataaatgaaattttatttttcaaacatatagggttcattttgtaacattttttaattagttttttgtttttttaattaaaaaagtaaaaatattttctaaaaacatgttttataaaactattttcacttttcaattttttaattgagaatatattaaaataaaaaaaaaaattattttcaaaattttcttaaatagtttgttttttttttgggtattttacaattttgtatacattattttaattaattaaaaaatatgtgaaaaacacttattaccattttctcgtacatttttatatataattaaaaactttttataatttttcttataatatatatggtaataattattgattattatatatatgtggtaatattagctatgtttatttttatgtttacaattataataaaaagaccaataatataaaatattttatatatgtatttatt

SEQ ID NO: 124033 - DNA, 644 bp, Cannabis sativa
aaaaaaaataatcttctaaatagaatttgcgcgtaaagataacaatcgtatcgcgcattcggcgggtttcgtccccaaaagatgggcccactttaacggacttccatttgaaattaccctttagtccttaatcaaattacgcttttacccatcgtcttctacctctatatatagaccatccttgactaaaccctaaggtttggcaaactgagaaatcaaacggtgcttccgcttaaaaagagaaaaattcaaattcttttcccaaaagactttccttctttttctcgatcatcatcagattcatattactcatactcctctctctatgacttcgactatgtcggttccttcgtctcaaacaaaatcggaaaatccagcgttttatcagaatcgcaaacccttactatcatcgcctaattcgaattcctccgtgttcgaagtctcacgctcatcatcatctcccacacgtgtggccattcacggacgctctcactctccgaagtctccgtacggaacaagatctccattctcgttactgaagacgaagcagagcaatggcggcgactgcgtcgggggattagtctctagccgaaagaggacgtgcgtttgttcccctacgacgcacccaggctcgttcaggtgtt

SEQ ID NO: 124034 - DNA, 760 bp, Cannabis sativa
taacacagtatattgcagtatgaaacttataaaaaacacagtaaaaaagtaaaaaataccacctgacactatttttataaaaaaatatttttataaaaaaattagcaaaaaaaaaattagcaaaaattagtataccatgtaaatttcccaacctgtaagtacaaaaaagtcatattaaaaatacacatttttttaatacttgtaaaaaatacagtacttttttttctttcaaaaatggcctaataattttgttgctactgagaacctaattagttttagggtcggtggggttgtttcaggaacaagtatgtctaccaacacacatccctcaagtagacattgtgcatcaacttaacccataaactatctagtttttggttgcaatgactattcaaacataagcgaattgagccaaaatgtaaagattcttagggatttaattgctaggaaaaaacatttaaacgacttaagtgataaatctagtcaagtttgaggatccaaatgctaataagattaagatggatttagaaaaatgaagtacatgacattagcaatggccacctgccccaatctatatattacttggcctccaagttagtttttgatgacatacaaaacaacctcatgcatgaaaagctctcacgtgctccacttcactaacttagtttatttctcatattaaatatttataagaatttaagataagataaatgagatattttatctcaaaattaattagtaatgaggaaagtaatttatt

SEQ ID NO: 124035 - DNA, 502 bp, Cannabis sativa
tcttcttaatcttcttcttctattctttgtcctctctccctttcttttttttttctgtactttcctctgtaattttcgtactctctttctctcaaagtgcagccaccattttttttctttctcctttttttgtttcccccaaattagggtactaaagtttatcctaattggaaatccaagtcatgatccactttcccttctttttccacatattagttaaggcattgtccacatttttgccacataagcatcttttattcttcattaacgccagctggaatttctaccaaaatacacttactgggctggctaattgctacgcagtaattgctataacaatgacagtgaacaacaagccttttttttgctctttttccttcttgtcccaaacatttccctatacccatttcaacattttttctgcttaatacacatgaaaacagaaacataagtctatttaacacttactaacacacaattccatttattacaaagacacaac

SEQ ID NO: 124036 - DNA, 871 bp, Cannabis sativa
agttgttataggaaaatatgcatgggctataatttctaagtaagataacttgtgaattcggtggatacacttaatgtatatacataaaaagagaagtggtgagagtatgaagctcccacggattccagctggtactggaagatcatattgtgaaagaaaaaaatcaccttaaaaacttgtttgatgaagagtttcaaaaaatagagtataaaataagtgtcttctatgagggaagataccgtgaaggaattgttggattggatcagaaaatgtaagaaattaaagttctttcaaaaaatgtaaatgttgctacttaaatacaacgatgtattatttatggaaagctaataacaatagcatatagaatcaacaacaagttcacacagatagtatagtcaaaaagataaaataaaaagtgtatataccaaaactcaaagcagagatttatacataggaaattagtgtaatagatcaaatttggtttagagggttgtaagtccttgtgatggcaattggaatgtctataatgaaaatattggtttacaaagtttatgtgatcaataaaaagcttattatcttttttgaaaaagaacttgattaatgtgtcatattacatttgattgatgatgaagttagtttatccacttgggagatcccaagatttactcttttagataatattataactataataaatcatattatcattaaaaaaaattaaaaaacacgaaaatacattgataaagagatttacgatatcactcatctaattgtaattgctataccgaaattaaatacagtaaaattggaacgaattaccgatagaataatctggctgagtcgcggacaatgtcgctctctttaagacgtt

SEQ ID NO: 124037 - DNA, 2511 bp, Cannabis sativa
cttctacaaagtatatcataaaatgaactaaaataaagatacaaaatagaacaattagatcaagattaatcatttttagatgagattttttttttgtatagtcagaagaagaatgaagagtttattttataaaatttttagtgagtatttataaaaaaaaaatgtagccgttgacgaatagtaaaatagaggttggagaaaaaatagtcgttggtgaatagtgcaatggcagtttagagagaagatatagccgttaataaatagtaaaaataagaagaacaaaaaatggtgttcatgctcttgattttatgaaataacaattggaaatgaaatagtagttataatgacaaatataagtaagaataggagatatagtttttatatttatttatataaatgtataaaaccattaggaaatattactttctattcatagtaatatgttaaaattagattaacaataataaagagtaataataatatattagaggttacattaataataataataataatctgtcagaagttatgttagttataatagtaattatgttagaagttaatttagttataataataattatgttagaagttaattaaattaacaatatatatattttcaatattataataataaatattgtgttagatgtttaaattaatacaaaatatatttatagaataattaatatatatgtataaaagaaagagtatttatatgagtatgatgagataaagtgatcgtgttgataacgtgttataaatttagacagatatgagtaacaaattttgtatttttttttctgctcttcactttgcttcatattctttatcaaagttacacacatatatataggtgaatacagggtaaggctgttgtcacgcatgcattttttgcgtgactagtgccgcacacgtttatagccattagattgtctcaattttgatctaaaggctgatattaggtaccccatatattatttttatataatattttattttataaatggaggggtatttgacttgagaattggaagtgtaaccggttgcaaactttttgatttatgtccccatttagtaaagtgaaggtttttaagatcaaacttcactttcagctcaaaagaacttcactttcaactaaaaaaactcactttcaacttaaaaaatttcaaacttcagttctctttcattatttgaagatcatcattaaggaatttgagttctaatattttcatttttgtgttcttattagttctttttagggttctaaacctccttttaagaaacaaggtgccttttgaagaaggaggaggagggggcgtgggggaagagagaaagggggcctagagtggagagttgctaagagcacgtggaacactgactttgataaaaataaacccttatccgatcaaaaaaagaaacaaggtatccttccaatcgatctttgttttgtctatgtactttgcactatgttggatttagttatttttttttgtctgggtcttgtgctttgttgattctttgaaaatattctattcatggttagaacttagaagttgttttagcaaaaaagcaagaacggattgttattgattatatatatataggcttgttactcgttgactagaatatttgatttgcatgccccgaattcctactttgccttgctcgccctcataatcctaactctgtggccccatctacacaattagacaatgactcttcacttccacattaacatataataaactcaacctaaaatatcaagcttgttggtccaatcaactaacatattataattacttccacctcctatgatggaatgatagttaataagtcaattgtcaatgtgtaatttgttgataaatttttataataagataaacccatattgtgaaatttgcttttgtgttagtaggatacttgaatgtgaactagatatttggtttgttagcatatgcagagataatgttaaatgttagacaaatcatgatattattgaattcattttactgagcattgtggttcataggattatggcttaaaacaacttaattatcttctcttgccttggcgggtgtggcgtccattttcgttgaagtaaattactcggaagatgattatgtgaatgtccttagccagttacaacatggagtagaggctgttatttcttacaggtagcataagtatgttggtatccttagaatattcggtagagaaaattgaaagaagtagattggttatttgatcttgagctgaaacgtaataggggtttaacttgtgttcattgagggtatggaaaatttgattgtgttcggtcacaataggattaagggggtatacatagtatgagtaatgacatttgcacaaaaaatattcacacaccatagtcaccattagaggctatataacgggccacactatgtatctgttggaatatgttttaccaggatctagatttaccaacaagtatgtttcattaacatcctaatatgaatctctaaaacaatg

SEQ ID NO: 124038 - DNA, 2442 bp, Cannabis sativa
  modified_base (2395)..(2400): a, c, t, g, unknown or other
tctctctctctctctctaagctctcttttttctagagatgttgctggcctgatcacttctagccaagcaacgttgggcgttttgattcaataattgctaaatcggcagtgagtggtggattattgtcgggtacgattccagttgactgcgtaggggtgagcaacagtcggtttggtcggttttttacacaaaaaaatctgaaattcggttttcgattttcatagttataatccgaaaatcgatcgaccattatataaatgtaaaaaaaccaaccgttttaatccacggtttggtcagtttaaaccgaccaaaccggtcagcttcttttttttttaaaaaaataagtttttaaatttgctataattatttagaaactaaaaaaattaaagtattgtatcaaatatcatataatttaagaacaaaacttttttagttgaataaataatgtaaaataattttctttaaatttgctcaaattatttgtgctactaattggtaatgagttatattaaaaacttgtactattttatgaatgtgtgtatataatacgtaaatacatcaaattataataaaataaattaatgaataattgagatttcaaataaaaaaaataagaagtaaaactagtttaatagaactgtatattaaatatgtacaaaaataattatattatatatgtatagtgtataatatatatgtttggttagtcctcggtttaatcggtcggtttgccactaacactaaaattgaccgtgcaaaggcagtttcaatcgaaggcagttttttcagttttcaatttttttggtgttagttttttcggtgttcggacggtcggtgtactcagtttggttagtttcttagattttttgctcacccctacaactgtggtggaagaggagtttgtcgaggttacgcttgatcttcaagatgaagataccattttactttagagtgtcgaaccggcgacgatgattaacatcaatgatgcattctccgtcgttagtggtgccggaagtgaaactccaactttggtgtcgagatcttcgtctatgttcaaacagagctcgtcgagtcacttttgtgagttttctcatgagcttaaagtagaagccgtcattaaggtgaagtaatttttgcaagaactaagagccaagctaaagcgatttccgtggagccaccacaatcacagctcgcatgtgctctcagcggcaatgtccacatcaaattctccttaaaatggttgtcgaacttggagctggattcaactcgactttagtagctagagcttcgaggaaacagtgagcttaacttgatcagactcgttctggagctcataaggctcttcgtggattgaaatttatcaaaaactgtaagactaatagagttgatgcatggaacgaatctgaggaaaatttcaaaaagctctccaaagacggttttctctaccgcttcaattttgccaaatgcattggtaataattatttttaattgttatttttattattttcttaattatatttgtcttatatatataaatttattaattattttcatccatataataacaagaaatcagttttataaatcaataaaaattacataataacacataaaaactaatttcttcaataaaaaactatatatgttattatgtagaaatcaatttcattgatttatggaactgatttctttgtcttattatgtcgttttaatttgtatatgactttcattatatttgttagttattttcatccatataataacaaccagaaaccagtttcataaattaataaaatttacataatgatacatagatacaaatttatttaagaaaatactacatatgttattatgtaaaaaccagtttcattgatttatgtaactggtttctatgttttattatgttatttttatttatatatgactttcatcgtatttgttctcaacttatttttatttgtagttgatgatttgagattttaacattaatttttgttatggtcttgtatgagttcacaagttttgttatgatttttcatagggtcaaaactggtttcacagggttaataagtttcaaactagtttcacaggtttgaagctcgtttcaccaggtttaatggttcgaaactgatttcaccgggttcataggttcaaaactaatttcacatgtttcgagggatctataatggagcagctccattttatgatgttattatataattttgattttaagtttcctttttattattttatttttaggttcgaaactggttttcacacttatattttatttttagattattgttatacattgtatgttgtttttattatatttgtgattaattttttttatgtgtttttttttttaaggggggggggggtttttttttttttnnnnnnttttttttttttttctatattgcataacatgttaaaaattaa

SEQ ID NO: 124039 - DNA, 1629 bp, Cannabis sativa
  modified_base (1361)..(1389): a, c, t, g, unknown or other
  modified_base (1575)..(1604): a, c, t, g, unknown or other
tttaatgttatatcgtgcttatggactatattactatatagtatatgtattctgtgtatctgcaggtattttttgacaagtcagcgcagtatagtcacaaccgggtattttgggccgaaccaggttcgaggcccgaaatatatttttgagattttatttttgcatttatttgataaatgaataatctaaaatttatatatgttgtttatgtgtggagaatgataattatacccttgatatgtgtgtatgcttattttggccttggtgggcattttggtcatttgaccatttagtcatattttaacagaatggatttttgataatagtggaaaatctattttctgattttacacaacctaatcgagccccctctctccatttcttactttcctaattttctctaaattgatttcatgttgaattaaacttggcgttgaagattgttggtgctagggttgtaaaggacttgaggtagtttcttatttctttaattctgaatttgatgttgaatattgtgtgaattgttgtgttcatgttatgcctaggttgtagaatgcatgagggtgtaaattcatttgagttggtgtgctcaaatcttctcttttgaggttgccttcttctccttcttcttagtcttcttattctattctttgtactctctcctttccttttttttttttgtactttttctctgtaattttcgtactccccttagtctccaagtgcagccaccattttttatatctccctctcttggctgcctcccaattagggtactaaagtttaccctaattggaaatccaagtcatggtccacttgcccttctttttccacatattggttgagtcattatacacattttttgccacataagcatcatttattcttcattcacgccagctggaatttctgccacactacacttcttgggctggccaattgctatgcgataattgttatagcaatgacagtcagcaacaagccttttcctgttcctttttcttcttgttccaaatatttcccaatacccatttcagccttttttctgcttaatacacacaaaaacaacaacataagtctatttaacacttactaacacacacacacacacacacttccatttattacaaaaacacaacaaactaaacacaattacataatatagacactaattactctattatttagcttaaaattcaagcttaaggatatcaaaataactccaaatcttagagttttcagtggtatttgtgaaaaataggtaaaatagttgagaaaaatgataaagcccaaaccaatgtggggcccattaagtggcccgtaatagggtgcttattttactctatttttatcaatttttnnnnnnnnnnnnnnnnnnnnnnnnnnnnntgaagaatagtataaaaggaagctatggtctcttcatcaaaactaatgcctccaaagctaaaaatctagctttctgatgagacctcttccttcttcttcttcctcttcaatttcaaaaaacactaagcctttcttcacaaatattattcagccattagggatagagtgatagagtgagtgcccacnnnnnnnnnnnnnnnnnnnnnnnnnnnnnngtaagactgtgaagaatccaatcaa

SEQ ID NO: 124040 - DNA, 683 bp, Cannabis sativa
aaaaaaaaggaataactcacgtaggtattgagctgacgaatgaagctggagaaattattatgcttgaaataagtcggaagaagaagacgactaaattccgggggattccaaacaacgaagctgttcttacttgcactccacgaaacgatctcatcggtagcagaatcatcaaccatatcgtaagttttcaacaagaacggagccggaccacttccgccggaagcggcggcctgagctggttccatgggtagcgatcgtaaggagtaagggggttgttgggattggattttgaagatgagattggaggaaggaatcaatgggattggagatggagttggagttggggttggggttaggattgggttcttcgtcttcttcttcttctggttccggcagccatagttgactctctgaatctgtattagattagattcggttgtgtacggtttggtacaaaatcacggttacatcagattattatccctacattataatatattactaaatatattaacatttttcttaataactattattttttttactaagtttaattttcagttgtaaataaattttttgtcggtaataatacttagggccagtttggcacagctgtgctgtggggaaaagcagctgtagctgtgctgtgggaaaaagcagctgtagcagaactgtggaaaaaa

SEQ ID NO: 124041 - DNA, 899 bp, Cannabis sativa
tttttaacgagaccttatacaccgtcaggtaaaaggttctcctaaaaatttgtattttattaaaaaatgtcgcatattttgtttacaacgattttaaaccgtcgggaatactaaattttttccgataattttaaatagttaatttttttagcgacagtttccgaaaaaattattttaagaatcgtcacgaattttgatatttgtagtagtataaatttgaattttgtaaaaatggaagctaatctcttgaataaaccgaagctaaatggccattttagagtattgtgctggactagagattttctgtcagtgataatattgttgtaactctattttgtttatatttgagcttttataagggatttattctcacaatttcgttagtattttgtaatgaaagtagttggatcatgcaatttaatagtttacgatttttttttacaacagataaaacttaatacatataacatttgcaattaatggtaatgaactatttacaaatttatttgaaatataaccattaattatatagacaaaactattttttttttttaacaatacctaaaaatatattggaatctctttcatatacaaattcacaaggtcaaatctatattgagcaggttggcaattgtctaccctaaaaatttatcctttcattttatttatatatatagatgtagtgagttattactgattaaataagtaatattaaaaaatttattgaatttttatatttaattttttctatttaattagaaaaaattcttatttttacattatgggctaaggttgttcgattaattgaaaaaataataaaaaagtgttttgacaaaagaaaaaagttgaatttaacttaagtattttttatataaacatatttttaatataatataaaa

SEQ ID NO: 124042 - DNA, 937 bp, Cannabis sativa
aaaaaaaaaaaaaaaatcgaatataataggtccattttcgagcactaaaacacacactacactttgtatcagcccagacccaatgaatgatcatgatgaccacaccacaaccagctttcaccttctctgtttcactactacttcatcaaaatcatcagaatcatcatcgtcatcgtcatctgagtcaaagtctccatcatcaatatcgaaatcagcatcgtcgggatcatcgtcctcgtcttcatcacgatcaactacgttctttggtcccacagcttgcaaatcaaaagcagaatgaagatcgcagccctggactttaagagaaccaaagttgtagagatagctagagggaacgaaacaagactcggggagcggtttctgagccttcgtaataagcagagactggattaggtcgccgtttgggggaacagttggggacgtggaccggggccgggcggcggctaatattgagctccgaaacaataaaagagaggatttcgcgtccttcaacaccattttggcagccatttttgaacgtgttccaagtttgtgaagggaggcgatgaaggagtcttcgggttatgccattttgtgtatatttattgcaaaggtttagggttttgccgtactaaggactgtgactgcgagtgagtagtttggttctagaatgtgtttaattgttaaaaaaaaaaaaaaaaattaaacaagataagaccgggccaccaggcttcattctaaataagtggatttatattgggcttttgatatcccaaaaagttacttggatcgacttgggcctcaaatttgtgtttttactggacaattgacaatgcatactattttgcttctaaaaacccgaactatgacgaaattacactctatattttttttatattgttctctttcatttttactctcttttttaaagtctatcatt

SEQ ID NO: 124043 - DNA, 1488 bp, Cannabis sativa
aataatctggattacattgaaatagagttttatttagggtataaaacccaacacttgtatatggaaccccttaatttgcagtctccttcgctcggttcaaatattattgattttgggatatttgggagttcttcgtaggagccacaatttttttcaagcttaatactcaaccaaactcagttagaggaacttacacttgctttatcgtcagatcatccatatgttccttctcctccatagccatcgagacctcccaataataataatgtgaattaagacttttttttaaagaccttaatgataatttttttagaataattagtttaagtttgttaataatttagacactacaaatattaagtatattttatttatttagtttaatttgagacattgaaatagtaatgaatattgtatttattatttagtgttaaattataatatttaaaattagttaaattatatttaatttttatataaatttatatattatttataatttattattaatttttatatttatatttaattttaatataattaatttatttttattatttaaatatttaattattagtggcagacaatagcagtggatgcccaccgctaataactattaatagcgttcaactattagcagcatgtcattagcagtggataccccattactaatgaccaattacagtgtattttatcattaatagcgacgaactcctccgcgctattaattattgataaatgttatagtgacacactcgataagaaaatattataataccaaaattaacttctagaaggtccgaagtggttacttaaattggggtgttattcatccaatccgcacttctaagtgtggattttatattttggctccaattcaattcgcataataagttaaatccaatctactttaatccgtaaaagtacaaatttgatcaattattttagattggttactttttaatattaaattatttaatatctattaaaaaataattttatccacattactaacaaaaaaaaaaaaaacaaattattattattttttttgtctccaacaataaatttaaataaataaaataaaagataacaaattcaaaagaagaagaaaataaatagtatgtataaagaaatttttaattttgttttagattatatttttttataaataaaaatgaaatatatatttgatctattaaattttgaaatatatatttgtatatgtcttagattttttagaacaatatatgtattagatttttaaataatttttttcacattaaaatatatatgtaaaattttaaaaatatatatataaatatgtgtgaattggattgaatatgttacttttatatatcaaataacattctatccacacaattgtcgattttagatttttcaatttaatctactgttgtgataaatctaacacgcaagtatacgtatcgttttaacaagtaatacttaggtaagtgagatcgttcccac

SEQ ID NO: 124044 - DNA, 1517 bp, Cannabis sativa
ttttttttttttttgaaaataatcgttcattaataaataaaattggatgtcaccgtcattacaaaataaatcttatggagtagaacagattcctaaattaccaaattatctgtgggtaaagactcatttggccacattgtgagtggcaaaattacaagatcttggtatacaagtaaacacgcatccatcaaaacatttagagaatttccaacaaaaagaagaatagttctcaatctcctaaattgaagacacttgattaagagcaacaatcatcactcttgagtcttgagtcactctccacgataatgaactcgtgccccttgagctttgccatttcaagagctaaacaacacgcagctgcctcgccacaacaagcattagagaaatccaaccttacagtattagcccaaaccacctcacgagaatggtttttagctaccaccgcaatgcaagagaatcttgctctctctcgctttcgaatatagtctctaatgatattggataattatatgcagtacactaattaataaggacgatttagtatatttctttatcggtttgattattaaaaaaaagaactttttacctcaatttattgtaataatcaatatatatatataaaggaatgtataagagaggctatgtggcatcacatataagctatcttttctactctttattttctctatttttttattttaaatatttttatttctgtttgttctgcaaagaccaaattgaaacttcagagcatttattcttctctttccccttctttaacctttgtctatctcaagttgaacatttaatggctacaaggctctttgtcccacccaaaacaaagtgtattggagccatgaggtatggaatagacttaatatacctagacatagcttttgcttatagataactatctaagatagacttaaaactagagaaagactgcataaatttaacatcattggagaagatttctgtttgttctgcaaagaccaaactgaaacttcagagcatttattctcctcttgccccttctctaacctttgtctatctcaagtaaaagcttggcttggctggagagttgaaaaaacaccctgaagaggttgttaaggtggttagaaagagccaaaaccagcaggtttcgcaaggcagtgcttactgctgcagtagctgttttggtgtaccatttatggaagaaccgaaatgatatgtatactgtgaaattcaggaaagcaagcacatgaacagttcatgtcacaaaggtagatgtgaagagtagagtggtctgtaattagcctaaaaatgtcaaaccgattgatgttgagtaattttcagcattgtaactcagttctttttgttcaatagagttaaattgtttgattatatactgtattcatcgtacacatataaaatttacatcttcaattgaagatgctaataggttgtaaattgatattttggagtaatgaatttcaaccaaaaaaaaaaaaagatttttattaatttatttaaataaa

SEQ ID NO: 124045 - DNA, 639 bp, Cannabis sativa
  modified_base (608)..(610): a, c, t, g, unknown or other
aaaaaaaaaaaaaacttttaaaaaaaaaaaaaaaaaaaccttgtaattttctccaaattttatttaaaagcatcaataataattgtatggtagctaagaggtggcattgtgaagtacgtgttacacgaaaagtcattctcataagtgattgagcataatttaccttctactgtatttttcttaggaataataaagtgatcatgagaaaagaaaactgagggccgccttttctttgtccttacacattcatctattgaaagaaaacataaaagcacaagtaatgtatagttctatttattaaaataaacaacatataatatttttagtttaattttataaaatatttttaaataattttattttagagtatatgataagagagcttttaagtcagctccaatagaacagtaaaatatcaaatttgattagattttacactaaattcattctaaacacattttaaaaactatcctatttatagcattgtctatagtatcccactatatatcagtgtgacgccatagactataccaaatctttggtgttattgtcgacaatgtcccacatggaataaatggtagagaattgagccatatataagaacatgnnntactccactcattgccaattggttttgag

SEQ ID NO: 124046 - DNA, 1103 bp, Cannabis sativa
tgcttgacctggaacaacaattttagggtggctgatgacctcctgggaagtcttcccagaaagtgtgcaagtgatgacaaagtacgttggaaatactcgtgtttgtttgtaggcaggggcggagcaagtcttcccagaaagtgtgcgagtgatgacaaagcacgttggaaatactcgtgttggtttgtaggcaggggcagagctacatacaccccaacaagggctatagcccccctgaatttttcaaaattatgtactaacgttgatatacataatcatatgtagaagtatataaaaacatattaatgcaggcacaattttttgtggatgaaaaaaattaaaaaaaagttaatgtttacttatttaaatataatttattattaagaatatatatagttttattatatatatatatatatatatgaatgtaagtgtcatataataattatattatttttttattatatttaatttgattagttttaatttaaaaatatgtacagtaaattatttaattaatagtagtaaaattaattaattatactatttttaaaatcaatataattttttttttccttaagaaaccacatattaatattaattttagtaatatttaattgaaccttgtcaaattttaaagtatcactcgtaatttatttttaatttaattacttgatttatttttttaaaatactgtataaatatttataaaatacattttggtcaccaaaatttaaatttattgtatattgcattgtcccatattggcccccctaattatttagttctaactctgctcctgttaatttgtaggatcaatcattattccatgacgttacaatacatgtatcaatttgtagttgttgaataataatataacccataattgaagtagtgatagattggtagctagcaaactatgtgatagattggtagctagcaaactattttttcttcttgttatttattttttacaatgaacatgttaaatatggtacactatgttcatgagtataatttaaatttattatgtgtttttttttttttttgaaagaatttattatgtgtttagaaagggaaatttcaatttttgaccctaataa

SEQ ID NO: 124047 - DNA, 1965 bp, Cannabis sativa
ttaattttaacgtacttaactatactccttgtgggatcgacctcactcctggtgagtctactacttgaacggtacgtacacttgcgtgtgaaaattattgcaacaataatcaatacattgattcacattttctattctattattatgtaccttgacattccggacccgctaaatcgtgtcaattacaatagaggtataaaggaatacctcatctgtgtttatattcatgctttttagattccacaaaaattttacccagtcccacatacgaattcctgatcctgtaacagggaagataccccagggagaggatcgctataaatggaaagccaggttataatgaaggaataggtgctcaatggattcttcatcaactccacaaattggttatgtactgtccgctatatgaaatcgcttaagtaaagatgccctaaccgacagcgtatttgagaggatgctccaccatagtactttatggccttccaggatcttgatgttccacggtttattccagagagaaggggcaacctcacagtgagggaatcgttggaaagcctggattaagtaggtcgatttgcaagagaagcgaccagatccttccttcgtccaaatctaatggtcttttccttgactcgaggttacctcctttcagaatggcagccactgtctcgtgattaaataagttattcaatttaattgtgtcccagctaccagattctgtcagaagcttcgacaccaaagtgtaagaacgcgaatggttattagaacattatgggtagaaaaagttgccatatatgatctaagggtcctcccaaatattcgtgtccctaccatcagtgataactttgtaggcccctcttttaaggatatcattagctttcaccacactcttccagaaccaggagtccgaggttttgcatctgaggatattctgtcccctaaggtatttaactttgagaattctacaacataacgattggtaccctgtaagcagcttccaaccccatttagccaagaaagcctagttcatctctcttgtctttctaaaccaaggccgccttgagatttagggaggcacagcttgtcccacaccttcaaatgaattccatatgtcacagccgctccaaaacctttacaagctccatcctcctccaccgtcgttgtgctcgtcttcatcctccttgaaattttcttttacaaattttgaattgttgttcacttgacgatctcgaaactttcttcgatttgcaagcttcaaatttatttgaacacacacaaattaagatcaacaaaccaaattatggctaataaaaatttcaacaacaaaaaagagaatgttgtgctaacctttgtgctgccatgagagagtagagaagagggcatagcgagagagagtggaggagagtgacgacatggctcgtggttgcgaagaagagagagtcaggaaaccaaatgaaatttacaaatgactttgaaaaaatgagatatgttttttttttttggagagtatatatctcaagagggaaatgaaatttaagacaagaaaaataaaaatttaaaatttaagatgcgggaaatgaaattttagatctgaaacacgtgaaattgaagcatgggaattgccaaaagttttaaactattggctatactataggggacggtttaccgtcacctatagtatagtcgacagattttaaccgtcgacaattctgttttacaaatacatgggataatttaaggtacgtttaaaaatcgtcgcctatacctctcgactgtttaaaactgtggggaataccctatatttctcgacggttttaaatagaaccttaattttttagcaacgattccttaaaaaaaatatttttagaaccgtcgcgaatacccctttttgtagtagttgaaatgagtgtaacaagcaaagagaaaatatgtttgatttttcactctcattctctctctctctct

SEQ ID NO: 124048 - DNA, 722 bp, Cannabis sativa
cctcaatagaattaggccattgatgctctccaagccaagcatagatagtaacaacaacctgtttagcaaaagaataagaaaatagctggtggtcatgtgttccggcctctacctcacaaacagggcacaaactgctagagattatcatgatttgagataagaaatcttgagtaaacagttgggtaaaagttattttcccatacaagaatctgtgtttaggcacaataagcttatcccaaacagcactagcatactcaatcttgtccacattcaccaacaagtcataatatttcttagcgctaagcttgttccctttaactgcaagacaaagtttatcttcttccatagtttcacggagtcgaagaatcttcttgaaataccagccatcatccatcttcattgggtagtcccaaatatcatgctcttttagataaacagagttaatccatttaacccatagaaagtcatgtttactagtaagagcccaaaagaatttagccaagagagccttattccactttttcccttctcggaatataattcctccaaggtttttagggagacaaaccttttcccaggaagctcgatgaagcttgctcctattcccatttgttccccaaaggaaatcccgacagttcttatcaatggcagtcgttatctttgacggaatagttaaaatactcatccagaagttccttattccaagcaacaccgagtgaatc

SEQ ID NO: 124049 - DNA, 4225 bp, Cannabis sativa
  modified_base (251)..(276): a, c, t, g, unknown or other
  modified_base (4155)..(4161): a, c, t, g, unknown or other
ataataatattataatattaataatatataatattaattacagttataatattataataatattaataattatcttattcttagccactaagaaatttttacttttagggtatttggtcaactacgagtaccccaaaatacttcggtatttctaaaatcaatttagcacaatatttctatcaatgaaaccttgtatgacatttttggcccccaatcgagtctctaaggttgccaaacctgaaaatattttnnnnnnnnnnnnnnnnnnnnnnnnnntcacacatgctatataaatcttcgaaatttataaattacgcttatttactcacttatagcgaatttaaatttatgttaaactagattagtaggatcataatctcacttattacctgattaccccataatatatttataaatcctaattacttaccattagtcttactgggatattataaccatcccctccttataaaaatttcatcctcaaaatctacctgaataatttgggaatatgaatctcgcatctgcgactctaattcccaagttgcttcctcataaaataagttgtttgaagttcaatatcatcgtaactcaaaatacgtatcgaatctgacacatactttctcaacattgagatgtggaagacattatgcaccccgaaaaatgtgggtgataaagctaatcaataggccacccgacttactcgctccaatatctcaaaaggatcaatgtatctaaggcttattcttccattctttccaaatctatgcacccctttcataggtgatactcaaagaaatactgaatctccacttgaaatttaatgtccttatgctttaaatcagcatagctattctatgtactcaatgaagcgagtatatatcttgaactcactctatgattttataagttccttaaaactttttggtccatcgcgttctttaattacctgtattattctagtgaataggtgtccgatatctttctcgtaccacacttattaacgtacctaaccaatggcacatttaatcatcacttttagacgaacactttgtcgggggaagagtacattgttctttttttttttgatgaatcaaaatgtgtatttgctcaaaaacaatttgtttacaccctaatagcacccaagaagggcctaaaataatcatctatacatataaatctcaactcatgcttcctttctattcatttacattattcacaaactaaaaaaccattgtctatcttcatctgatattctctttggccaaaaaagctcaattctatgtgtgacacccgatttgagctccttaacaattttgacaggatcttgcttctcattgttccatagacacttatttctaagataatctaacctttatcaaatatgctcatagcatatttctaatattccattcatcctctcagattacctcatgaataaaacattatactatttttactttaatttctatggttctcgataaccttcattaaatcttaacattatagccaaagatatcaactttgggatttcaccagattagactattcattcgtatgaattctatatcctcatttattgtataaattgtatgcattgatagacaatatattaacttagtatgttcaaccgttactactcggttgaaaccataagatcccacaatacatagttcataattgtgtctttctattcctcctatgggacctcttaaactggtctgctgacttaacttattaacaagttaattattcttttctaatagatattcaattagagcacttcttatttctacttattaacatatgcttatctcgataccttataaatctttacttattaacacattctttcctcttggtaatctctgtaacaactattgattctgcatcctaatatgaatctttctagcgtactttgtcctcactcgtacgcttttcgagatgactccccgaaagatttctcatcttgagattaccccaagttaagtatacttaacttcaaggtaagctcatggtgggctatcaaaaagtagatgcttctttgtcattcctacttgtattttttatttttgtcctttcattaattaaatctaatttcctgaactcttagctaataacaattaatcaaagatcatttcttgatctcaaagcttcatatctgtgttaggtaaaaatcttaaaattctccttttaatacaccccaaaatatacatatctcaagtatattctctgttttattgacaatcccttggtgtgaactaccactccaacttgtagtgagtctcccattgatgctattgattcatcaacatctaatactctcatattccttttccattattaccactaaggttttactccatgattcgtatgctattgtttccttgcaatcatcactatcttcatacttaattaatcgctctaaaactcattttaccctcaattatgcagtccataatttaataaacaacctactttgtgattcaacattcactaatcactcaaatacatgtccattaaattacatctcaatttataagcttttccccattctgggtgagtatgtctttccgtcattgcttaataaggtaaactcttcccaaaatttcaatggtcaccttatataccatattgactatctagtcaattataaaatcactctccatcattaccgtgtcaccataagtaatataggtaatcttctttaccttagtgataccactactctccctgacgttgttttatacattaccctagtaacgttcctgcttcaagcttccattgggcccttacacccatggaatgatgactcttatacatgagtgtgtcactctagctgcttcttgggctgacaactggcccaacagaccaatccaagtgttttcaatgtgttttgctctaactcgcacgcttcattgggaaactccccaaatgaaatcactccaggtcaagaacacttagccgtggggttccttcatgatggctaccaaaacaagatacttcttgctaatatgggtagtcacaagcaattcattcaagtcctcaacaactatgtagtaccacgcttacataatcttaaaatcatcctatacaaccttcccttaagcgatgtgggattgtacggctcctggtctttccttagcagatcacaaggctctgattgtcacaacttgactcatgccttttggtagtgaatagatccacctacacaatcgttgcctttaattcacttagggtttcggacaatactcataaattgtcccacctatactaatactagattacttctagacaaaaagattgttttaacaaatttaactcatattgtcaattccctaatctgtctaccctaccagatgagttaccactaactaacatacatgcacagtccattcagatcttttgatatcccctcattgagtgtacaatgtttaatatcaatatcaattgaaacaacaattataatatttcccataaaattctaacttgagtcggtcaaaggactgatacctgagtccccttgagttataaccggtacttgggtaagacctgtacacttttcttctttaacatcagtctttcttaactgtgggcaggttcttttcagatgactcactatcccataataaaacaagatctggctctacattgactcaaatggcacatttttgcatcttgaatattgatgtgtgtcgtatgccgtatcaaatttactattttcttattccaatactttcaattatttcaatataaaagtaagtacgaatcgaacccacgaggactatgtttattcaattattcaaaaataatgacaagatttagaaaaaggagatattgagaatgagattaaaataatagaaataaagataagaaaaacaaattaaaagtgagattatgatatgagaaactagttataggttattcgccaccctcaacaatcattcctaattcctattaatgaatgtaattttctatttttaattaaactattaatcccgtagataatgctaaagcagtcaattatcctaatctccctattgtatgtaatcaaggagaagctctcaataattaactcttttacctaagtagtaaatccgcgaagcatgcaagttatttaacttagataaagctttgagatttatggagatagannnnnnnaggcaacaaatcaatgaagcatataatttatttaacctacgttctatttttcatcacaattaaa

SEQ ID NO: 124050 - DNA, 542 bp, Cannabis sativa
tttagttgttctattgttgttttactgttctattacaaaaaaagtagtatttttgtaaaaaaattcgtatatagtaaaattataaactaaaaattccacatttaatgacctttttgcatgacaaaattggatcttaaaactaacatatttttttggaatttttatttttatgagactttgggtacatatttccaaaaatattaatttttaaaaaatagttgtttgataggaaatttttttaaaaaaaaatgtttaaaaaatatggagaaagtataggctaactggttactcttactttttttttctcatatgtgtttaaactttttgttaaatttttccaataaagtaatttttttctgaaaggatttatgttcatgattctaattaattacctttctccaactatttatttgtgttaataactcatatgttaattatgttatacttacaataccgataatatattaataaattactttttcataaaataatttagtttaggataaaaattagaagaattactctatatattgtttttttaa

SEQ ID NO: 124051 - DNA, 780 bp, Cannabis sativa
gagagagagagagagagagcttcgtggtggtagcggtgggttccatcatgagtttgaagacaagaaggagagagagagcgaaatctgaatgtttgaacaaaatcaatttctttttggtttttatatgtttagcatgctatccacagcggtttaaaaccgccgtgtatactattattgttgacggtttaaagccgtcggcaatagtatacccgatggttttaaatcgtcggtaatagcgttttaactcgtttttaaattttaaaattgtgactaactgttaggaatagtggagtattcccgacaattttaaacattcacttaactttattagcaacggttctaaaaaaaaatcgatttaaaaataataagaataaatttttttgtagtagtggttagaacttgatcgtgttttagagtacctatataagatgacttataatgctcttttctttaaaatagagaagagaaagtgaaaaaatgattaaaatggagctccatcagatgagctattttagctcaagttttaaagattgttacagtgcctctttatatgtagagaagcactattttttttttcgaacaatatattaatattatttaaataatattttattcctattttaatgtatggtgtaatgtaaaagtttgcggtaaaataaaaaaaatgatattgagagattctataatgcaccccctttaaagagatgtattgatacaccctttacttgtttcgacattcagaaaaaaaaaattagtctaatttttttttttcatattcat

SEQ ID NO: 124052 - DNA, 3086 bp, Cannabis sativa
  modified_base (1380)..(1382): a, c, t, g, unknown or other
aaaagcacatcgaaccaccaccatcccaccggaccaccaccactacctgcaaaaaaaattagagagaaagagagaacttgaacgagaaagagagataccggatctggagttgggcatgtgagtcagggaatgagaaaaaaataaagaatctcacttttgaaaactccattttcgagagagggagagagagagggcaagggcagcggagatggttctgtgctccatgatgccaacaatgagctccaacgccacttgaaaaaaatgagaaagagagagtcaaagtttggaagttcatgatttgggttgggttgagaagaaaggaagaagatgaaggtgatgatgggtggaaagagggagatgaaagaggggcgactgagaagaaaattagggctagaagttagttttatattttagggttagatttttttttaaaatagattgaagcccataactgattctttttttaatgcctatttgcatcggttgtgcactgacgccaatagtgtatataatggctttttgtgtcagttgtggaccgacgctaataatgtatatttatatttttatatttcatcttttactttggtttttatcttagcgtataatagataactaacgctaattaataattatttttgtcagtggataactgaagcaaaaaagtgtgggttgacttttgcgtcggtcaacaagtttgacttacgcaaaaactcctttttgtagtgaaagttagttgttctcttgggtgaatgattttgttggcacttatgcacgtgatcaactcaagcagagtcgatttgaaaaggctgctattgatgtgttgtctgctatgactaaagttttaaaatcttctaagacttatcctgatgttcctgctgatggtgacttttctagttcttcagatggtgatggtgctttctctgtgcattccccagagatctctccatcgatatggatgtagatccatctgtggatatggaccatggttcttctatccctaagtctaatatttagcttttttctatgggtattgatcaaggtccttctagttgtgctgctgtccatggggagccagttaccgcagatgtctagggggagaacattatttttgatatccagggggagcaaggtcttgcaaatgttcagaaggattcaacaactgctggtgtccagggggagcattccacttaggggtgggcatcatctaatacaatccaattgaatcgaatcaattcaatccagtccacttacaaaaagtttgatatccaattacaatgggatgagattggatgttaaaagttggattttaattggattggatcagtttttggatgtcaatctcaaaattcaattaaaaaccgatccaatccaattacattnnntatattaaaaattatttatataataaaaaatattgaaaatataatatatatttattaatttttattagattttttttgtatgttgaatttgtaacacttgattgttttgtatatttatttttataatgttttgttctattttattacttaaaaatgttgttgttttaattatttaaaacttttagctacattacacttaaaagaataatatatttatgacgtattaaacttaaataaaaggtgatacttagcttttacgtatttttattcatatttttaggttaatattgaaatttagttgtgtaattagatatccaattaaaaaaccgatccaatccaattcgtaattgaattggattagattgaattttgaggtctaattggattgatcggacaatgattttccaaatccaatcactaattggattggatcggatgaggaaaaaaatgttgtattggatcggatgcccacccctaattccactgatgttctttcttctgttcctgatgacgatgctactttagtacatgtttcctctacatctcttgttgcctattccagcagtgagtaattatgatcatcgagggggagattaagtgtttcatcttttgtacaaatactctaaatattgttcatattttgggtttagttttttgtttggttgtttttgcctgtctattaaacttaaccttgtcagttggtaaactgtcttattgttcttcttttttattggcatttatttttgtgttttgttactttgtgtctctcttcctgaatattgtgcttggtcgttgatcataatttgccaaggggaagattgtaagtaccatgttttctatatggcaaattatgtggctttttactattttagtatattgaattctggttgctgtcttggcctattgagttgttcacctatgttggtcttagttgcttctagttagtctgatttcatatatagtttgccaagtaaacttttttaattcttttgtcttttattcaattcagtttgcgccaactggcttgaactgttgagttagttagctgagttggttttttcaaagtatggtatatattaagcggatattactttttctaactaactctcatttttagcatcttctagtgattcttgttctgctagggcaaaatatttttctgtgtttctttgattgtgactcgcagatagtaattcattggatcttcagaggttaaagaagtgtgaatttgcaatgtctgaagagagttcagactgatctgctggaggaatttcatcttggtggaaccaagtgcagcttgtcttcttggatctaagtgtgcttaaatccgtgctcttgattgttttcaagagttagttaaatcttgtgtaaagtcatttcagataatgttatttaatttgtaaaattagaactagtgaatgtaattaaacgatttatagtgaatattactttacccgattcttggggaatcaagccctactcgattggaatgtgtttttgatgcggaggaaacttgtaaatctggtgttcattgatttatctttctagacttaactcatcaagatatattgttaaattaattacttagctttcagaattaaaagtactttcagaagtgatgatattattttgcttattccaattaggacaatgttttgatatttttctgttattttgtaattatatttttattgttttaaaatt

SEQ ID NO: 124053 - DNA, 2555 bp, Cannabis sativa
tatattaaccttacatatagatttttaaattactaatcataacataattaacaagtgacctcatatcctaactccattattaaaaaaatggacaatagctttataaagtacgtagaacaatatttgaaaaaaaattgatatacttttattatttatttattattaaataaaattatttatatgatatgtataatttaaaaaaaaaattaaaacatcaccgcgcgggttgtttactagttttataaataatttttaatatattgtacattagtaattaattagtcaaaactctttttccttccaaaaatattcatgcaaagtgttagaggtatattatatttaatttttctttttctagataaaagaattttttttttttaatttttgcaaggagagatcaaaaagatcattttgtgtagccatatatagtagaaattataaaataataatttccataaaagaaaaaaattctattgaatatggaatacaaaagtactatatgtgacctgttttctatttattaaattacaatatctcaaaaaaaaaaaatcacaataagagtatctttaaagtattttttttttataaattaataatatcatcaagatatataaaatatttgttgagaaattgaggggggccatgaccaccccaacccaaagaatacctccacccttgctatcgactaaaacatgctatttagatgtaagttgtcactaaattacttttagccacaacaagtattgtaataaaaatacatctagtcacaacaaattgtgatttttgtgactaatacatttagtcacaacctgagaataataatttataattactcacaacttttttacttttaatcataaattttattaagacaaaaagtaagatattttgtagtgcaaacaaaatcaattaaaaaaaattataagtatatatatatatagtaatgggtaatttgcagccaaactctctatacttttatctttgttacagtttaactcccttactcaaaaaatttatggcttaacttcctggactcgacaaacgttttgctctgtagtccttctatgcattttggtctgttaagtgccaaagtagactgccacagtgtacacaagtgtacacgtggcaaaattttattagtcaacttattaaaaaataatttcaaaattaaaaatttcaaaataaaaaattaaaaaatatatttttttttatctctttttcattttttctttatttctttccgttttttttctttctttcctttacctatttttctttatgcatcttcttcttcttcacactgcccagaaaactaccccaaaaatacccgccacctaccaaccctcaccccaaaacccagcaccaccccggccagactccaatcccgaccagaccatgtctctcttttccttctccatcgtctctcttttgatcccaacgagaccaccaccataacccaaatataaaacccagaacccattataaagaattttttggtctcttttatttgatagagacacatcgggttcggatttacaggggagcgacgatgtttggattccacaggtcgagctatttgggtttccagggactaataaaattttaccacgtgtacacttgtgtacactgtggtagtccactttggcacttaatagaccaaaatagccataataattacagagcaaaacgattatcgagtccagagagtatattcataatttttcgagcaagggaattaaatattaatatatataaaagtatagagaatttaactccaaattaccttataataataatttgtaagaatgttcatgaatatggtttaacagatggggtttaaagtccaaatcaaattcgattgatgatatcattcaattgaaaaagatgcttttatatggagaaatgctaaagggcattagtggtgccaccctcctatatgtcaatatttctattagtctaattaattatcgggtccaatataatttaatataatagcttttagagagtatcgctagtcaatcgcgatgcgacatatcgagaaggtgctaaccactactggtacctaataacaatcctttttatataaaataagaaattataatgtccacaagataaatggcacatggtagaaaacattaattattaatttcttatgtgactcagattgtggcccctactgagatttaaagcctttagaaaattgtacgtgatccttattcaagaataaaaaaacaaaaatgtcctgtgtggcatgcattattagattatactatgatgtggatatatgttattactcatgaaagctactttctctaagtttagcactcatagtccctactactcttcttcggtttcatttattttactttaataaaaatttggaaaaaatctttaatcaattatagagtgtcaccttatagtagcgttagatattagtatttataaaacactcaagaaatatatatatatgttataacataatataatataatatagaatagatgagaagaaagaagaagaagatgaagagagtaagagaaagtgaatgagaattt

SEQ ID NO: 124054 - DNA, 2308 bp, Cannabis sativa
aggcggtgtgggattgcacagcttacccggtatttccccttacggatcacgggacaactgactatcacaatattaataaaatagattaaaaaattcctttacatgctaaaataattaaaacatctaccaaaaggtcgatcaattataaacttacctgttagttttatcattttgttgatagagatcttcttatttagaaaaattatataaatacataaatatataaacatatatgttatgatggttttaattatacttattgtagatattttattacttaattaattttgaaaaataattaatattaaataatttatgtaagatattttaagtaaaatatatttatttagtagaatatttgatgtgaattattagaattgttctaccaaaaaataaaattttacactaaattagtgtagattctataccaaattggtataattattagagatggtctaaggagcacaccaaatttggtatcacactatctctaaatttggtgtcaaaaactatttccactccaactacaacaccaaaaattacactaaaaaattattccttattatattaattatttaataaaataaaaaaattaatattatattaattaactaaaattaccacaataattatatctaaataataatttaaataaatttactgattagtttaaaggtaattaaattgtaaaatcagtaaaataatgttaatttgcaataaatgtaataaaattttacttaaatcataattaaaaatataaataatttatggtattcatatttaaatttacatacaataaattgatttaacaatgcactcttctaaataaaagagtcacacgtgcaacaaacaatttgaattttatttttgacgtattacattttttcaaattttttaaaattttacaagatgtcttaaacaactataatgtatacgaccatgaaaaaaaaatagactagaaaagtctctcgaatgttgaaacgtgtaagaatacatcagtgaaccacttttaaagaggtatattatttttggcgtgttaaatttttctgaatttcttaaaattttacagaatatcttaaataacacgactgtaaaaaaattagactaaaaaagtctatcatgtgccaaaaaagataagaatacatcggtacatcacttttaaataagtacattataaaattttccaaaattaaattcttaattcataaatacatctaataatataaaatatatataaatattaattaaatatatatatattaaaaaaaataatatcgtgtctacaatgcacggtatatatgccttacattgtagtattaacctcaaaatgatgttgaatatggtgtgtcctttgagagtttacccactgcatatatacaatatgtcatgtctttggagatgctctaaggacatctccaatggtgtaccattttaccaaattagggtagaattttcatattattctactctaataatacacaaaatttgacaccattaatagtgctgaattttgaatctacttcaatttagtgtaaatatatatttttttcttgcaattatacccgtattttaatttattatataaaataattttatattatagtcctcaaataaaaaattattataaaagtagtaattgatttaaactaacatattggaaaatacaaaataataataataaaaatactaatattaataaaataaaaataacacaacactaagttataaaattaaaaagaacaacataaataaaaataaacattaagtaaaataataatttaatagttaaattaattacttaagtatcttagtcttgaagaatattaaaataatttaatattttcttggccgacataaacaaattaagaatatgaatgctcactatatctttcaaaatgcattaattgattatatgtgaaaacactataataatttaaataattaaattatttaggtgttattttatttaagtttttatttttaaaaaaatgtgtaatttttagttgatttaataaatattttattttactaaatcaatttaaaattataaattcttattagttatcatgataggatatgattatattataaattagctattttaagttaatattatgtgagatttttatgtaaaatatatttatttagtgaaattttttgtgtgatatttagtatgtattattagagttgttaaatttttttacactaattgactattattttaccaaatgtactccctaatcatttttgtaaagtccttttttggcaagttaggtgacaaaataatttttcctttttatggtaagat

SEQ ID NO: 124055 - DNA, 825 bp, Cannabis sativa
ttctaggcaaaattaagggcaacaataccaatcccaccaatcagattaagtggtttttttttttctttctatatatatatatatatatgtttttataatataaaatctatatatagtataatttatacatattattttaaaaacaaaaaatcaaactattatatttttttatggtggttgatttgaattttaaatttaatttatatatttgtttcactatcacaattaactataaacaattaactataatataataattgaatgtgaaaaaaatattagtgctcgatttggacaggttaactataccaaaccgaccaattcattgaacaggttgatttttttttttttattatttaggcatgttgtatttaaatttttgtaacacaatgtttatgttgagttaaataaaatataacataatatcaatcaaaatgactgacacccttaaattcaaccaaaaagggaatagtaagaaaatgagtctttagttttaatagcccatgtatttttttataaagaggactacatgtccactataagaaaaagaaattgggggaggggcaaaaacggtcaaattctctaaatacctcgtcttttttgtaactcttaaattcgatataaagtaacttgtatattaaaattttttaatactagaattacgtaaaaatttcatttcataaatacattattattcagtcgaactacataattatgaataaaattaataagaatcttaaaagatatatttatatttatatatatatataagaaatttctgctattataatgtattaggaattactcctaaataatcctgtataaata

SEQ ID NO: 124056 - DNA, 2082 bp, Cannabis sativa
  modified_base (2008)..(2035): a, c, t, g, unknown or other
caacataaaatgttatttttgatcattattaataagtagatctgattatattaaaatgggttttatttaggcacaaaactcaacacaagtctcaatgtaattacccttattcttctaagagagattaaaaaaaataaaaaaaaaatgtgaaatgtaatataatttaattaaatagatatttcaacttactttctcataacgcctctcagccatagatttcgttccctatgttgtagggtactacatctttttctattttctatatttattttagaacgagcaataaactctggactagtgaaaaactaacaaataggaagccattgctctggaatcagttcactaggcgggtgggcaacatcattatcaaaatccacaagacttttatagtattttttgaaatgaacatgtcttaaaatctttcgtttcttatatatgtctgccattttacccatgcaatgtttgtaattatttcagaatgttcattgttgtcgatattgtaataatactggattaaaagaaaagaaagaaatatgttagcaacatagaaattgtatgtaataaaaaacaacatacaaatatttttacccgaactctgttgaagactgaatcactataaaaccttggaactttctcccaactatcataatgtcttgtgacgtgaattctaatctctctcccaatcaaacgagaaaaggtgccactctctattccaactattctacaagcacgaacatcacccacaagaggtagtggcactgaagattttttttctcctatcctctaagccattaaggacattacaaccgcgtttcctctttcttgaagaaccagaaagctcattttcagcttcagaagcttcagtagtaaactcacactcagtgaaaatcctaggatctggtgggtcctcacccccaccatcacctccatggtatctagcaatatctgcatacattatactaaaaaaatacaccatctaattaaattgtatctaaatatatgttacacattatactaaaaaataatacgctacattgactaaaaaaattaccactaaaagacagatacaacttaatttcaagaatactataactaaatacaataatcactatcatcatcactaatcaaatttgagtctatttgtggggatggggacacatcaattgaatcatcatcgatagcattatcaacaagtatgtcatcctctgcatctaagatttcttcatcttcatcatcatcgataaaaccatcgtcatcaggaactgttagtaaactttgagggaaatcaatggatgttggtggatgattagtttgttgtacatctaacacatccaaatccacgaatagtgaaaaatttgacgaatttgtttcatgtacaatattgatgacagcatcacgtatgtcattcattggtgccatcatcaattttgtcccaaagttggcgatgattaacatcttggacaaccctccaattatgacctctaaccaaatcatccataaaaaaaaacttgtttcgcttgattgcctagaatgtacagctcatctttgtaccattgactactcacacttatactagtgatgttattttcggtgattattttcatccttcttggatctgtgctgaaccatttgcacttaaataatacaaccgaataagcaccactaaaagacagacgcaaaatttcgaaaagttcaccataatagtcaaaaccttctgtccccttaacaaacacaccattattttgagtgaagcgtttttttatctctttcgagtgtaagaaatcgaatctcattcattaaacacactgaataagagtaaaccacaatatcatacccagatgctagagctagaagttcatcaccatgctctaaagactcaagacaatttagttgataaatctgcatatagtaaaacattgtaacataaatttgagagtaaaccaaaatattctaacaaatatcttcaaagtccatgtgtgcaatattgggttttgtgtcctaaataaannnnnnnnnnnnnnnnnnnnnnnnnnnnttaagagatttgaagtgatttattgtaacaccctaactaacatatgc

SEQ ID NO: 124057 - DNA, 1360 bp, Cannabis sativa
ataacttcccctaagttaacccaagatggcatggaagccactatgccatcagatgagagtggggaaggttttgtgttccccaagaaagtagctacatctactaagtgtccccttcctcctactggctctaagaaggtagccaagaaggcaaaggtggtagtaatggggtagcagtctccggggggagaaggagatttgaggcaggttgagatcccaagacaataacaaaccaagcagtaaccatcccaatcacaacaaccaaaatagcaacaaaaactctaccatccacattaaagaccagtacaaccatcacaagaaaaataggcacagccatcacaacaataggaccagcaacaacagtagacgaaacaaatccaacctcaccaaccacaacaactgcaagctcagcaaccaacataatagccacttccacaacctcttcagtaagatcagcaatagcaacagccacaaaagtaggcatctactacccttctatcggtcccctctcttaacttcaaatggcatttgtgccccaaagaaattaacgtcgaggtcctaaagaaagtggaggaaactcatcaatacctcaaggggcatcatgataaagaagtggcaatagttcagagaaggtccaccctcatccaatcaaggaggtaggctaaaatagcatagggggcgctgcaatagtctcagaccagtagtagattctactgccttaagcaggtatttggtacttaggattgggactaatgtgatgccttttgttgcagaattattgaacaagtggcaaacagaatttgctacctaacagtagagaagtgggctataggtagaagctctaaccctattaccttgtctcacgcagttaaacagcaagtttttggggtaagcacgtcactttaggtcctatattgttattttgttgttgtattatgtgttgacatgtattgctttgttatatcaaatggctccaatcgtggagagggcttcctaggaagttggcactatggttgtagagcttgagcaggcttaggctaagaacaaagctctaacttcaataatcaaagatatcaaagtccaagccactacttagattgaaaaatgaggacaaaagctaaagactaccatcaatgagcatttaatgaagtcgagacaaaatatgaaaacatgtacaagaaaaagtacaatgagtatgtggcttgagttaacgcatctcatgaggacatttgtcaaaggatcaaagccaaaataaaatcccttgttgaagtgttaagcagccttctacaagagaaatagcttggtgaggctcgagtgatgataatttggcccctcaacaaattataaattaacttatggtatc

SEQ ID NO: 124058 - DNA, 603 bp, Cannabis sativa
agtatgctgctaaagatgaatatggaactaaccatagaggtggtgccattcagtagccatgcatatgcttttcatgaaataaaaacttgtgtgtttaaccgttcgagaaagagagtattcttactcattaattatcactatgaaaaataatagtttgagtaagagacctattttattatatatgtaagattacaaattccaattctatgataaagttgtatttgttttatcataattcaactatatacattgtaagttacaagtatattgttttgaagttcatcaaggtttaagttgatatttgcgaatacagataaagaaaaagagtattgctattaaacatcttaaggtccaatataatctcgtgtagcgcattgtttttagttagcatatattatttattaagttaaaatatgtagcacccgatataaattgcaccaacagtaatacgtcacctttgtgcttaactgttttagcatttctttaaagaaaaaagagtactgattgtaacgttttcgcttcaagtctccattgggcccttacacccacggaatgaatggctcttacacatgagtacgtcactctggctacttcatggaatga

SEQ ID NO: 124059 - DNA, 571 bp, Cannabis sativa
ccatagaaaagtggcaaatctaaaaatgccatatttttctaactttgttatgaaatcccatatttcatgtaattttcagtattattatagcttgaatgtttaattgttacttctgttaattcggtgtgtgtttgcacttaagatgttgatagtgtgatcttcttaaatattgtgaggtcccctttttaattctgtaagatctctttttgacaaattctaaaaatgatttatctcatttaactatttttgtggcactcgttaagtacatatataataaatttgatattaatataagagaaatactaaaaaatactatgtgttattattgttattagtctaattaagtattgaattctatatagtttgatataataatttttaaggaatatcgctagttaatcgtaaaactgacatatttagagatgttaggcaccaccagtgtccaataacaatatttttaatataaatatattataaataaaaggttaattagcaatttttcccctcgaactttgacatgtactaaatcgtgccccttgaacttttttggccgttagaaattcccctcgaa

SEQ ID NO: 124060 - DNA, 1324 bp, Cannabis sativa
aagagtaattagcttcattggtagttattatattacatttttttaaaaaaaataaaaaacatattacttattatatatcatggtcatggataggttggagttgggtgtaaatatgtacatattttcatacacattggattttaatatatgatattatattgaattgcattgtatttaatatatttaatataatattatttttagtattaatttatattaataaattgtatgaaattatactttctttactataaattcaaccaatttttttagagtttgaaatccagaacttgggctgtgaactccaaacccttttaaaatattataataaaaattaatacgaattatttgttacatattaaataatataatttttcgtcgtaattaattaatacaatataatattttatcaaagcacaatattattaccttttatttaatacaatattaacgcgtcctatatatatatatatcctacaaataaaaataaaaatataaagattcccaatttacttagtcacaatttcataatttgtttggtgacaattgatttaataaaaatcaagatcatgaagtcatagacaatattgactatgatcagtttaaaaataattaatgaatgatcaaattggaatgctttttatataagttgataattaatttcttcaagatttcgagtagtaaataaataaataaatatatatatatatatattctatattcatagttggtggttaacactaaaatattataatgattaattcccttccttaataatattatatgttcatattacaaaatattatgatttagatcaatgtttgaccaaatgctcagtcagtatgatttttgttgactgacgaccatgttaataatatcataattaacaacagaattcatttttacaatatgaagaatatatatgaaaccaaatccaattaattaaaaaaatgattttgtttcttttattagtttgtaaagtatataattaaatggtaaggaatgtaaaattgtggagttgttaaggctacaaacacaaacaaatttttattcgaaagaaatagtcttgatcaacaacaagtatatatcttcgtcaatttaatatataatataatatacaacgttgaataatataattacctaactataaattataagaaaaaatgatcatcctatacactaaataaattgagcattatttacagaattatcacgctaatacttaattaattagctttaagataatcaccctcaaggaagtggacaataatcttttttctataaccaatggaaacatctatctaatatatataaatatatatat

SEQ ID NO: 124061 - DNA, 2276 bp, Cannabis sativa
  modified_base (572)..(573): a, c, t, g, unknown or other
tttagggcataaattcccaacagtcgtcactattgtatttcccaaatctatatcttaatcttagatttcatctcgaattttaaatattttattaacatttttaagacattagggaaaattcattagtttgttctgttattattaattaatatattttataaaagtgataattattttttaaatatcttaattaaaaaaaaaatatataaaaaatgtggtactttagttataagaaatgctaaaaggcaaccctccttggtatcataccactattggtaattaagtagcatgtcccatataacttaaaaaaaaaaatttaggaattatcgctaaccaatcgtagggtgccatctatgaaaggtattgggcaccattggtgcctaatagcaatgccctttagttgtaattatatgatgcttgacataaaaattatcatttcaaaaaaagacgtaaagtaggcttttgttaaaaattaattaatattttttaataaaaaatttaaacgtggtaaaaagcaattgaaatattattttaagtatcacgtgtacctaattcttttattattattattnntattattattattattaattttatatttttctttttttaaaaacgccaaaaatttacatattaaaatcatcatttttatatatatttttttaagaaaagcgaaaaacgttaaggtatatatattgattaatattttatgtatgtatataaataaaatttacgattaattatatttgatttaagttttaatatttttttttggaatttattttttattttctaactttttttaaaatatatatatttttatagaaaaattattaaaataatattaaaatatcaatttgtagatttatactttttatagaaaaattattaaaaaaaatattaaaataccaatttatagatttatgctttaataaaatattaaaattgagagaattaagaagagaagagaaaaatagtttttgagtgattttagaatatcatgtcactgcctcatatttttcctttatatatatgtatataaattgtaggtgaatgatatatatatatatatttaaaaattgacatatattttttctctttcaattcaacaatattaatatttataaaattttaatataataaaaaaataagaaagttataagcgtatttaaaataagagtatatataattttttttttttaaaataagaatatatataatttttttaaaaaataagaatatatatagattgataattgtagcatatttttttagcctccctttgtgcggtgtgttaaatatttattttcgatagttaagatacataaacaaactaaaattattatatttacagtttatcacttattgtcgccactacattcaaagccatttgtattaccgtttctcacttgtaatcgctactacattcaaagttactatcatcaccgtatcttacttataactgccaccttattcatagtcgttgctattatagaccaaatattatcaaattcaatagaagaaagtaaataaataaaatcgtttgaaccaatttttttaatatatatatatatatatatattagtataaataaaatttttattcataaactataaatagtgtactttcaacatctaccaaataaaaagaattaatatataactcataataattatttttataaatatacatatgtatatatgtatacatatgaatcgtgaaatttttaatcaattaaaagtagtcaaaattgtgtacgaagatggagaaaaaaaaagagttcgtagctttaaatttaacaaaatattatacaaagtatgatataataaaaattaagaaaaatataatatttgatggataatttaccatagaatgctagatcaatagcataaacacaaataaaataaattattgttcgataaaaaataaaatttaataattgatgagtaattataatataatttagtgactaagagaataaatttatattatttattaattagttaggaatatctttcaaatatttctgaatatgtgttctaacaaatatctacttttttttttttattattttgttaaattaaaaaaaaatatagatataactttttttaggaattgagtatacacgaattcaattttttttttccttaactttaactttacttaagtacatatatagatggaacacttctcaatgagtattacctattgataggtactaaataaatctaactataaatattaattttaaaaatattaaaccattagattttgat

SEQ ID NO: 124062 - DNA, 840 bp, Cannabis sativa
  modified_base (793)..(806): a, c, t, g, unknown or other
taaaaaaagtagtattattgtggggggataaattgcaaattactcttttttttatctattaataaaaaattactctcatattgttttttttattaaaatatacctattttttgagtgagttgccaatataccttcactctctacttaaatctagcaaataatttgcattaacttaagggatttaataaggacattatctataaaaatagttatatttttaaaaaaaatatatgaaaaatagagataaaaattaaaacaagtaaaataaaagaggtatacaatataatttcctctattgtgggttaaaaattgtacatggtatttttgtgttaaagtttgtacaattttttagctcgagttaaatttaatacatattttatcaccattaaaattaaatttcaataaaatattttaaaaaataacaatataccacatatataattcttcagagatattctaataatactagagatgcattatgccgatagggagttactttggagaggttaattctccttgcttcctagtctaattaattgtaacttcgtatttggttttctctttttcagtaaagttacagatataaaaaaaaaacgttatagctcttgaaatattagagggtcattgtcattgtccgagtaaagcagggacaagcgcaggtgcgctaggccacgtgtgtatgtgttcataaaactgattatcttaatttttaatcacttaaaagtgagaaatactaacaagtcatgatactattatattagggctcgtttggaacgccgtattaagtcgtatnnnnnnnnnnnnnnttatattgaattggattatatattatatttttat

SEQ ID NO: 124063 - DNA, 1236 bp, Cannabis sativa
caacatacttgtgagtagatctaagatcctggtaaaataatttccaacatgaacatgctacaacagtttatactgttgtatcttttgagcggtggaggaaattaaatatgctacaattttttttatataatttaattttaatttttttgtcaaacgatctaggaatcaagcggctgattggttagctcgtttttctgattttaatcttggtcatatttttaatggaggagatattctgatggagttgcaaagtattattttagctgattattattaataaaattgtatggtttattaaagaaaaagttcaaaatagtaagttacacgcatataaaaagggatacatgaaatgaatgcttgtagccattttcaacattgtagatatttatagttttttattaaaaatacaatcatataaaaaaaattaagttataacttttttctattaccaaaattagaaatggcgtagtagtaggagcagagtgatatttatacaatggccccgttgattaagcttctacttttgtttaaagttaaacgtataaaataagtataagttttgacttatttttactactattagtgttttcgaatgaggacatgtgcaattttcaaaaccagttacaactcagtcacttcaaattcaatagaaggcccaaccaagataatggactagatccattagcaaaatcagctcttcccaatgacaaacagatgactcgttcaggcaagataatcctctggcacagcgagaatctagaagagatcattttgagcatctggagaagtagtcagcaaacgtctggacatctaacttcgtatcgcatctattaattacaatctcataatatcaagatttaacttccaagatctcgtccgaagatcatatcttcccaatatgaagagatagtaattgacaatcaaacatttaatatgtgtttattctccacgaaagtaggacacaattttgacaactatcaacattatgtgacatccacatcagcatacaatcgacacctcatgggtcgggctccactagataagcccaaatcaatatgttatttgtatttaccccatcagtaggcaaagtaaaacgaataagaatcatagcactataaatataagaacacttgttcaagcaaatggttagaatctcattcctcaattgctcagaaaaaatctagtggttcaaacacttgtgtaaatcataagaattttccagtcttatcgtaataa

SEQ ID NO: 124064 - DNA, 1938 bp, Cannabis sativa
aaaaaaaaaaaaaaaggaaaacattacgtggtgggtgggtgggtgggtcagaatatcagagaagaagttcaagtcttgaacttgctggttgtttacagtcggcactagccattctcagctggactggccactgtctatcgtcttcctcattgctaaaatggtttcttcagctttggcactagaatcaccataacaaaatcctttattctctttttaaaattaaaaaaaaaaaataaagaaatatttattaataataataataataatattttaaaataaaacaattattaaaatttaaaaccatatatatttttgggtgattctacagaaattaagaggtatctgcatgtgaattgtaagcacgagatattctacaaacaactatttttttaaacttttgtaataactcacaagtataagaaagatatttggccaaacatcctcttttgcccaggtacactccattgacttggcaaactacgatttgcgagtcgctaaatgcttgaaggtacttgactttcatctcgagagcgagctttaatcctgcgattagagcctcatattcgacttcgttgttagatacaggaaattcaaatctaagggcagggtgtaccttgaatttgttgggacttatgaggattattccacccctgattcttcattgttggatgccccatcaacatacagagtccacccttctcctattggtacgttggggtcaactcgctcttctgtgattgtggccacctcgtcatttggaaactcgagtatgaaatccgcaagggcctgtcccttgattgccgatcttggtttatacctaatgtcgaattggctcagttctactgaccatttgagtaatctccctgatgcttctagtttggccaaaacttatcgtaagggatagtttgttaaaacctcaatgatgtgtgcttgaaaataagatcgcaactttcttgaagcgatcacagtgcaaatgctagccgttccatttgcggataacgggtttcagtgtccaagagacgcttgctcacatagtataccgaatgttgtctaccttggtcctcgcggactagtactgaactaatcgcgtattcggacactgggaggtagattgataaaacttctccaagcatcggcttggatagtatcgggggttgctcaagtgcgtttttagggcctgaaaatctttttcacacttttcagtccatttgaaactttttatttcctttaagaatctgaaaaaactctttacatttatcagaggaacgtgatataaagcgatttgatgcagcgactttacctgtaaggctttggacttcttttggtttggtaggagatcgcatatccacctaagcttttattttcgcaggattagctttgattcctccatgatttaccataaatccgagtaattttcttgagcccactccaaagatacatttgagggggttgagtcgcattttatattatcgcaggattttgaacatggcctcaagatgagtgacatggtccctcacatgttgagattttacgagcatattgttaacatacacctccatcgtcttgccaattagatctgcgaacatcatgttaaccaacctctgatatgttgctcctacgtttattaaaccaaagggcattacctgagtatgcatccatgatgctaagaagttcatgacatgtggtagcatcaacaagttggtcaatgcttggtaaaggaaaattgtccttaggacatgctttgtttaaatcagtgaaatcgacgcatgtgcgccatgagccatttggcttgggcgccagtacgggatttgctaactagtttgggtagaatgactcccttatgaagccacatgtcaaaaggcgatccactttttttttaagcacttggtacctcgcggggtccattttgcggtgcttttgtcggacacctcgcacttc

SEQ ID NO: 124065 - DNA, 623 bp, Cannabis sativa
ttcagagttctatttgtaccattttaaaaaatacagagtgcattttgtcatttaacagaatagagggtccaattgacaacttttgcaaaacaatgattccaaaataatatttacacttgttgttttaatgttggattttattttacactttatgttttgttaatcaaaagtttataaatgtactttagtttaataatttttattttatataatatatatatttaattatagtattttctttttaattttttttcttttaattcatatttctaaaaaatatatccatatataatatatattttaaattttatgaccaaacaattaaaataattaaaaaaactaaaaaattatgcatgttttaaaaaaaattatggaagaaaattaaaataagtataaaattaacacaaaataacgtgataaatttttaaaaattattttgagttattgtttttaatattgggatgtacttattagatattattttgtggggtacaaataaaactctttatttatatatttcactaataaatatgttgcgttttgtgtgctgttatttataaaatttttaaattatatatatgactattaattgaacaataaaattatatcaaataatttcaaac

SEQ ID NO: 124066 - DNA, 694 bp, Cannabis sativa
acaaggccaaacaagccaaattattttttaaaacaattttctgtttttaaaaacaaaaaacagttttttaattatgatgtcaaacatgcacttattgttcggattgagtagggaacgggaggctttgtaagcttgccgtcaattaataatgttatattatttttgaagagttacacgaatcaatcttaagactagacacttaatttgaacgtttataagtacttttgctttttttttttttggactacgaggaactcaattttttttctctgagaacgtagaggattttcttgcagctaaaaaaatttattacctattctaagggaaggaacaaaaaaacaaaataaaagttaattagtatcaaatatttaataaataaataaattaattatttaaattaaaataaatatcgtcacacataatttagatcatgtaatattaaaattatctgtgtttcatcttcattgttaaaagcatttcggtatatctgataattttttttagagtatactggtcttacaaaataaataactaactaaccatgcgtaccaaacaaaaattgaaggcgaaactaaccatggccataaaaaaaccgatcatactaacactacaagaaatgtcacttttaccagcgcagttcgctactgcgctggtacttttactagcgcatttcacaaactgcgctggcaaaaag

SEQ ID NO: 124067 - DNA, 2676 bp, Cannabis sativa
atctccgaaattgagaaattataaccctaatgcctaattcttgaaaataaggcccgcagcacatgatattcacatacaaccataaaatataaataattaatgctaattaccctactaatctatattctaagtatgcagtcattataattatcccgttaaaaggatttcctcctcaaaatctaacatgaacaactctagacattgagccctcatgctggactctaattcttaggtagctttctccaccttactattcctcgagagtatttttaccatgttatggtcttgttctgaagaaactttgccatcctatcaagtatttgaaccgattgttcctcataggaaaaaattgactgtagttctagggcttcgtaactcaagacatgagtcgggtctgacacatatttcctcaacatagaaatatgaaatacattatgcacattcgataatattggtggtaaggctagttgatacgctacctgccgaccttcttgagtatctcgaatggccttatgaacctagggcttaaccttttcctcttcccaaagtgcttaacacccttcattggtgacactcgtaggaaaacatattctcccaccctgaaactctatgtctctgcgcttagaatcagaataacttttctgcctgctttattaagcaagcattcgagctttgatcttttctattgcttcactggttcactaaactaattcattacccaaatatttcctttctctggtctcatcccaatgaattggggaatgacacttcctaccatacaacatctcatagggaaccatcactattgtactcttatagcttttgttataagaaaattctatcatgggaaaataattattcaatgaaccctcaaagtccatgacacatgctcgtaacaaatcttttagtatctgaatcatcctctcagactgcccatcagtttgagggtgaaaaattgtactgaacttcaacttcgtacccatggctctctaaaggcttatccaaaactttgatttaaacttcaaatttctatccgaaataatggattttggagtttcatgaagacgagctatctctttcacatacaactctgcatattgatccactatataggttgtttttaccggtaaaaatgtactggctttatgaaacgatccactatgacccataccaaaatatacattctcatggttctaggtaaaccaaccacaaagtccattatcacatcctcccacttccactcaggaagtgataaaggtttcagtaaccctgccagtttctgatgctctgttttgatttgttgacatgttagacacttaaacacgtaattagctacatctttcttcattttatgccaccaataatagggtttcagatctcggtacatttggtggtaccccggtgtagtaaatatggtgtaatatgtgcttcacccaaaatttctttctgaagctcatcactgttgggtacacaaactcgagctttaaaaagtaacatcccattattcgagattgagaagttcttagcttgaccccgactaacacttcctcccaaaactagattaagtttgagtcttctaactgagcacctttgatcctttctaataagtcaaattgaagtgttagtttatgaagtttcccaaatacaaattctataccagccttaaccatattttaagtcaattgacgtgagatcactatggtactaaaatctgtctgggaccttttttactcaaagcatctccaccacaatggctttctcggggtgatataaaatctcacagtcataatccttgactatttctagcaacctcctttgtctcatgtttaaatatttctgagtaaaaaagtacttgagactcttgtggtcagtatagatatcagacttttttctagaaaaataatgtcaccaaatctttagggcaaatacaacaagttccaaattatgtgtcgtgtaacgttgctcatactctttcaactaacgagaagcataagcaataacattgtcggcctgcattaaaacgcaccacaaaccctgtctggatgcatcacaataaaccacatatattttattagctttagaaagtctcaataaacaccaatgtcatctatgtatttgatatccgtaataatgtatatgatgtaatttattgtgcaataataatttctaaatgcattgttaaaatttaatatatttcattttttttaatttatgatataatttttttggtaaatttataattataattttaaataaataacatacaaattatttaatattatttattattaatattaaattaaaaataaattcgtgtccatcaagctggacatgaaatataataatattaatttattgtacttcatgtccatgaaaaaaaaaattcatgtccaatattattgaagataaaaaatacctctttcatgtccctcgatattatgtacgtccaacacaaaatggactgaaaagacttatcatgtccaattttgatggtcataaatttttgtagtagtattaatttatgtaataatctatttatttcacattaggatttttatgtatagatttatttaatcgaaatttatatttttgtatatataaatatatatatatatatggaacttcttgttgggtttcgtgcccaatcagatttactaattaataaaagatcagaaa

SEQ ID NO: 124068 - DNA, 1556 bp, Cannabis sativa
gtacaaccacctaaagttgattggagtaagtttgtatggagttgttttaatattctgaagcatagctttatggtgtggttagctatgcttgggaaagtgaagacgaaggaaaaattgaagagatttggggtgatcgataacgatgactggcttttgtgtaacaatggcatcgagacaattgaacacctcttttttggctgccagttgtcaaaggactgcttcgcacaaatcaagcaatggcttcaatggaggacctctgcagcaaccttgaaaaaaatcaacaagtggataacaaaggcaaaatgtgacaacttcaaaaagaaagtttttgctgctaccattgcagcgttgatttactggatttggggtaaccggaataatggattttggaatggggagatagaaaattgtaatagaaatgtgtacaaagttaaagctttcattaaaaatagaatagtttgtatatggccaaaagatgtaactaatagagaagagtgttggtttaattcattgtaaatctattgtaaagattatagattttagagttggaggtcctctccttgagggtgctcttaggttgtataaattgttgtttggatttaatgcacttgctgatttaccaaaaaaaataaattaaaaaaaaattataacaaaaaaagtgttaacaaacatatctttaactaattcaattcaacttatataatcatatatattgtacatttccctttctcatgagttttagcattaaagtatgagaaaatatgcttaatacttctttcagatttaatttttttgggtatttaatttatctttttcattgttaaggtttcaatttaatgttgcctcacatttttttgtcttctttttcgttttctcactctcctttttttattctttattctttgttaccattcctctttctctctattctctctatgcttaaaattaatttctgttcatatcgttactcggtttgcctaaaaaaaatattattattattccaaaattctacacaaataatgtagcattcatctaggtaacacgtggaacaatttaagacctgaacaagtgatacgtcctcggcatgtcgtccagagtgggctattcttcaaaaaacaacttatttgaagaataagctggagcatcggatagggtaaatgatactgtccaactagctttagtctcacagcaagcctgcatatgccagctagggtgaatgcaactgaaatacctttagagatattttccttattaattttattaattgaattcctattttaatgacaattcaacacattatttttgtaaaataaaaaacatgcctatagtttcccttattatttctcatttatttagaaaacataattgatgtattttttccctataaatagtgaatccctttcattattcagatatccgaattttattcttcaagaaagctctgatgctgtaaaattttaagatttcgagagagatcaagaaactcaattttttctcttctgacaagtaatacaagtaaaaggggagtaggctattaccactatagcggagcaaaa

SEQ ID NO: 124069 - DNA, 3209 bp, Cannabis sativa
  modified_base (71)..(77): a, c, t, g, unknown or other
  modified_base (2437)..(2447): a, c, t, g, unknown or other
  modified_base (3131)..(3132): a, c, t, g, unknown or other
gagatgtgtaaggtgagattttaaaagaacactaacgagtctaagagtaaaaaaaaacttgttaaaatttnnnnnnnaaagaagaatattttcaattattgaattagggggcctttttaaccaattttaacgtgaaaaaaatcttcatattcacgttttagtagaacgaattcattgtgactaatggcaaaaaaaaaagattccaagatgggttcgtgccacatttcacaaaggggtactgttgtgcatcacttttctattggacatgttgagtgaaaaagtaattttcaagcactaacaattattttattcaaaatattaaaaatattcttcttttcagggtaaattttaacaaattttttctttactcttactctcgttagcgttctgttaaaatctcatcctacacatctcgaaaaatcgtaacattttacagggacaaagccaagattgttatgcatcacttctctattgacatgtgaagagaaaaaatagttttcaagcattacaaatcattttaattgaaatattaaaatctcacattttttatagtgatcccatttgtgaaatgtggccaggatctaggaatatttttccccagtaggtacaatgaattcgtactactaagacgtgaatatgaagattggtcttgcgttcaatttttttaaaatgccccctaattaaaaaattgaaaatattcttcttttaaaggtaaattttaaaaagtttttttcttactcttacattctttagtgttctttttaaatctcactctatacatttcgaaaaattgtaaaattttagggggacaaagccaagaccgttgtgcatcacttttcaattggacacgttgagagaaaaagtaattttagccaataacaatcattttaatccaaatagtaaaaatcttatatttctaatagtgatacccctttgtgaattgtggcccgaacccatctcgaaatattttttcccacttgtcacaattaatttttactactaagaagtgaatatgaagattagttttgcgttaaatttggttaaaatagcccgctaattcaaaaattaaaaatactttttatttcagagtaaattttaacaaatttttccttactcttacactcgttagtgttctattaaaatcttaccatacacatcttgaaaaatcgtgaaatttcataggacaaagccaagatcgttgtgcagcagttttctattagacacgttaagagaaaaagtagtattcaagcactaacaatcattttaatcaaagtagtaaaaatcttatatttttaataatggtatgcctttctaaaatgtggcccagacccatctcgaaatatttttctccactagtcacaatgaattcgtactactaagacgtgaatatgaaaattagtttcgcgttaaatttggttaaaatgaacccctaatgcaataatttaaaatattcttcttttcagggaaaattttaacaagtttttttcttaactctttcactcgttagtgttctcttaaaatctcaccctacacatctcaaaaaattgtaaaatttcacaagaataaagccaagaccgttgtgcatcacttttctattggacacgctgagagaaaaagtagttttcaaacactaacaatcattttaattgaaattgtaaaaatctcacatttctgatagtggtacacctttgtaaaatgtggcctggacccatcttgaattatttttccccactagtcacaatgaattcttacttttgagaagtaaatatgaagattggtttcacgttaaatttggttagaatggccccctaattcaaaaatttaaaatattcttattttcatgttaaacttaacaagtttttcccttactcttacactcgtgagtgttctcttaaaatctcaccctatctatgtcgaaaactcgtaaaattttacagggacaaatcaatgacctttgtgcatcacttttctattggacatgttgagtgaaaaagtaatttttaagcactaacaatcattttattcaaaatattaaaaatctcacacttttgatagtcatacccttttgtgaaatgtcgcccggacccatctcggagtattttttcctgctagtcacaataaatgcttacttctaagacatgaatatgaagattgatttcacattaaatttagttaaaatggccccctaattaaaaaaaattaaaaatattctttttttcagggtaaattttaacaagttttttctttactcttactttcgttagtgttctgttaaaatctcaccctacacatcttataaaaatcatgaaatttaacagggatgaagccaagatcgttgtgcatcacttctctattggacacgtgaagagaaaaataagttttcaagcactaacaattagcttaatcgaaatactaaaaatctcacatttctgatagnnnnnnnnnnntgtgaaatgtggcccggatccatcccggagtatttttccccactagaatgaattcgtactactaagacgtcaatatgaagattggttttgcattaaattttatttaaatgaccctctaattcaaaaattaaaaatattctttttttcaaggtaaattttaacaagtttttttcttactgttacactcgttagtgctctcttaaaatctcactttacacatctcgaaaaattgtaacatttcagaggacaaagccaatgttgtgtatcgcttttctattagacacgttgagagaaaaagtagtttttaaccaataacaatcattttaatcgaaatagtaaaaattttacatttctaatagtggtacgcctttgtgaaatgtggcccggacccatcttggaatatttttttcccacttgtcacatttaatttttactactaagacatgaatatgaagattagttttgcattaaatttggttaaaatgactctctaattcaaaaagtgaaaatactcttcttttcatggtaaattttaacaaatttttttttactcttacactcgttagtattctattaaaatcttatataaatttgttgtgttatgaattacttatataaatttacattttttgcatcatgagtttatatttatttacactacaagaaaaggcatttttaccggcnnagttcgtcaaatgcgccggtaaagcttgtcgagatacaacaaaatctgaaattccacttgcatttaggcttcacttt

SEQ ID NO: 124070 - DNA, 1451 bp, Cannabis sativa
ggtgccctaagcggaagggtcccgagcaggtaactaatacgattaagactttacctcagttagcagaagacatggttagatcaagcatcgagtttgttgtaggcaaacttcataacttgacgttgcagtctgttggaacgaattaaaactgctcagttagttgatccagagttagtgaagatccgagaagaggtttcgtctggtcaagccaaagattttacggtgtcagatagtgggatgcttttgtttaagaccagagtttgtgttccaagtagtgcggaacttagaaacaaaattctcgaagaagttcataccactccatattcattgcatcccggcactactaagatgtaccaatttttaaagaaaataactttatgtataagttcctaatcatgggtatatttgaaaaaaagaaaagaaacatcagtctttttctgcttaaccaaaatcgtcagagtttatttttttttgggctgaatcatcagctaggttcatttatcataagatttcttaaatgtgcatctatggctacgagttggtgcaactcttgggtaagaacatttacttataaatgttgggcctcaattgccaaagagcccaaaaactagcgcacaaattgaggttcttgtttctgctatcataaccaatttgattgggattatttcacaaacacacataaatacagttgtacaaaaattttaaatatttttattacttttatgattttatttatagaaaatacagtctttctaatgtatttttatgtggtatttctgttaatttattgttaatttttcgttatgtaagttgtttttttgttattattttgatattatttggaagttatttttttttattcttttggatttttatagaacaccaaaaaagtaaaaaatgaaatatttaaaaataacactttatctaattatcccatttaaattctcatgataaggcccaaagaaagttggatcggtgatacaccatatggaatagaccttctaccatggactttcggggtctgctgacattttataattctactacatttaaagtaattctttataaaaatcagtatctaaaaacagtactcgcataactaaaacaaaaaatgctcatatctctttacataataataaaagaatataaaaatataatttttacataatccttacactatttattttattacataagaaataaaaaaaaaaaaatagaagggtgtgtggtttgccaagtaaaataaataaaaatggtgtaaactaattataagtagtgaatgatactataaattagggttatttgcggcataacctccttaagtggtcagagttttataattaacccccaattctaaaatttttgtggtaaaattccttaaactcaagttctgttagcacttagccctttccgtccatttttagctcttaactgccatggtggaatgtcca

SEQ ID NO: 124071 - DNA, 2044 bp, Cannabis sativa
  modified_base (824)..(825): a, c, t, g, unknown or other
  modified_base (1605)..(1606): a, c, t, g, unknown or other
ccaataccaataccaataccaataccaatacctacttcaattcaattcaaattcttatctaattattctctcaagtcggtagagactttgacactcaatcgatcacattgcgcgttgtcacaaaataaataaataaacacaaaaaaaaaaaaaaacttaaagagtagtttagttttacaatttaaacactctttccagttttaaaaaatagaaaataatttttaaaattaacagaaattgtttgcctaaattttttaaaaattaaattttaaaaaactaaaaaaaaaaaatatcaaaaatactattttcaattttcaaaaacaattttttatttaacatattatattttccatttttattcacaaacggaacctagacccagaaccagacgcgaatctagatcccaaccccagacccagaccctggactccgactagaactcgaaccttgaccctaatacccccggacagtggatgcggactccagaccccagatcccaaacctcgatcccaacccgaacttagacttggacacaaacccgaacccagatcccgaccccagacctcgaacctcaacctggacctcgaaccccagcctggactcgaacccagatcctggaccccgactagggtctggttttgggtcggggtctggggtttgggtctagatctggatttagggtctggggtatggtgtcgaggtccgagtctggggttcatgtttagggtccggtgtccgagtccaggtctgggtctgggtccaggtcttgggctagggtctaggttcggtcaggtttggggtaggatgggttcatgtcatggtanngtgtagaatattaattttttttagtaaaaaaaaatatataaatagttttaaaatatttgtaccaaacaccattaaatttttaaaatgacaaaaaattattttctattttgacttttgaacacaattctgaacactgaaaatacagccaaataacctctaaatgttattggatgattttaatagtaacacaaaataatacgagcacagtttattatgaattgaatacaggtttgatgaagtacttaggggctgtttagaatggattaatgtgaggggaggaaatgtgatctcaataattaccatgtttgttatgtagttttagattatttaagtcatttaatatttttactatagtattccaactactctaaaagggtgtaatgttaatcccttaaaaaaaatgtgaaatttaaacattacatcagttatttaaatgtttgatgagaatttttattaaataaaaatttaaataaaacaaaatattaagattatttattttaaaaggaaaaatatgtcgtttataaaaaaaatcatataatatttatttacacttattcttactataataattttacataaataaatataaaaatactatatagaaaaatatatgtaaactatttttcattttagttaacgacaaatataatgaaattaaatttattaattaataaataaatatattttttaaaaaataataattttattttatttataagtaacttaaaagatatataataacaattattattttattttattttactattctaaaatagnntataagattcatgtgctcaaccaaatattataatttaattaacagtaatttaattaaatattaccattgataaccaaacacaataataagttttcagattatcatattctccttcataagattccttttaattagattattttaaaccccttatactaaacgctctcttaaagtaaaatatgtgaattacctcggcaactgtttctaatagagctctgaggaagtactcaagtaaaaatatgttaattaatatatgtacttcatagtgattttgggtccgaggcagagccgttgaattttatttttattttttttatttaatctctataggtgtgttatgtaacatttagaaaaaaaaaataacaaaattaaaatatatattttaaaacgtaaaagtatgtttcgtattgttgaccgagattttcggcaactaataaa

SEQ ID NO: 124072 - DNA, 2496 bp, Cannabis sativa
  modified_base (263)..(267): a, c, t, g, unknown or other
tgtatatatttaagataaaagtaataatgtatatttcaaaagtaaataattacttaaggtacataaaaataattaatctaagtatacattaatataaattaattttaaaacaaataaaatttactataaatacagactaatttattcattatagtttctaatatttaaatcaaaacatcaattttagtaaaaaaaatctaacatggatggaaatttagaggggcatgatttagtacaagtcaaagttcgaggggcatgatttnnnnnatatcaaagtctgaggagcatgatttagtacataaacaatcagtgaaatagtaaaattaaataaaattagacaaaagtccttaaatctaacaatttcaatagttcaggggaaaattttaacagtaaaaatggttcaaatggcatgatttagtacatattaaagtttagggaacaaaaatcctaattaacatatttattatagttactataacaccgttttgatggctattcatacttattgtgcaaaaaatatgattattcctaaatacattcttggagaaattaatagtatttgcatgtattttctttaaaaaaaaaagtgatgctaatttttcaggatcaggtcatcttgcttggaaatatatttgccaaactaaaaaagagggagggcttggctttagagacatagcgataattatcaatgtgggtgctctcagcaaatatgtgtgggacattgccagtaaaacagataatttgtaggttcgttggtgcactttgtgcacattaaaactcaagattggtggaacctcccactagtattagagtaacaaagaatttgattagaagtaaaatgactttgagggagttcactagcttgcaatttagcatctcaaacatttggtccaagctatggccaagggacaataccagaaggaaatggtttttcttcatttgggataggctaagtgctccaaaacaaaaatttattacttggttagcttattggaagagactctaaaccagtgtgttgcggtttgaattaatcactaatgctaattgtttgttttgtgatgaggagttggatctcttctttgggagtaggtacagtaaagaaattcttttgaaggtgtgtgattgggctgatttaaacacccaacaaaataatttagataactgcctgaaatgggtgaaaaattgtagaagaacgagatgtaggtatggagtctacacgatagttttaaatgttttggtctacaatatttggaggctaggaataatgccctttaaaatagccaagtatatactatacatttcatagaattctaaaggaaatgtgtatgagattttctcattttcaaagcgagaaaaggtagtatagttgatattgattggttcgataatctaagtacaatctatcaattatgctttgaattgtaaataaatataaagtgttctgtttgcaataaaattcattactgaattataaaaaaaaaatcatattcatctatttaatattttggtatctcaattaaaaatgcattttatgaatccacatgattttgtaaaacagtatgttttaatataaagagacattattaattaatatgcatcataaatttgaaacgaagttgaaaactcttaaaacttagagaaaaaattgacaaacacgatgtttatgctgctgtttagaagggtaagtttaaagctaaaattttctatacttccctaatatttggcatagaatgtgtgtccccaaacaccgttttattgcttggcaagcactgaaataccaactcttgacccgagacaacttgtccgaatttattgtgctcccctcgaacaattgtcccgtgtgtgatgttgaacccgaaactcatcaacacctcttctttggctgtgagagttcaccaaaaaagctgttgttgagatcaaaaagtggttcaacgagtttgtgtggcctgctattttggaggaatggaattgccagtgtaacaagaatcaacatgatttaatatccacaatcaataatgttatgatttctgccttgatttactatatgtggtgtaatcgcaatcaatgaatctttgaattagtttgttattcagttaagatggttagtttgtctattaaactaaccattaaagctagaactagaatgctgaatccttgtaactttaaaaatagcgacaaaagtacttagaatgtaatatgtaacttgtagttctggttgtttagggactgtcttcttttgttcagttgtctttgtttgtattttggattgttagtttgaatgaattcttccttcttccaacaaaaaaaaaaaaattgaaatgaagcaagtgataaaatttaattcacgttaaaacgattttaagtaaatgataagatagtgttatattatttatagtaatataatatatagattaaatatgtgtaataaactaataatatgtaacatatgacaatgtatattagttgtcatctttttgtaacatttgggagttactt

SEQ ID NO: 124073 - DNA, 2647 bp, Cannabis sativa
  modified_base (2607)..(2621): a, c, t, g, unknown or other
taacattttgttgtgactaaaagacacatttagtcacaaaaaaattattgtcactaaaaaaaacagtttttgtataaaaaaaattaacataatttttgcatactagtgatttattttttatgttagcttatatggtgagaaaaattatttgtcatatggagataaattttttaaattatattgtttcaaaatttaaataataaataatatctcaaaataataaataaataatattaattttaattttttggtaaacgaaaaaaaggtctcattttaaattttgccctaagtctctccacaccttgagacggccctaacactatttaatccatcatttttcttttgattaaaattataatatgcacaacaatttctaacattctttaccttaattgtctgtgtatatgaattaaaaagtgaagtatatcaacaaaagtttacattattaaagtttagttgactataattccaattgctaaaaacttaatcgtcttatcatgaaaggcatagagaggtaggtactaggctgtaggcatcccaaatggactttaaatttaaagttaaaacacttaaaaaagtttactctcaacgttgtttaattgatgaaataatactcaaattccaaaatggaggcagtctccattccctcatcaatttgtttcttgtcttattgtcgatttctcctccattattgtaatccaaaagattctatattttgatgatcaacatcaactcctccatccaaaaaaaaaaaacatcaactcctcgtcatagcatatgtcacgagatcgcttgacccttcggcccaaccccaatcaacaacaactcacaactaatcccaagctgtaaaaaaaaaaattaatagaaaaatttgaaacataagaacaattatatgaaagcgaaataaattataaccgaacatatatcctgtataatgaaaaaattgaaatgtcttattattgtgttttgatcccacatgaattttagatctacaaaagaaaaagaaaatctgagttggtgtaagtattcggacttccaacctctcttactatcttagatagatttactcttttcataaaatgaatagtgagcttgggaccggtaccctatatttataagcgagatattccatcagtatctgtaccacaattaattgtcaatatattttgacaattaatttaagaaataaaattagataatgaagtatttggtgaattgaaatccaaccatatttattattttgagtgcttaatggcaaagtattggtggcaaacaaatcggtctcaacgcgagggtattaattggatgaattggaaaaaaatgtatagacatgttatcctatttttcgcactatgacgtggcaacacatactggtgacacgtggctcctatttcccacatctagctgaagagatattccgaacagagctcagcatacatctgcacagatagagtctgcctgaccgagcagggcaagggtagacgatccaaacaatgtatcaagacttggcagtttcaagacatacattgtgaagcacaaaagcaatccctacaatccagggatcgtatcaaagggtatggcaagttgtccgaatcccccaatctatgtattctaaatatgtaatgtgtgttcttaccaattatagatattataaggaaaaggaaaattttcccttctgcatttagcccagtgatccatcgtcactgtaataggggtcgaaagaattacttcaaagagatctaagagaaaacactcagagatttcattgtgagagctttaagagaggaaacactgtattctttgttcttgagttaatacaattcaaggggagtaggctattaccgaactaaaggggtcgaacctctttaaaatcttgtgttctttactgtttattggttcttatcttatcttaattacattttttatcgcttattaatagactcattgcaattggctaaaagcgaggtcaacattttggtactttcattgagagcaataatccaagtttgctctttgcattaagttttatcaaacacgcaaaatggtggtgcaaactcgaagaggcgtggttgatcaggttgatccactattggcagatcctacactgcagactcctggaaatacaagggtcccaccagttaccaatcctgagcaaccaaacacgcaaccacctactatgggtaaaggtgtgacatctcctctagctgggatcacactcagtgtgcaagagacttgaaacaccagctcgacagccgatctgggtactcctagtactagaatcccacctgcaaccaatgtttagacgaccataggagatgatactgagatccagaacctccgcatgctcttggacttatgcaaggtcttactaataccttgcatcatgataaggaagagctccgtgttgtggtgaacctggcattcgaagagtagaggcgtcaattcgttgaatggagggatagggaaatggaaacgttgaaggctcaacaggcagtcatcaacgaccgaacaagataggctaccgtactgatacgaaaagcctaccaagttgctaactagcaaccagctgtaacgtccagcatcccacttgttggaaatattttaccnnnnnnnnnnnnnnntaccatgtatgtttcattaacatcct

SEQ ID NO: 124074 - DNA, 3040 bp, Cannabis sativa
  modified_base (2235)..(2235): a, c, t, g, unknown or other
tgttacaaactgtaaagtttaggtggtttagccgccaatatccctttaaaaaatcatggattttgtatgttttttcatttataattcattgatttagggtatattttagatttataatgcctgatctatgatatgtgaaagttttattagattttaggataggttttgggttgtctgttaagtgcgagaaattctttaggcccgatggtgtccgatggcagaccgatgtaggtccgatgggtgtgggtttgtagaaaaattctaggttgaagatgaagtttcgataatggtccgaaagagtctgattagggcctgatggtagttaggtccgatgttgtccaatactattcgatggtgtttgatgatgccttttagagtattgagattggctctgtccgatggggtccgataataggtccaaggcatttgtgatttatgacactgtcctgtgccctatgctttgtctgatggggtccgatggtgtccgatgccctcttatgtccgatagcttatttttattttatttggtttttgagtttggtccgatagatgtccgatattggcctgatagtgtgcagtaggatttctaacttgtattttctcttgtgtcatttttctagaatacaagaccgccacatcttataattccagtgtcagagcattataaaggtcgtctcacttggcgtggtggaagttattactatgtgaagatcaatgcaaagtttgacgaattctaattatgggagatattggaggaatctccttttaaacaagtcttcgagaggaatccgataaatttttttggggcattactccatcagttattcatgcataagatcaaatctgagaagccagacgaggtacatttttttttgggaaagaagagatggagattcagccgcgtcgagtttgcattggtgacagggttgaacttgctactcgggcctacagaataagaaattgaagagaaaggaaatttggaccggttgatttttgagtacttcaacggtgattcatccatcagctttgaccaattacgcaaagtttttgagagttgcatagaagctgatgatgtgtacaagttggggatggcgttgtttgttatgggcgtcctcactggtaaggaggagaagactgttgttccttcatttgtgataagaatggttgataacctagaattcttttatgagtatccatcaggaaagatctccttcaacaagttgatggaaacttacaacaaagattttttagaggttaagactcggatgcacaagaagattgagaagcgaatttctcagaaggaggaaaaatactcatcatacaactatactgcagcgttgcagtattgggcctatgaggccatcttggagttgggcaatgaatgtgcagtgaggaaatcgcatcgctttccaagaatggttaattgggagagtaaggagaagaccacactctggaaggatgaagttataagattattttcgaaaaatgtaagttttttttacgctttgcaatcatatatattttattttaaattctatctaataagacattagtttttattttcagttgatagtgtactctatgttatgtccttggcaaaatgaagaggagttggtgaggactatcaccagcggtgaggggctgatatttgttgacttggaagaactagtgttaggctacgatgggccaacaactcaagatgctctgcgtagtaaagcccaaaagcttgccttaacagtagaagagcaggcagatgaagccggaatatttagagacactacaccacctgcaccatctcctagatcagaggatcatcctcttggcccatcagcatctattcccagcacttcacagcctcaagaaccaatatcttctgccatattggtaggattggagcgtgttgagagggaacaacttgctttgaaacaaggccagactgatattctgaaagggcagacagagataatggattacttgaagaccctattagcactcatgggagatctgagaaggcccagtgcagaggcagagccacagccaaaccccgtttctccatgagatgagttcattcttcccaatgattatagacataatgatgtggaagatgtactccatacacctcagaacatgtcgatcacgtccataggagatacgcaagattcagaggtacaggttttagagaacgttccaacaccggtggaaaaagaccgaagaaaaggccaaggtggtttgacnagtacaccgaaatgaagaagaagacgaagccatcaatagctcatgtgagtgttgacccacttcagcccgttgattagaagctactgcatagtttttgaaattggttagtgggaaccatcgaaaacaagtatctgagggacgtgttaaccggtgtacatggcgtggcttggttcaagaggctacttacgaataaagaatttctaatgatgtaagtttattaactaagtattatttgttgttatttacagttatttaccgttattatttgttttatttttttcatgttctaatgtgctcgtgctgacttatttgtctttattgtgtatcatttggatgcgcctttccatatgatgatgaggcgacaacacttcttcctggagttgtacccacgtaagtgtactgtcatgccatcttagtttgcttcatcgttgaagggtcggtgggatgcttggaagaccaatactgaccatgctgggtttgtctgggatgagtccatcttcgaactcgttcgtggggatccaaaccaattcatgccattttggaaggatatggagtgcatatacatggccatcttcttggaccgacagaaacattggatcgctatggaggcgaatcttgagttgtggaagttgttcgtcttcgattcgagtattggaactctaacatctgattgaagacgttgatggacatttggtacattttattatccaaattagtggaccagtgtggtgtatgtgacactgttgcgatattttgcacactcaagtgtacgtatcgtttcgagtagtaaactcaccaggagtga

SEQ ID NO: 124075 - DNA, 961 bp, Cannabis sativa
aaaatttgaaagaaaaaaaaataccgtggtctacagtgcctattaaatttggtgagatactgcagacaatctcatttattagtttaagtatagtgtctggttagattatatatagtgtgaaaccacacagttatagtgtgaaactatacagttttagtattttagaggctgggtggagatagcctaagttgtaatttttgtacttattattttatttattaggattatagctttttttgagtaaaaaaaaaagaaagaaagaatgaaaaaacttttcaggtacttttatatacttcataaaacatttgagaattagaaaatattttttgttataattgctcccttcataaagttaaatttcacattctcattatgcgaagttaaattatcccgttttgataattttgacaaacataattatgtttttattttctctatttcactctgaaaaaaaaccattggaatacaaagacaaaacttgagcctaccaaaattattgcatcacaaataaaatgataaattcaagatctccccttttctagttttgtaatgtcaaaatattaatttattaacaaaaaagtataacttaataaaaagaataaaaggaaacaaataaattaatggattgactaattaagatttttgccccctgaactttgacatgtaacaaatcatgcccctgaatttttaaggtcgttaaaaatgtctcataaactattgagattgtagatttaaggacttttgtctaactttattcaattttactatttcagtgattgtttatatactaaatcaagcttcccagactttgatatatctctcaaatcatgctctttaaactttgatatgtactaaattataactccctggactttcattcatgttagacttttttactaaaattgaaaaaaaaagtccttaaatccaataatctcaatagtttaggggtatttttaacgac

SEQ ID NO: 124076 - DNA, 803 bp, Cannabis sativa
ccactgcagttgtagcagcagcagccggggaagatcaaaacccgactgctgctgatcatggaagattttcttcgccaaattattctatgatcatcgacgacatgagtttaatgacagaattttcccatcatcctccatcgtttgtgtccccggaaacttctgggacaaactatttctcatcgtcgcctcatcatcatcatcatcatcatgaatttggaggatcatcagttcagcaatcttttgatcatcataatgatcagcatggttctgagtctgatcagataattagtgcaataatcacttcaactgcaaatactactcaaccaattggtatggaaatatcaggtcatgaattcgactccaacttcacctttgataactcaggattcttttcctgattattattattaattagttctcaatattgatgttttaagagagaggattaagtttgattagttaagtagggtttcgtatattatttttcccaaaataatgtagcgcttgattttataggttataagagtgatataagagaattttgttttcttttaattaaggtttgcccatcagtccatggtttactaattcattagtagttttaaattgaaaataacaaaatatagttcgagataattttgtttgtctcttttgctttctttcttttttttttttttggaggaaagttatggagatagattttgtaatgagtattgttagtgggtacgagtggtgtctaacgtacactaccgcgcattacgattgattaatgatatttagagttgagcttgagcaaaagcaga

SEQ ID NO: 124077 - DNA, 842 bp, Cannabis sativa
aataattttctatttttaaaaacaaaaaacagttttttaattatgatgccaaacatgcactaaatcactataaatatattttaatgcagttaacacattaaaaagcagtttgtaacaaatgtcttgtatgttctttgcaagaaaaacaaaataaaacaaatgtcttgtatgttttttccttatgcaacgttgcaataaacacattggtaggaatacttagcttagacgagaattcagagcagagtattgaaaactgaaaaagcaaagagtatagatgtcaaattgtgaattgttattctcaaaggtttcaaagaacactgtgatgtgttctatgaatgatttggagggatgagcaactcatctcagcctggcctaaatctcaacataaatcaatgaaaacctaacttaaatcaatggtgcaatccgttcatagctgaagacaaacaaactagcaatttgaataaaggggaatgaaaaagttggctaaatagcttaagacaaacccatgggccatggatgatcagacaagttaggttctttctacaaactatagcatatatctttataagcacttagaagtacgtttcaactaatttttcagcaattcaacaaatatgattatgattcttacgaaagcttcagttggtgcaaaattgagaacaagaaatcagagcagagtattataaactggaacatctggcaaaactcatagtgcattcaaataaattataaaaatgccaaagcaaacctaagatggcataaaccaaaaaaaaaaacattttaactcaacagtactttccaacaaaagcaaaacaataaaacacaaatgattatcataatgc

SEQ ID NO: 124078 - DNA, 1563 bp, Cannabis sativa
ccgaccttgactcggacccgatcccagaccccggacccagaccccaaccccaaacctcaacccgtacccccactcggacccggacccagactcggactcgggacccgaacctggacccggattaaataatactaatacaatacaatacaatacatttatacaagttaaggcgtaccaaacgagctctatatacactaataacgacatgttacctcttgcagtacttagcaccataaggtaatccttgacatttatccggtcgtcccactttaaaatctactaattaaaaaaaatatataaaatattggcctcacctaaatttcttagcttcgcccatgtatatattattattagaaaggtggtatctgcatgaataaatttcattatgtcaatcaatagttaattcattctttggggtatttcaactaaatatacaaagatatatattattgttggatttcaaatattaggttattacacggccaatattagaaacccctatatatcgaccattatcgaaactgtgtatatatttatattataattagagggaagttagtctagtctctcaaaacaataattataagaaataataatattattcaattatgaattgtctgtgcatatatataaaatgtgtttatttatttattttttttttggttaaatttacgtacgtcaagttgaccacactggttaggttttgaaaattattagtgtgttaattaattaattaattaatatcctacatttaatgacttaaaataattaagttttgagttacttgggacagctttttctagccaaacttcatctgagaccaattaattattaagatgatttttatataactttattatagtttacaattcattcatcatttccatcgtatatatattcatatatagaaagctagtttccacctctcataaataaataaataatatctcgatcaataatttggtaaggtacgtataggaggtaaaagtaaatttaaaaagaaaaaaaaaatcttgataactaaaatatatatatctttttcagagaacgactgccgcgcttcacttctatgtagatctgcaactatatagatataatctatatagctactcgatccatttcatttaaatcaataaaacaaattaccctagcaaagtgttagcatttcctctaagtgtggtgtatatattttagcctatcttcataaaaataaattttgatggtgtacttataaagtagtttaaatttagcacatgctattatatcaaatttaatataaaatataacacgagctaaattttataccacaataaatattacttttttatttactcttttgccacctattaaatattaatgtaattaaaatctttttatatttcattaataagatttttatatactttcaataagaataggaaaattaactcatataccattttttaacctttttttttaatttataatttgggttgttatgtagattttagttgcgatttaagttgttccgttaattgctatgtgaatttctatgtagatttctgtaaaaatgcaaaaaaaaaa

SEQ ID NO: 124079 - DNA, 1529 bp, Cannabis sativa
  modified_base (43)..(85): a, c, t, g, unknown or other
  modified_base (198)..(202): a, c, t, g, unknown or other
tatataattttattgacatgttacatatatttaattattattnnnnnnnnnnnnnnnnnnnnnnnnnnnnnnnnnnnnnnnnnnntatttaattagtttctattttatatacaatggtagaacataattttgttgtcatgatatatattttaattgtggtatacaatttagttagtatagtatacatatatatatatnnnnntaatatatatttttattattattgttgttagtatctatattttagtgaatgatatatgtattttttgttatacggtatattatttttttaaataatatttaagttttattttctattgtacttttgttgacatgatatataattttattagtatcctatatatttttatttttatttgttgttgttatacatatatttctactgtaaggtatatgttttttgttatatggtatataagttttactgtatagtatatcattttattttagatagggatatttgcggcataaataccaaatattttcaattttatacacttaaataccacatcttttatttcaacggattaaatacccaaagtttagttttactcactcccgttactacttttccgttatatataacagagaatatttctatgccaggtgttactcacgtagtggtccactacataatttttttaaaaaaataaaaaactaaataatattaaaagttatctctcctcctttttgtcttcttttgataactgttgtatgtcttcttctttttttcgcatactgtaacaataatgacaacaaaaaaaaactatccaggacataaataaaaacctaaatcttcattttttctttatgcaaaaccataaatcaaactcattaaacaatcagaacccaaaaatccaagggcaaccaccaccctcaaaaatcaattatgtctctctctttttcttcatgccggcatcaatagcggatcgatgaacattgacgatgaatgcgagccaccaccctccaccttcttgtgcggctcaaacagacctctttcaccctctcccttgctcgcgttgctcttggaccgaggcactacaaatcctctcattttttctcgggagcccaaacaaaccatgtcagatctctatgtttcatcggcatccatggcagatcacttcttctcgctcgtttttgcatgttctgcttgtgtccatgactgatccttcattgttgtttccttttttcttttactctttttagctacaaagggcagggatcgagagattaaaaaatgaaaaaaaaaactgattatttatttttataatttatttacaattatttataaaaaataataatatattaataaattttttaaaagaaattatgaagtggaccaatacttgagtaacacgtggcataaaaatattctcagttgtatttaacagtagagtagtaacaggagtgagtaaaactaaactttgggtatttaatccgttgaaataaaagatgtggtatttaagtgtataaaattaaaaacatttagtatttatgccgcaaatatc

SEQ ID NO: 124080 - DNA, 1030 bp, Cannabis sativa
aggttctctttcaaaacaaaacctatgcaacaataataaaagacttgacgaggaaatatgcaacaaattattagagtatataatttggttattaattttaacttgaaatataattcactttattttatttatacagtataaaattataggtggttattttaaagagaatgagaactaattagatgatattgattccaatttatttattgagaagagaaatggaaagattctcctggtttttataaaaaatgacctttcctatcttgattttttattttatttttattaattaaaaagaatacaatgatgccctttaaaaatctagtacaatgtaataagaataggaccattataattcttgtaaagattttcttttgaattttcgtctgttgcaaaaaaaattcttgaattataaaaattattgtaaatgttttcttgtaattgtattctaatcatttatttaaataatttatttatatagcactaatctagcccaatttttttaaaaaaatatatacacaattagtgatttaatgataaattatgagatatgtaacattcttagaattactatttatatgtttaatgtcaataaatttaattttaggtagcttaaagttattaaataagtcatcacaatttaattatacatgtaacttagccatataagcaaggtgttataaaaaattagagaattaccttatatattattttttaacttttttttaaaaaaatttacggcttgggttttgctccagtagttttttcagtggtttctatgtgggttgctatatagattttggttgcgattcaggtttctccgttagttgctgtaaggatttctatgtgtaattaattttataaaaaaataaagaaaaaaaaaatctattttgaattataaaaatggaaaaacccctaaaaagaaatttaattcgagagaagaaaaattcaaaaaactctacaaattaaagtcatggaataaaaattatattttggggctattttcaaaaatatggcataaaaagtaaat

SEQ ID NO: 124081 - DNA, 798 bp, Cannabis sativa
gggtccgggttcggtttcaatttttgaacccgaaacccgtggacccgaaacccgccaacccgaaacccggtaaccccgcccgatcttcagccctaatttaagacatattttatttgaaattatatacgtacacatttacatatataactaatataacaataagattaggataatatatatgtttgctattgaattggtccctaccaattcctcaattgggtagcccctgtatccaagaatcccttcatcaccattgatataacatatcgatgatcgaacaggggctgtgtttagatatccagggtcatataatatcagccccttgtcatttcctcttgtagagtgtattttaacgatcgtatacaaatttgctatatgagttttgttcaattctcttagtattgatttgagtttattgagttttctacttttattgtttcagatccttgaaattctctttgtgagtttttcatacttttcaaaaaccaattacaatccgctatcaaagttttcgacccatagttgatcgttcctaccaactcctttaagaatgctacagtacaatatgttatttgcttcttgttgtattcttctcagcactagtagtctagtattctctttggattacatacatattgccaagccactccttaaggtcattatttttattttaattcctttattgtttttattttttaatggaaaaaattgtaaagttcttatgaaaaaatcgacgccatagggtcttggtatttactagctttacaatttcgccttttagcataatttatatatatt

SEQ ID NO: 124082 - DNA, 1895 bp, Cannabis sativa
gctcaagtattggggagagaagtcattgtacaagattattgggcaagttgggaagccaattaggtaataaagttatcattttatatttttgatgtaaaaatttcttttataataattataattaggtatatttatacaaaataatatgaatacttttataattgacatctagtttatagctaaactatactttttttaattataattttttttttaaaaaataatctgttttaatatttatttaaacttatgcaagaaagggccctacccttccctactacgtaccaatattattacttgctttatatatttctcattgtttttcttattgttgtcgttattaatctttaacatatttatttattttatttgataaggaatctttaattaatactttccttaagaagaaattaatttattaatgaatatatatatactactacaaactctgattctgtatatcttaaattctcatctctctctctctctcggaccacctccaaccaccgccggccagacccaacggagccacccacctccgactccgccagctctattttaggtaaaaaaaaatgtattttattgtagtaaaggttgaataaagtaccatattattttatatattttctactttttattgacttctcaccacaccattttttttaatatataaagtgactttatttaataacctttaatcattataatattagattttaaggcagaggagcatcaagctcaccacactattttttattagtcatttggatggaatttcttagattctacacagaaatttccattattattattattattattattattattattaacaaaaatatatattatattttttatttaaatttcagataaaattatttaatagattttaacaaattttgacatctaaataataatataagattttataatttttgttttcattttattatgtgtaaacttgtgttaattatagattaaatatatataaatcaagataatttatttagttttttttttcaacaaaaagttatttgtagttatttgtagtttgaattttctatgttaatacttttagtttttttttcttttcaaaagagtagattaaacatatataaataaaaataaaacataaagttgagagaatcaaattcaaaactaggtataccaagtaaccaataagtaattatactaattatgttgtctaacaattatctattatttttttataaagaaactattatatattatttctatttctaatgttatataatttatattctaaaatttaaaggcggacttaagtcctctcagggctctatataagttcccctatgattagttgtttctcatcattacaaaatgggactcatatataatggatatgactttatttttgttggaagttttatctcaccaatttataaaaactctcagtattaaaagaaaaaaaacaaataaacataaattattttaacaaaaaaaaaaaactattaagattttttaaatttttttagcattattttatgttaattttactaattattttaatttattttcatatattttttaaaatcacattaaaaaaatttcttcttcaacaatgaaaattatttcaaatttacctttcatatgcatattgctcatttttaagataatttattaatatatatgccacgtgccacgagtaaaattataaattatagtacaaaagcctatttaagtactataatagtcttaaaaatttaaataatattaactctgaaattataaatacagtctcaaaatttattacaaaaaactgttacttttagtgataactttttaatcacaatataattttttgtaactaaatataatttttaatcacaacaaaatattacttgtgacta

SEQ ID NO: 124083 - DNA, 2474 bp, Cannabis sativa
  modified_base (2113)..(2114): a, c, t, g, unknown or other
gcataacataatataataactgtaaattataaaaaaaaatcaaaaaaatatttattaattagtataatgaccgcgcgaagcgcggttatgttgcctagtatatgcctagtatattataattacaatatatacaaagagaaaaaataactagctaatataaaagtggtcttcgcgtctctcatttcttttttgtcaagcgagaaaaaaatgtatatgtacatacgtaatctattaataatagttacaattttgaagaagattccaagtttcgtatacaaaagaaaagattatacttataattatatagtgtagatttttaaaagaatatatgaaacattgagttgtcaaaatatatttaaatgttttgatttaattttaaatggctgattttaatttattgtattgttctcaaaggaaacattcattttatgaaataatggatataaattatagtttaaattaatgtcattaacctctccttgctacttgatttaagtttagctatatacatagctattttttatggcaggtttcatagctgatttcatgagagtatttactttaaatggaaacaatgtaagattctaattgacttgccacatcagattgtgaatctgcatcgtagaccaatcatcatttaagtctaaaaatattttctttttgaaaagtttttatgctgctgtaaaaatgtatagaagcttttttttttaaggtttttataatgtaaaaatagaattagagagcaaattttttctttagctcgtctactatctattttcatatcttagttttgtaacaatagtgattcttatgttaaagcctagagagttttgctaggtttttgtgtctttgttattgttctcttgttgttcataaaataggtttaggagaagctttgaacaagcgtgggtctttgagataatacctttctaagtctcatttcgagaagaagtgagcacatatatctttaggagaagaataatcaaagtctcatttcagaaggaaagcgagcacacgtcaagggctgaagggatgtgtttcagaaatcacattagcaaggatggattacaaaaggttgtgacaaaaggtatagagggattcaaactttgtataagtcaattgcatttgtaatctttgatactttactaattgattttatttttgggcgtgactccatgaactaatagtatttgaaagaatactgataccacgtataattctcttgtgtgaatttttactttctataatcgtttgttgctgcaagtactatttctatgtgagcaagtaaccaacttaattactacaagtttttaaagtaaggttttaatactcgttattgtatagaaaaatttatttttgtaaaacactgaatttcactttaattctacactctcctaaatacaaaactgtatcacaaacacaaatgtgtattgtatattttttaattttttcattaaattgatcatggcctctaagcagtgtcacatactcaagatttaataagttgagggggcactactacaaaaaaccactattcatgtcgatcctcaaaacatattttttttaagacaatcgctaataaaattaagtgaatgtttaaaaacgtctgctatattagactattctcaatggtttcaaacactcatgtacttttcctgacagtttaaaagggttacaagccaaaaaaaacgggattttaaagggcaccttgacaatttaaaatcgtcaaggattcccccattaatataaaaccccaatctttgtgtgcttagatttcatttatatatttttcttcaaggtattgacacatttagattgaatatgatcatacccttcacactctctgcattgaataccctttttattgttagtgacaaaaggtttagaaggattgttatctgaattattacatcttggagtttttgaaaaaatctttttatttccaacacatttcatgtatttttaaaaattcttagttaacaaggccatttcatcatcagaaacatcattttttcaaactttaaaagcaatgcatttgcttttctcactcaagacactttgcttatcatttttcttgatttgttgatttaactcaaaagttcttaaagaaccnntgagttcttcaaccttcattttttcaaaatctttcgtctcttctattgctagcaattttgtgtcaaacctgtcaggaagcacacgaacaattttttgaaccaaaatagattcatctaatttttcccccaaggaaaaaaactcattagaaatatcagataatttttcataaaattcagacaaaatttcagtttttgacattctcaattcatcaaatctagtttgcaacatggtaaaatgtgatctttttatatcagcggtaccctcaaactgagtatgaaggatttcccatgcgtcctttgcagattcacaagatgaaattaatttaataaagccttcaccaacaccattaaaaatagcat

SEQ ID NO: 124084 - DNA, 2376 bp, Cannabis sativa
tgagtagatctaagaccctggtaaaataattccaacactcttgcgtttgtgaccagctgcctgggactgagtaagaaagcctctactcccctaaggagacccttgtcgtagatattctttcgtctcttataagtgagtgtgaacaggggcgagacccaccatggacccttttttcttatggttcccaaaggacgaggctcctcgtactcttccttgatgtaatcttggcctaccaccaagacatcacccaggttagagacaggctcttcggcctcgttgtatccaccaaaaggaagaacttgaaatcctttttcatcttcttctccttcagcattaggagggccacctggatgcaccatgccctagtttgtgatttccttgacctcgacatccctagtagcagctttagcattttcattcaaaggcttagtttggtccatacaagccattgccaatagtcgacaaagtgggatcagactccaaagcattccttaaagtttatttagtttttgacatccctttacacccaggtggtggttttacctctaaagcatgcctcgccacggtaatagcaatgtccgctagtacaacatgtccacttgaagtctctagtcagccctttggaaatgtatcaacacaccacgttagaccatatatgtttaggatgtaggaagataacgtcttcagtctttttttagttcccaaataaatcggtcgtgcccttttacacttatctagtcgggatactaatgatgttgcaccatgggcttcggagattctgagtggtcactactgacttcccaatcgtcaaagcatgaagttgaagagctttcattagatgaaggtgagtctgcacggagctaaggatgggttttgtagagaagtcgaaggacatccttgttgatgagacggttacattcccaaaactcattagggttcatatacaaaaagaaggaacgtaaaaatgtaagatttggatggaggtatagaagggaaaagatatctgatatgccaactaggtcgattcaaatgaaataaggaaggaagttcattcgaaaaggaaattcccaaaccctaaagtttgaaagcacggtgaatatctagaaaattttcaaaaaaagcatgaattggccaattcagataatttgtagccaaaatggcaagaaattaaaggcctaaaagacatctgcgtatatcagtcaaagttaaaagccttaatacattctaatctcagatcaattaagaatagtttaagaaaacataactttgcaacaaaaaatttgaaaaataatgcatgcatctaaagaaaattgggtttgttgtgactatttgagagcaaaaaataaaagagggcaaagccaatttttatctcttatataggagattagtactcaatgaataatgcaaacatcacccatgcggtgtcacataaccatcatttcatgtctcgaggtacaactttcaaaccagagcattaaatgctctagatatcgaagggacatcttatcagtcacgtctgatcaagagtagaccagacacgtgtcacccatttgatcaacttcatgaatgaataagtccacgtgtgacgtaattatcccaatttttgtgcaaggtgacgtggcatctatttgagtgacatgtggagaagaatcctacaacttggacggaccattctacctgtaatggcccgtacagggagatttgatactcaaatttagttgaaatattcgaccagcttctgtcacacatgcacctcgcatacaccgactagaggatgcgagatgataatttcaaaagatacgtctaatatattttctagcttgcaagtcatgtcaatatccttaaattaattggatagattcatagtagcaaggaagaaagaaaacctatttaagtttcccattttacttattgtaattatagaaagtaattagtttccaattttatttcttattagtctcaggaaactaattctctgtaatgcttccctataaaaaaaggagagtcatctcattatttagggagataaaatttcacacagtgaataggagagagaaatttagcaaagagtcatatattcaagagtgaaacactcagagatcattgtaagatgaagactttttggcttttctactcataacttaatacaaactaaaagagaggtaggctattaccatcatcaagtggccaaacctctataacaattttaatattttctttacttaatctttactgattattattatttaattattcttaatcgttttaattaaatttattgttgttggctaaataccaaatcaagtgtaacttttctaagtttaatgctagagtgaagaatgtaatcattactacaaaaaccccctttagaggtgg

SEQ ID NO: 124085 - DNA, 1294 bp, Cannabis sativa
  modified_base (1252)..(1268): a, c, t, g, unknown or other
agaatcatgccacttgaccttcccaaagcggtgtgagattgcacaacttacccgatattttcccttatggctcacgggactactgactgtcacattacctctcaccgcttccaagttcattttcatcttaaagtatttcaagtgagatagagaggatcttcattgcctatatagatcttccatactggcattttaaacttgggggtaggtcgagagcattaattttttatgaaaagggtgatcctcttgcccgatcaagttcaagatttgtgagttttgggctggtcaggctttgtacaatgcttttaagctgatctatttgtgctttgcacaagtagatgaacttggccagcctgttcaccaacctgtgtcgcatgatctcttaaaactagacttgggacatagttgtttggctggatggtaagtggaacgctttgcgtgtccaatccccttctacggttcaaattttttctgaggtcgtgtacggtacctagtcagttgatgaccaatgtgccaaggggtttcaatgtctgaaaaacttgattgagagattaacttgatatgtttgtctgagtatggttgtttagctgactatttcctctcaaggcggtctggtaagatctgtcagtctgctgtttgtcccacagtttaaacctttggccttggattggacagttgaatgatataagtctgtgtgttatgatcagctacatactcttctggctcattctgagatcccatggggatactagaatcagtcaccagttgatgattggtgacttgataggcccttataattagtaggtggccttcctagaacagttgttaatggttgcctgctgggctctcatgacttccatctcccgatctctccactctatgaactggcatctttgttcgtcaaaggcaagattaataattgcttggatatcttgttggtcatggtgcaacatgttattgtggccttggaataatcctaacgtagctcgcaggttctaaagctcatcaatatcatctacaactggcctttgagcgtttttagtggacggagctttagtgctaggagtggtctgctcgaccgctgtactggtatttctagttttttgcatacctagagtgaatgcagccagagggaaagttccatggccaactgttggtggttgtgtactaacttttttgggagttatccctggtggatctcttgcgtttccaggagttttcacacttggatcttgttggaaattattttacnnnnnnnnnnnnnnnnnaccaagtatgtttgattaacatccta

SEQ ID NO: 124086 - DNA, 1014 bp, Cannabis sativa
  modified_base (944)..(965): a, c, t, g, unknown or other
ctggctgccctagactccacagttgattggtgttggttgtgtgttgcttaggggtagatcacaccatttattggagtttggtggatctagatgcctgaagtgatcagtttcacttctcaaattgccattttgggtgtttccacccactcttgatcctcttcggttgaagatcatcctctatgcacctcactccctttatggaggaagtgatgtactctgggcggccattggtactcatgttgatggctggttggccagtggctacacaatggggtgctgttaagcctgagatccctggctggccccccctatgctactggttaccgggatctagctgttcttgccatttgacctttaagaaaaggtttgtcctctctctattaggggaagatttgtcctagttcctcaggaacttcgcagcagtcttccttgaagtggatccctaaggagatcttggcctcttctattggttctctgattgaaccgtcttattagattcctggcctctcgattgcggtgatctaattttgcttgatgagactgatctactcctagtcatccatccatctgaagaattcgcgtctctattgagcaaatacatcgttatcagcagtgtgtggttcttcagttaggcctgcatgacctacagcttccctgagtttggctaactcaaggtcttctcctaggtccaggtgaagctcaccaattgctggcttgcccactctcgggctgttctcctaggtctaggtgaagctcaccaattgctggcttgcccactctcgggctgatctctctagtgtaggactggagttgaggtcgagttgttgttctagggggctgtcgtccctaggtcctttcttcagtgggaggcgacaatggtgtgtctactcttagaggcgtgggcctaccacatggatccattgttgggttttgtgctctaaatnnnnnnnnnnnnnnnnnnnnnngatttactaattaataaagatcaggaactgtattttatgttgcatggtt

SEQ ID NO: 124087 - DNA, 930 bp, Cannabis sativa
caagaggctgaacaagttaatccacctgtgtaggcacaactagatgagctaaaaaatatgttctgaggcttggccggttagaagaacaatgacctcgagttggaccgagcacgtggatcccctttcaccctagagattaatgtcttagaattgcctcacaagtttaagatgccaacctggaagatgtatactgagaaggaagatcccttatcccatctcaagtattttgaaatgcaattggacctgcaaggagcacgagaagatgtatgttgcagagtttttcctgccaccctcttaaaggccgcccatcaatggtatttcaagttgacacccggaaggttcaattcatggaaggctttatccttattctcctcttctcgccaacttctattgcacttagaagacctggtcgaaacgaagtaaagaaaatgagaacctctccaagcttacatgagcaaattcatgacggaggtaactaaagttgcacaggtgaccaaagatggaaaattgtccgcaatactggggggcattgaagttcttagagaacttaggaaggacatcaggaggaacggaccaatagattctatgagtgacttccttgaacttgcagatggttttattaagcttgaagaagccattcagcgagtagaggtttagcaaaaacctagtcagccaaaagttccttctattggaacattcgtccatctcctagtaccctagcaatttgaactcgagtggtaaacggtccaacaaaaacaataggcaaggaaatgggaaaaagggaaagtttgctggcaaaaccgaacaagctccaagggagaatactactaagtttactgctttcttcctgacaaaagatatagaaactatttacatggctactcagtcattagccccgtacaagaagcccgcacccatgaaaaaagacgt

SEQ ID NO: 124088 - DNA, 1493 bp, Cannabis sativa
tcactacgcaagattcaaatcgaaagatatctttgctgaagcactgtcttatagttgtttgatattgctcgagaaaatatttttaaaaatttcaagtaggggattgttggaactttttacgaaattatataaaaatagaaaagtgaagtgcgtgaatgataggggtcccacatgggataggaacacttcattagaagttcataaatagtgcatgtttaagaattgggtttgggacccaaggggtacccagttttgtgtgcatgggtgaggactcacacactagaccaccacagacgcgcgcgccgctgccgccatccgttcgacagaccgatccgagctgggccgggttgggttggagggcgggtgaggtgtcacttaattttttaaagaaaaattatttaattaaataaatatttattttttatttatttatttattaattaattttaacacgtgatcaaaagtggtaaaacgcgatcagtcaatggttcgctttttactcccacgatccaactcatccacgaacgataacattaccgttttcttaccgtttattcttggatagacttctatataagtcgtatcagaacaacggaagagcacatcttttcaaacattaaaaaaaaaacttttctttcttccttacgatttttctcagagcaaactttagggtgtaatagagcgatatagttcggtgcagaacatattgtacgtatacagaggttgttttatcctggggacgccgtggttgctagactgtcgtacacactccgggcaaagccgcgaaacgtcttaaagaaagcaacattgtccgcgagtcagctagatttttctatcagtaattctttccagttttattgtttttaatttcgatctaacagaaattgtgtcttagttatgtaagggtgtgtgagtaatttgggtacaatacttataaaatgatgtatatttgaattaaattttatttgaatgtaaatttggttaatgtataagaaaaaatgtattcttcaatttctccctttatttggtctaaacgttattaatttaagaattattttaaaaatatacaaaaataataaattttttttacatttttataaatttacagttttttattttttttttataaaaatatagagtgctattttgacgttaatcttacgaaaaagaaatataatattctttttctataataatataaaatgttattttttattgtttcacaataatattatttttacattgctataggaaggcaaaacttttcctaaaaaagactaagtgaaaatatatttaaaaaagcagaatccatacaaatacaaataaaaaaaatctgtaaaaaatgttaaaaaaaaaacatgtatatatatatatatattttgagagagagaatatatatggtttccttgtccacccactttctctatctccttaaaggtaaagctcataaaattatatcaacatctctttccccttaattttttttttttttt

SEQ ID NO: 124089 - DNA, 631 bp, Cannabis sativa
aacttcaaggcttgcaacatgcaatagatacttctgaaatctcgatggcagaaaagaatcacatcatctggaaaacataagtggttaaggttgagatctttacatctcataaagtatttaaactcctccttgctcccggctttcttcaggattcttgataagtattccataccaaggaggaaaagcaaaggagacataggatctccttgccttagccccctggcagcctcaaagtatccatgcatcgtcccattgaacatcaaggaatatcatggagttctgacacaattcattatgagcttaatgaactgattaggaaacaaaaaagcttgcaagatttcctccaagtaatcgcaatcaagtgtatcatatgccttctgaatgtcaagcttaatcacacatcctggtttggtggttttcctcccaaaatgcctgattaaggcttgacatataatattgtgagcaatgaatctcccagagacaaaccctccctggttctgagaaattagattaggtagtatctgtttgagcctagtgcaaataacctttgttgctaccttgtggatgacattacaacaggcaataggtgtatagtcactcaccgtgtttggacatgttggaaattatttta

SEQ ID NO: 124090 - DNA, 717 bp, Cannabis sativa
aaaaaaaaaaaattgcaatcaaacaaacgatgaaatcgagaaaaggaaaaaaaaatagggaagttaccagtgagaaagagagtaaattagggatcagagaatacaatgaatcaatgaatgagaaataaagacgaaaaagaagaatagcatttatgaatgattcgtttcctccattcttgtgtttctctttctctctctctctctctatatatctaataagtgggagatagttcgtttttttttttttaatcggcgtttctggcttaaaaggcccctcccaaaacggtgtcgtattgattgtcactctcagagaagttcctcctccctcggtcttcctccgcaagattatttttgggtttcgattcgacacaaaactgaaagcattcaagatgagtaggccaggcaggcgagagactctatgccttaattacattctctttttttatttattatttttcaaattaataataattaattttattttggctttatgctttcgtgtcatgaccgtttaggccgtttattgccttagtcgaaaattaaataaaattatcatttcttttaaatggtgatgtccaaaaaaaataaacttttaagtggtgatatagtaataacaacgattctaacccaaatattttcttgctgaaagaaaaaaaaatccaaatatttttcatatacgggtcaaaagaccggaaagtcaatacccttgactctacg

SEQ ID NO: 124091 - DNA, 2950 bp, Cannabis sativa
  modified_base (1764)..(1764): a, c, t, g, unknown or other
tgtgtttatttcatatttttagaattcatattaggatgttaatgaaatatacatggtagtaaatctagatccttgtaaaatatttcgaacacacttaactttgattctataggaatagattgcttttgttctcgggaataggtgaggctccagattgcggatatccctcgcattgctagctatcaaggaagtcctaaccacgaaggcccttttcacgagccaaggccgattatactttaaccttctttgaattgagattgagggagtcgaccagcagatcttatcttaaccttatctggctaagacctaggtgtcgggtttacaaaaaatctgggaaacacgtatcaagattaaagaggaaacatctcacattaaatattttgaaattaatctagatcaattgcccacaatcagtgtacgtgatgttgaccagatcaaccaaaatccaatcctcctagtcagccgatcatcttctctttgcgctggatttgatgagaaagcccataagtattttttactataagctctctagtagaggaaatgggaaacctaatgtaattctcaaactatcataaataccccccattaatctcatggattaagggttgaactctcttgcaaacattactcaggaaaacttgagaacatacatcttgtgtatttcctaaggcatttcaagaaaacaagttactaaataatattgactcgtggactaaggctacttaatgcccgaacgaagttaaaaagtgtttgtcttattttatccttcctctttcgattttttattcttcatgttaccctaaattttgtccacctaatgtggcatgtccatataatccaaagatagagtacaggtggagtacacccttgccaatagcagaacagggcctccatgcaagatatagaaaaaccatcaagcaacaaccgaatggagtgaagcgagccctcaaggagctataccaacatccttggtcagccaagagaagcctataggccagccaaggtgagcctataggccggccaggatctgtgcacaagctggttgcccaagaagtgacttctggacaaggggagattccgttcgaccaagggaatctgacctgtacatggaaatagtttacaaagctatgctcaaattgcataaggctggcctccacatccaaaggctggcctcctcttggtgaagctatagtgacctgccagatcctggcaagaacataacctgtcagaccgtagcaagagcatggccggccaagattgacttggtaggagcatggtcggccaggattgacctggtaggaccatcgtgggccaagattgacccgacaggaatttttggacaactctacatgtggacggctaattaggctacaaattgggacttaaaagcccaagataatagctaactaatttgtagattcaagggcactttagtctttggtaattatctaacaacccatgcaaatatctagggatttaaactgtaatctagggtttaggcctcctatataaaggctttaacccaagtcactatgcctccaaatcactctaagttagaaacccctgcctctctttctctctctctcttgctagacgcccccaaggggtctctcctcttttcatctctcacacgcctctaaggcattctaactcacattagagatctacctattgattcatgttttgtatccttatagagagctatatcagatctcacctatagcgatcttaatagtattatctttaggtatcaatacaaccaanaggggagtaggtcattacccgttgtcataagggggtcgaacctctataacaaatctatgtgtttattgattttcattcatgtttgtgtaacacgtggcaagcattagatctttatgaccccattgtcagttgatcactttttgaggttaatagtttggtgctttcattgagagcgtggatatcgtatatgatcaaaatgccatggttaacacgagaagaacttctataattccatctgcatcattgggtctccctcaagacccacagattgtaggaacagatactcaggttcctgtcacaattagaatcttgatgaatactgaagatgtggtggatcctgccagcacaataggcgcccacgagtctggcctcctcttgcagagctatagtgacctgccaagtctgcaggccttcacctaccaaatcctgtaggccttgggcagctagacctcatcttgcaggccttgggtgaccagacctcctctataggtctttgggtgaccaggattaacctggtaggactctatagtggtcagactgatataggcatcctggtggatacaagtggtaggcccctgcctctaagggaggaccctccatagatgccttcatctgaaggaagactccatggggggcaccccccaagaacaacaatcgagtttcatcctcagtactatgcaggagagacgagacaaggaattggcgagcctactattggtatgcgctgtgtggacttgggagaagatctcgagtttaccagacataaagaggttgtttaccaagtcggccaaatttacgaaccacgctctgctgactgcgatgtattcgctcagtagagacgcaaattccttgaagaaccacgcacttctgattgcgatgtactctctcagcagagatgcaaactactaaaatggatggatgaccaagagtacatctttcgatctcaccaagtagtgttggatcgcctaagtgttttaaggataaaatacattgatgggtgaaacggtaaatttgtccctactcagtgtaaatcatctatagaggatctttaattattgggattaaaacgatggttaaaattttcatagagtatctatttcgtggaacatatagagcgttttatataattgagagtgcgattctaaatctatagtggtgcaaggaagaattaataagttagagaatt

SEQ ID NO: 124092 - DNA, 2174 bp, Cannabis sativa
aaatttaaactaaaaaaatgtgctaaaattaacctaattttaatactaaaaataacctaacaactccaagaaagtataggaacattacgcaaaggaagccaaagagaaaccattgacaaatctaaacaatttaagtgaaacaccgaaaaaactttttaagaaggaatgtgatgatatcactttcatggaaagtgatgtaagatgggtataccatcctcatgctgatgcgttggtattggtcgctaatataggtggcgaaaatccattgtgtacttgttgacaatggtagctcagttaacctctagaatttttaagccttcaaacaaatgggttacatgaaaaatactaagcccaataactttgagtatctaaagttttactagagatacgattgaactgaatggtatgattaaaatactaataacattagggacaacacttgttatcgcaaagtctatggcagactttgcagtaaacgatcatcattttgcatataatacggtgatatgtcatcccattctgaaggaaatgaagatagtaacctcaatttatcatcttactataaaatttcctataccaataggtataggatcagtaagcggtgtttaggcaaactcgagggagtgctacaatactgcgttgaaaatcacaaagaagaagaaatcagtgaatgtaatatatatgctcaaagcacctccgccttgacacaaatcatttagaattgaagaagtaccacatgtggaaaagcccaatctggaacctagagtcctcaactatgcaaacaccgcacaagctatggaagaaacatttgaggtaccaatcgattcatttgacaattctaaagtattaaaaattggttctaaattaactctacaagaacgaggaaggttagtaactttactcaaacaaaacctggatgtctttgcgtggaaacattcaaacatggttggaattctgcttgaggtcatgtgtcactgcttaaacatagatcctgacgtgcgatgagtatgatagaagcatcgtaaaatgggctccgcgaggtactaagcgcttaaagtagactgcctactagcatgcaacttcataaaggagtcattttacttaaactggttagctaatcctatcttagtaccaaatccaaatggctcttgccgcatatatgttgactttacaaatttaaataaagcctttcctaaggataatttccctttacctagcattgatctccttagctttatggatgcgtacttgagatacaatcaaatcccgatgtacgagccaaaccaagagcatacctcctttatcacagatcatggtttgtattgttataaagtgatcatttgtgcttataaatgcaggtgcaatataccaatgactagttaacatgatgttcatagatttgttaggaaaaatgatggaagtgtatgttgacaatatgctcgtaaaatcttaacttgtgacagaccatgttgcccatctgaattcaatgttcaaaattctacgccaatataagatgcagatcaatctgttaaagtgcatctttggtgtaggatcaggaaagtttcttggcttcatggtcaaccagcaaggaattgaagccaaccccgcaaaaatcaaagccttatttgagatgcgatctcctactaaacccaaagaagtacagagtttcatatgtaaggttgctaccttaaatcgcattgtttcattctcctttgataaatgtaaagaattctttcaaatcctaaaggttaataaaaaaatttaatggactaaaaaatgcaaaaaggcttttcaggctctaaaaaagcacctacggcagccctcaatcaatacactccaagtcattgcctgcctggagaagtactctcaatctactttgtggtgtctgagtatatgattagctcagtgctcatccgcgaagaccaaggtagacaacaccctatctattaagtgaaaaaaatgcttactagatgctaagcacgctatctatagatggaacacttggcatttgctttacttgtggctttgcaaaagctgtgaccttatttccaagcccacatgattgagatattaactaattatcctcttcaataagtattggccaagcccaatacctctgaacgactacttaagttgttaattaaactaagtcaatgttgggaatattttaccag

SEQ ID NO: 124093 - DNA, 2467 bp, Cannabis sativa
  modified_base (2397)..(2400): a, c, t, g, unknown or other
tatattgaataacataataaaaaaatgtggctaatttagatttttactcttgaacttaaacatgtactaaataatgctccttaaatttttgaggtcgttaaaaattacccctggactattgagattgttggatttaagaattttttttttaatttcattcaattttactaatatgtagattgtctatatactaaatcatgctcccaaactttgatacttacaaaatcatacccctaaattttaattatagaaagtacagttattagtttgattttatttgacaacaaaaaccttgtatttataatttagtttgattccaaaattatgaaatcataatatataaacttttaatttttacacctgaagatttcctgatatgatcaacaattaatttgaatttatttttacattaacaaaaaaaagacaattaatttgaatttgaacgaattatgttcttcaccattttgccaaatttgttgtctaaataaaaaaaaaataaaagcacatcatgaattatatgacataaaaggagatacagatatatgtataatgtattgtgaccataatcaaattaggaaaatactaataaaaataaaaagaaaaagaaaggcaaataaatgaatggaattatccatattctccatttagccaaattaattatgaattgtaaattcattatactcccaaaaaaaataaatatgccattaattttaatacctaatttactcatataatcaacaatcaatttgaaaatgaatggcattatccatattctccatttagccaaatttattaaaaaaaaaaaacgtttttttttcaatttatatataaaagaaaacacactactaaaaaaaatcaaagtgagaaaatcaaataataatcatgagtagtactagtgttgttgagctaattttgaagatgataattccatgtctaattatggtgacattgttatcttcttatgcatgtgatggtcttcaaacattaagtccctctccttacaaccaagtagttgagataagaaacaatttggagggaaatgttgaactaaaagttcactgcaaatcgaaagatgatgatcttggtattcgagttctcaacttcaacgaaacttttactttcactttcttgcgcaacttttggcaaacgactctcttcttttgtgggtttagatgggaaaacgagtttcactggtttgatgttttcactcctgatacacctacctgtgtgtaccctacaccctgtttgtggttcgtcattgctagcggaccatgcaaaatagagtatggttcaggtcctttgtttagttgttatccttggaataaagactctttacgttctaagatgattgaatcaaaactttttcctcaatcacctatttctactactactgctcctatcccgtattaaataaattattataaataacgggcaggagcaattttgcagctgtattgagcgggttggaatcagaaaccctatatatagtactagtattttgatttttattttggtatttatttctcttgcaaatcaaaagacttgatcatgatgatgcacattattgtactagtactttttgaataaggaaatttgttaataataagaggataaatttcctgaaatattactttcttcttcatccttttatttgattatatgtttgggtcatggagttttaattataaattctattgtcaaaaaatttctaggttatgagtttaatgtgtgtgttataccttattatgtcacaaaattaagtttttttttttttgtcaaaaaggagggattaagggatgtgtttgctagaatcatatgtgaatggaaggggaccaaaacacagttttattatcattttagttaaataaatgcaacgaaattttaacatagctgaaagagcggagaaaaaaagaggcattagtgtttattaggtgtgtagagttggcacggcattgtcgtgcctagttttttacaaattttgtgccaaaagaaccaataggcaccacatgacaaactactgggaccgatatatgtcgtgtccaacttgttagccaagaaaatttccgaagaaaagttaggcacgacagtggtcgtgccaaaagacctcttgtcggccttaaaaatcttcttttaaaaaaaaaaaataaattgttggcatgacaattaggatgtcggccctaaaactatatcctttaaactttgtcgcactacgacgtaccagtatcataatcttgttgtagtgctctctaaaattattttaatatttatttttatttttttgagaaaatattctcacgaaacatcaccgaagaggaaggagctcaaaggggatagttaagggatatcattgatagatgactttgttatattatttataataatataatatatagattnnnnatgtgtaataaactaataatatgtaacatatgactatattagttgtcatctttttgtaacatttggg

SEQ ID NO: 124094 - DNA, 1591 bp, Cannabis sativa
  modified_base (1534)..(1555): a, c, t, g, unknown or other
tttggcaactacttttggttaatcaagaaatacagaaaacacagaaaacgacacattcaaaataggcaccacgaaagtttttttttctctcgaagacgattctcacctgagactggaaactcccatgctctcttcggaagagcctaatcagaggatgtgctcggcaagcatggaccaaatggaggagttgctctcgcgcaccagcaaactaacggttaccgacgaagaaggatgggaaatcaacgaggaaggagttgcagacatcggaaaatcttgcctgattggcaggctctgtacaatgaagccttttagccgttcttttctcaagaacattctatgccgactctggaatttgggggacaccgactgggatttaaaaatcaagaaaaccacggctacagcagtgttcttggttctttcgttcaattcgaacatacaattggaaaggacactgggaaaatctccatgggtacttaatgctggttttctcattttggaaaggatgcagggcataccgacggattgggaaacggctctatgctcatacactatctcaggtcgcatactaaaccttccaattaaagctataactaaagcaaatatgctgcgattggcaggaatggcaggggaaatcatcgacattcaagaagcggatgttaatcgaattgcagtcaatggtttcttcaaattcaaagctcggaactccattcaatccaaactcttcctaggctatctattcccccatgaaggacgacgaatttcgctccaatttcaatatgatagactgccatatatgtgttttaactgtggcagaattggctatgaaatgcgccaatgtcaggaacctagagctacgggaattcacgaagagggagaagtgagaccaatctttggttcttggcttaaagtggattcaggggtaaggatggaatcgactcacatcaatgaaccaagcccaaacaatcatagagaactccctggcaatcaaaagatccaatctttgaaagatgcagatgagagaagacaagagagaggggaagcacataccaccactaaaccagtacaaggtaatctcaataaaatacctttatttaataattatgaacaagaagttctaaatgctaataataccaatctaactgattcttttaatcaatctcctgcaatactgaatgcaatgattgaggcaacaagaccccatattcagatggaacaatcgggtggtggaattcgaaaaagaatgggtgatgaactcaacaatgggttgactaataatcagttgggggaaaggatatgtaaagcaagaaccatggctactaaatttctggacaaggatatggaatccaatcttgtggaggttctaataagctttgaaactggcaataccactcagcaaaaaggcactagagaaagaagaaggaagtttgttacaaagaaaggcagtagacaaaaagtgaaccatggaagtgttgaagaagggaagagcatctcaagtggtaacaagacacagggtgttgggaattattttaccagnnnnnnnnnnnnnnnnnnnnnnatgttgtttaaacatcctaaataagaactttctaaa

SEQ ID NO: 124095 - DNA, 1849 bp, Cannabis sativa
tttgtccaaggcgggaagggccacccttattaaattagtgggcttggcaatgcatgtgtttgtcatgcaatctaccaagctttctaaccgattatgcttgagaattgatggtatggtgcgtgacttttggtggggatttgaaaaaggtaatcatgggatccatttgagggcttaggacaagctgtgcctccctaaatcttggggcagccttggatttaggaagactaaggagatgaatcaagcctttctggctaaatgtggttggaaggtgcttacaggttgccagtccttatgttgtaaaactcttgaagccaaatatctcaggggacaggatattctcaagtgtaaggctaaaatttcaaactcctagttctggaagagtgtagtgaaagcaaaagacatcctaaggagggaagcctgtaaagttatcgctgatggaaaggacacgaatattttggaggacccctggatcacagatggcaaagaattctacccataattatctaataactcgtctcattcttacacttcggtgtctgagcttctaactgagtcgggtaactaggacacaaataaactgcatcacctctttaatcttgagacggttgctgccatattaaaggggggtaacccgtcaggataagggaaagatcattaggtttggactaaggaaggaaatggtcgtttctcgtgcaaatagacctacttaatccaggcacttcaacagtcccttcactgtaaggttgccccatctttttggaataaacttcggaacatcaggatcctagaacgccacaagttatgtggtggagcatcctttcaaatgctcttcctgtaagggcaactttactcaaacattttcatattggtgacaacacttgcccgatttgtggtgttgaggaggaatccatcgagcacttgttccttcattgtaacctggccttccacctgtggcgctcatcaccctgtggtattttcccaattacaggaacatggatttgtatgtgggactaggtaaaatttttgtggaacataaaaagcaggaacataaatacagatgaggttttcctttatgcctccattgtaatcgacacgatttggcaggtccagaacgacaaggtacataataacagaatggataatgtgaatcaatgtattgactctatttgtcactcttatgcagtttatagaaattctcttattccttcatcatcctcgatcaccctcgcagacttgaaacctccccccaagactacctcaaattaaattgtgatgttaaagttggtggggagcatatgtgcgtagcagttgttgctagagactacatgtggaaggtggtttaggtgtatacgaccaagctggatttttctgatgctctttgtggcgaagctgctgcggtttgcttggctcttgaggtagccaaggacaaaggacatcagtttatcctggtggaaagtgattctaaggtagtgatcaacactctcaacgactttgaacccagatgggaaattgaaaattactccttattttgaaaaagaattgttctttctttcattacttgtttattctgtattacagctagaacttgtaactttatggcacataccgtggccaaatgggcatttatccacaaccaatttgggtgtcttgatgttactactattcctatgaacatgttctgttacgacagtgaggtctaattttcatgaatgaacgtatcttttcaagtgttgagatgatgctagtaggggtgtgagagaggaagtgaggaagagagagattgtcagacttaggcttagagcttggaggcaggtttcaggcttagatttaacttaggtttctaggctag

SEQ ID NO: 124096 - DNA, 936 bp, Cannabis sativa
gctcagtagaatcacaatttagtattttagtatagtgggacggtttatttaggcattgggaatgtcgggattagtcgggaatttaaagtttcccaaaatacccttaagtactttttaacccttttagtgttggaagggcaaaatagttattttgcctttatgagttttgtcttttgtggattttattaaagatgattaatatgatttttagttaagtggtatgttgattttttagtaaagaaaaatcatttactttctcatttttattgaaaaataaaaaattagacaaaaagtttgcatttctctctctcaagtgctccctctctttcgaaccctcaaaaccagccgggattgctgggtgttttctccattttcttgttgattcaagcagattttaagggaaatttaagctctaggtatagctcttgctctctctctttagtttttgtaatttaaggaagaaaattttgcatgcatggtgattttgctatggtggttgctgtagttgtttgttgttgcattcagaagcttatttatgtttaattgaatggattagaactggttttgttgttagttgttggttttatccatgtgtgaggctttaaatcaaaactttggattttaatggtgaaatggcgtttttgctactgtgatcattgtgtatgtttgagtttggtttctggatgttttatatgttgttttaggttgattttaggtagttgtgatggctggttatggtgttagccaagctttgagctttgaagctcaaacttggagctcacatggtggtttttgtttctgtgcatgctgggttattttgttgcttttgaaatattatttggggtatttggagcaggtctagagagttttaggtggtttggggttgaaggttgagaaatgaatttttgaaaaattcttgcactgaaccggaattcc

SEQ ID NO: 124097 - DNA, 726 bp, Cannabis sativa
  modified_base (343)..(343): a, c, t, g, unknown or other
aaataagatattaatataattaaattattatttaactaaccaacaaaaattttacacacaatcagaaataaatttactcatgggttaggtagaattaactactaaaccaagtaaaattctttaagattcttattattataattcatataatgttagaaaaacttacaaaaatattagaatttgggttaacttttacaaaaatactgtcacacagaaatctttccaaaaatactgtgtttttataaaacaccaataaaacacaaagcagaacaactcaaaacaacagtagaacacctaaaaaccaccagtagaacaccagtaaaaacttaacatagtatactgnagaatgaaacttataaaaaaacacagcaagaaagaaaaaaataccccctggtagtatttttgtaaaaaaaaatatcaaaaattaatataccatataaatttccctaatgttatctacatttaactcaagttagctattatcaaagtcatttttaagtttttagtcaacaaacacaatttaaaatgcaaaattacaaatataatctaataaaattgtaatatttttttaaaaaaagtaatattaagtaaagaaatgagcgacaacctaaacagatgtggttagattttttcatacgtggctctctcattttttattcaatccatttaattaatgtattgcaattaataataaatttgttcatattatttattttttttattaaa

SEQ ID NO: 124098 - DNA, 547 bp, Cannabis sativa
accatttcgcctgagcccgtagccgctgaaatcgcaccagcagctcaccattcatccacccagctcgaacctgccagaacccatagcaacccgagcttccatttcccccattgaacctgagtttccacccaaccacgaagcggagtcaccactcaacatcaactcagccactccattcaccagcagtagcacccccgaagtcaaccaagcactcaccattcgaaccatctttgttcacaccaagcactaaccagaaattcccattcgaaccaccattcaccagcccgagccatctccttcaaaacatcattccaagcacacaatcccatctccatttttttttcctgtaccagtttcgaagccaccacaacaacccagccgttcccttcatctattccaccgtgaacccaactttcgagctacaccacgaaccttcaacctaacccgcatcaccacagtcaacaacccaacaacatcacggcctcaccagcaacacagcaaccgagaatcctctgtcaagccgagtttctcagccaatctaagctaa

SEQ ID NO: 124099 - DNA, 999 bp, Cannabis sativa
accttcaacctaaattctaacttgttataacattgctaatatgtgaaaatataataacttatataaaatttatggttttaagatgaaactccaattgattttgagataaaattttatgagccaaagacaaagactaacgatgaaatcacgttcaatcaaatttttaacatattagaaatgagtctctcttattatggaattacgtaatataagtgcgcctcacacagttgttataataattgaaagataaaatttaattttacatatacatttttagtataaaatttcatatttcagttaatatttttattaaataaataacatataaattatgatcacatttgtaattttgcaattattttttaataacgattgaataacttttaattcctattctatcaccttgatttttcttattgtttcttttaattattattatcaattactataaaaaaattagttactattctataatctaaataatttcatttagaatatattctatcattatttatattttattgtggtaaatgatattttttgtaagtatatctcacttcacataaaagagaatgaataaaaagaacattgaaaagaaagaaaaaatagaatcttaaaataattaccttatgtatttttagacttacaaatatatgtatctatacaaatatatatcttaaaacatgtttagtttttttttttttttgaataaaaaaatagatttattaattaatgaactcgttcaaaataatagaatgcacttcagaagaacaatcctccaactaaagcacacaagctgtagagaaacaagagtctcttgccaagcaataagccaacttgtttgcagatcgtttaacaaaacataactcaacaaaagacaaaaccaaaagtaaattcctatcatcttgaacaataagaccaaactgtgaggacatataaaaatattactttggactgcttggacacacaccaaactatccgtttctaacactacattgt

SEQ ID NO: 124100 - DNA, 1564 bp, Cannabis sativa
gatttaattgttatatagaaaatttatttcaatgtgtgtttgtctctgtttgtacatacttttaattatacttatttcaaagttttaagaacaaattaagtaatgtattacatgatagtgtaattacacactatagtaattaaattattttttaaaatataatgtacatttaaatataagatagtaattacttataaatttttaatatttatttaataaaatagtttgtaattacataataaaataatcatttttaatatttaatattttaaattaaaatttttgagtaatataaaatatgagaataaaaagtataattattacgtgattaaataaatacataaattgtataattattttcaaacataatattatttgtagtacttttcatttaaaactttctaaagagtaaaagaccaaattaaatctatgtatacttttgtgtcatgcattgtcgtttgtgggtgagccaattgtaaattttcattggtagtggatcaataataaatttacttttgtcgtttttagactttatatatacataaaaaataaataaattaataaaattatatgatatattcttttattatcaaatttataatttttttcaagtgcaattgggaagatatgtctataataaactaagataataattattttcaatgatgactatttcaaaagaaatcctcattaaatcttataaaggttaaacattttcctctcaaccgaatctcacttagacttaaatcatatatataaattaataaatatatattatatattatatattatatttcactacatagtgctacctttttagtaaaatggtcaaacttatatattttttttaaaaaaaatagagagtaagttatattcttaagctcacaaaaaatgtttaaagatgaatattcatcattttattcccactaaagattaaaagctctatatatatataactctatctcccacttaagaagcaaacacacattaattatgattgtaaaagtcaaaccatctctaagttactatgtcaatttaaattctaggatatataacatactatattatatacatgatttaagttattagtaagttactaatatccgtataaaaatattttatttaagaataatttttaatttattataaaaaataaaattttaatttagatcagtcataataaaaaaaactcaatggacatgatttgatacattaatacatgtcaaatttcaaggggcaaaaatcctaattaattagtttaaatttatttacgtaaaattaataattttattacaaattgtaatatatttataaatattacatttacgtaaaaataatttattataatatagtgtaaataattatttattgttgttgttgtacattgatattttttggtatttttatttttattttctagtgtaactctcttaagttataacctccaaataataatatataatttgcttagtcccaaatgtattcttaatgaaagcatgtgtactttagtatttaaattttactttttgaacctctaccaataaaacttgtatttagtgtctta

SEQ ID NO: 124101 - DNA, 1138 bp, Cannabis sativa
  modified_base (846)..(846): a, c, t, g, unknown or other
taagtatcgggtcccataaaatttaatataatagtttttagggagtatcgctagctaatcgcaacgcgacatgttgagaaggtgctaagcgccactggtacttaataatgctcttattacttatacacgttatctatatataacttaccaaaaatttttttaaaaaaaaaaataaataaataataataccaaattaataatgtgatgatgaactcccacaaaattatagatatattagaccatatatatacaataaaaatgtaagaattatattatatttcacacagaaaataattttataattagtggtgttgagctagtcacattttttagtgggggtaattttttttctaataagagtattaatgaaaaatataatatgtttaatatgtgaggctaaaaataataataaaattatgttagatagtaataaagaatataaaaattatgagaatacaaatgaaaatatataaggataataaagaaatattaattttatgagggcaaaaataatttttttttaaaaaaaatttaaatacgaaatgtatttctattaatttttaatatcgtgctttaattaattattacaaaatttaatgtaaaatttaaaattaaattaatacttttactaaatatatatatataaatcatcatttaaaacaataaaaaataatgtaaaaaattataatttaatcctatatagataaataaagtaataaaataattaaaatagcataaatgtagaaaaaaatatatttatagtaatgtaaacttgacaccaaagcttgcagatgtatcaaatttcacacaatatttgctaggtaagctatatatatatatatatanatatatattatatatatatatttaattttatcatatatttggatgttgagatactcttagtgcatttttaataaaatgtaaataagtaatgcaaagctaaaatataatttatttagccaaaaataaattttaataggtaccaacggtgatacaaatttttaacacaatatttattatgatgtaaaatttgtattaccataaatatattattttttttatttatttttggataaatactattttgaactctgtgttttgcaaaagttaccaattagaccatctgttttgttaa

SEQ ID NO: 124102 - DNA, 2739 bp, Cannabis sativa
  modified_base (54)..(54): a, c, t, g, unknown or other
aagttcttatttaggatgttaataaacatactcgtgagtagatctaagatcctngtaaaataatttccaacatgtattgcattgcctaaccaggtgagctcatgtcataatctaacatccgtataccgaattgccttatcaagctagctaagcctatgccataacttggcaccatatcacctaatcaggtatacttatatatcatattgcctaatcaggcaaatccatttcacaatctgaaatccatatatcatatcacctaatcaggtgaagtcgtatgtcacatttgcattattactatctaatcagacagtcaatgattacaaaaccagtcatgccatgtggtacattatgcctttcttacctatctagattcatgcatgtcggccaaaccaagtggaaaaatatccctgatgatctcgaccctatatcacaacaacagtaaaccagtaagtatttattttaaaatactacttaacagttgcgtaagacaatataggattttctaccaaaccccacggtataaatacactaaaacaaaccttatattttggctctaaaatatacaacatattatatagctcgttggaagtttcaaaatagtatatagaacgtctaaaacggacacctaagtgaaaagttatgacaaaaatacaatttttgatctcatatgaatttccaaaacggtagaacacaaaaattctaatttttgcgctcaccgaaacctatctaaatcactctaaacttcacagagtacatatatatcataaatactaccatccttacgtaacataattaaaattgagccctaaatgaaaaatgacagtattgtttggactaagctttaaaaagtttcaaactcaatttctaactcaaaatcacctcaaattcaacaagtaaacatcgaaactagtctcatagctaccaaagaacagttctacaaagctagattctccataatcactctaaattacaaagctgctatataaaaccaatcgtttttaacttaaaacaaaattaaattatacctaaagctttccctcttcaaagatttgttatcccactattacgagagcttagatcgctaggtttcgagttgacaatcaaagaagaaagatatagagagaagagattttcgtcgaaggaggatgagggttccttctatactgtttataaacttataatatatataataaacttatcattatgataagttttaataaaaataataatattataataataatattattatcctattgtcgtttttttattaatagttatcctatcatttcttttccactaagaaacctccatttctaggttatttagctaactgcgagtaccccaaaatatcttggtatttttaaaatcaacttacctcaataatctcatcaatatttctaactaatgtcgttgtgacatttttggcctccaatcgggtctccagggtcaccgaacataaaaatatttttatttcataaataactcatattatatccacgtatttcaaataatctccgtaattaataaattacgcttatttatccacttatcgagtcttcagggtcgccaaacctcaaaatatttttattcttcatatagctcatattatattcacacatgctatttaaatctctgtaattaacaaatagtgcttatttactcacttatagtaaatttaaattttatgctgaaatagattagtaggatcataatcccacttattactcgattaacccataaatataaatataaaccataattatttatcattaggtttattgagatattacaactttaatttttttaatttaatgcaaaatttagttttagcccaatatacttcatgtgattctaacttatttaattgttgtcatgattatgatttatgtatggttttactttatgtggttataattaaggctattatctagattgtgagatttattacttgagaggggaacttttaaataatcagacatcaggtagatcaacttaggtgttgtgagattgagagataagccttaggtatctgaaatagttctaaattgtgaaattgagatgtggaatatttaggattgtttttagagtgagacttaatgaaggtaaggtataatggtggtgtaaagatataggctattggtattcgtgtttccagataattgacatgtggacttccaaggcctaaaattagccaagacatacccatgcatagacccaatcagactagtgggtcaatccgccatggagtcagaccacggctccaaattcagctacaaatccaacttacagttatgataaaactggacctaatttgtcttgtaagggaggtcacctagaagaatataaacccaacttaatatatctggacaccctcatggggtaattagggaagggaaattgaaaagaccttcataagtagtcctacgtggcacctttctaacacagaatcccaccaaattaggggtttgttccttgtgtcagacttagggagtgcgcgcaccatcaaaaggggcatgcctttttccaacaccttcttctctaacgaatattgttcacgatcgacgacacttgcaacttgtcactatcaagtggacccttccatacagattcccattgtctctcaaattaggcctcacctaactgacccaaagtcaatataatatgttttaccaggatgtagatttactaccatgtatgttgtttaacatccgaaatatgaatttctaaaacaat

SEQ ID NO: 124103 - DNA, 919 bp, Cannabis sativa
  modified_base (69)..(71): a, c, t, g, unknown or other
ggtagagagctcttgatggtagcatggggtatttggaaagctcaaaatgagcttctttggcagggtcgnnnttctcaggctgcggatgtggttcaggtggcaaggtctactcattttaattggctgttggctcaagaaaacatgttcgaaccactattgtatgaggctattgttgctggtagtagtgtttgttgggtgaagccgctgctgggatgctgaaaatcagtactgatggggcgatttatgaagcaacgaatcaatatggtacgagtatcgtcattagagattgtcatgggaagctaattgaagctcgatcttctttgcatcttggtgtttgtcagccgactgttgctgaagttttgagtgtcaaggaggctctcagttggccgaagacgaagaacctgtccaatgtgtcaatttagacggaccgtattgctgttgttcaagctattaatagctcggttgcacttccatctgtctttggtttgttcaggagtgtcaattaattctttctactttaaatgatgtttctatttctcatgctaaacgatctgctaacaaagccgcacattgagttgctcacggtgcttgtttttggtatgatcgtctttttactgagagcaatgttccttctgctcttcagtccattgtaatagcggatatttctatctaatgaattacttttatttcaaaaaaaaaaaaattattttctctaaattttttaccaaaaaagtattaaaacccttccatcaaatgctccatattctttattttaaaacatttttattccttctctacatatagagaatgattaaagtacaactctaagtattttttaattattttttttctctctacaaataaaatattttttaggctaattagcaatttttctcccggactttgacatatactaaat

SEQ ID NO: 124104 - DNA, 1741 bp, Cannabis sativa
tgaaattcatcggcttccgagccattagaacgacatgcaaacttcttgtagattaccgggcccttcataacctcgtccaaggtggccaacttctttggccctttcttcgaggactttgctccggcggtagcaggggttgacatggaggggacttggtgaaggttaaggatttattggtcaaatccaaagaaaccgtgcgtgtgaaggtcacggaagacttcactcatctgaaatagaaaatccagcagttagcccccatatcaaaccctaaaatcaaaaaggagaatgggggtcccctaaccgctggaaagaggccccctctgaatgtctgcgaaaaaagggaatccaacgattctcttgggtaaacatcctagcaaagaaggaaagaagaaaaaaagggaaggcaaaagtcgcttcggacactcaaaaacaagcactcaggaaatcaccattttttgactttctcaaaaaaggaaaaacggcagtttatatacaacaaaagcagtaaatgacataaaatgaataaaaataaggagcacaatttgtcggacgccccacttcgagggcgtcacattaacatcggccataaccgctgtttcaagaaaaacaaatacatcagacaaaaaatacaatcatttatacttgccctaacaagtggaagaagtgtctgaacagaaacttacacaaaggcagtaaggaagaggtcgacgacgcctggtagtaatattttttctggcaacagcggaggaaaagcagaagaaaattagaggtgtctggaattttgttgagtaggtttaatagactagaaatcgcaaggtagtgaaaatgacccagttggaaaaagtgttggcttttatagactagatggggtgcgaggcagcattgatcaggcatcattgtacatcgaggattcacaacgattcgaattccatgatcccacggatgggatgaatgggtgtgaagaggagaaagggcggttgaaacgttttgagtacttttctgacaccgacattaatggaagggtttgtcaaatggacgggaagcaaattgttgcctgcaaaaataaataaaaatcaatgatgacgatcataaatactgcccacgcgcctggggcacgtgccatttcatttattaagaccggagatagctcacaagtcttatttacatgcaactaaataagacttggggggtaaatgttgccccggttcattcccaatatatgtggtcgttgccgtgtatgacatgtggacaaaataaacacgtcacccgaagacaggttaaaagtcgtatggaagaagcaacgagtatgggtcatgtcgttagctcctggacaagtgcaaaaggctcaccttctcctccgggagtcaagctataggaaggcacctccgggcctagagggccctacttgaacagtcactttgcatttaatgcagcatggggaaaacatttaggcacgcccataagaggacgtagacatcgtaagcctaatttaaagaggctagtgacggctccattatgcagaatcacatcaatcaagaaaggatgaaggctaatccaacctaacatctatgctgcctactacgtaggtaatgcatgccctattttgtatcatttggaaacttgtgcttatccatagttggctcacaaagacaagttaccccttttcaactattccctccaatctctatatatacccttgagaaaatgaagaaggggatcaaagaaagagagagagagagag

SEQ ID NO: 124105 - DNA, 1054 bp, Cannabis sativa
aaaaaaaaaaaaaaatgaaaagtagcattagatatatactgaaacacaaatttatacatctttctcaaactatagtttatgtatagaaaagaaaaaaatatatgactatactaaatacatgcatgatttatcactttaaaacaaatttatacattatcaatcatatttatagtttattgattttattgcagatgatcattataatcatcgtttgatcattacccgaaaattaagaagacaaccgatcggcgggccgccacctcctggtgctggacacaaataatcaatacagcttgtaactttacatgaatctattataggtttttacttcgtctttaacacttggaaaatcaggtactgaagaattaaagcttctaataaataagtttttacttcattttccagtttgacactttaagaaagctgctattctttttgaaaaagaagtttgttttatataataacaataattataaaagagtatgttgtaaatatccttacaaactatttataaattataagctgcatgtactatatctatttaccattttttattttttgataacacatctagctattagttgtttgggtgttgaaagttttcttatttatgtattcatagttttctagctgtaaacgtagacgagttcttttttatagggcgttctctcttgtcaatgttagaatttattaaaacagtgaagaaatacaaataattaaagatttaatcgtatttttaaaagtacttaatatagaaaatactaaattatattttatagaacctttgccaaatcaaaaaagaagatgatgataaaaatgaccaaaaacactaatttgagactattattgcagattgcacagaaagttgtgatattccaataatacactatttcattaaagtattttttttgacggggaaggggagaatacagaaaccctaatatttattcgggacagtacctatttatagactcattatataataagttttgggtatttataatttgacccctcaataatttataaattaacttatggtatctacatattattt

SEQ ID NO: 124106 - DNA, 1619 bp, Cannabis sativa
ggggggggggggggggtgaacaaaaagctccttgctgccaataattgggtcaaggagctaatgaaggagattcaagagatggcgtctaccgcccatctcgaggcagacaacgaggccttgttgaaggaggtcaatgcacttaaagacgagcgggagagtcttcgcactcttctttcaaagttggaagaggacatcaagactaggcagaccagggaggaagagcttttgaaggaggtggaaagcctggaaaaggctgctttggaggtcttctacaaattttggaaggccaacccctcaggaaattttgattacctcagagattccaaagaggcatatcttaattcctatgtgggtcaggcagccaaagaaaaccttgaggcagccaattctagagttccaaccgaccagagcactgagacccttgccgtccagaatgttgagcctccgacccccacagaccaagttgatccgtacaaggagcttgggacccctcccgtttgaaacattttttctctgttcgacccatgggcctttattagagacaaaaatgaccggccaagcagtttttaaacttgggttatattcttcattttgagacaactaattgaccgcgcaacctttaatcttgggtttaccgtgctttatttatctttttcaatgaatatttctcttattttggtagttatctgtgcaaactgttatgtttttttagcttgttatttatttttacctatgctttgtacgagtatagtttccccccaagtgaccaagtagacttatgactcttggtcacttgcatttcacaagtatggttttcatctgttcagatctttggattcaagcagacctttgtacacatttaatggtaaatttataacttgctaatagaatcgacataatcagaatttaaatagacatctttattcattcattggtcagaatagttttattaccgtagtaacttacattcataaaagctattatatgatctaatatgatcattatctaaatttaaacataaaaaaattgcacttataaaaagaaattatacttttaaaggtggtcatccgacctgagtacttaattatttcatcaaaacccttgggcgggatccgtctagaaggccatctacttaaaagtaaatgttctttcttggtgtacttaaagtggtcatccgacctggtacatttactgataatactttctcaaatgttccccatatcaataccttagtattagaacgagattcatattttcgtcatatcacccaagtttgtatgcccctgattttaaaacttcaaatatctgatacggtccttgccagtttggtttaagcacaccagccgtgttgtctttcgtgttcaggaatagtcttctgaggaccatatctcccacaaaagatttccttgccctcacttgcttgttgaagtaccgagccaccttttgttgatgggttactaactttaggtttgttgaggctcatttttcttcaatttcatcaagtgattctgctaggggagcatgattagcttcttgatcataagtcaatcttgtgtgggatgaaggtgttggaatttattttaccaggatctatttactatcatgtatgttggattaac

SEQ ID NO: 124107 - DNA, 718 bp, Cannabis sativa
  modified_base (45)..(60): a, c, t, g, unknown or other
atgttttaatcacaagtaacattatgttgtgactaaaagtcacannnnnnnnnnnnnnnnttatattgtgactaaaaagttgttactaaaagtaacagttttttgtagtgagtagttacactatggacttgaaatctatattcctctggttgctcttgaagaaaaagaagctcaatagaaatttcaatagagttttcataagtaaattatattgtttttaaactttttagagttgccccctatctattgtaatttaggagtatttataggcacttttttctttcacgtgcttgttgggcagaacttactaagagaaatctgaccgttgatttagtaggtggttgattcatcacatggtgtttagaggtgacagcccgtactgtctgatcatctcatacgtgtcgccacagggtcttcccgttttgaattgcccttatcaatggttgttggattacttaggcaggtaccacttgcgccgtacctgaaaaagcatggatgccatgtctgcagtctgacatgtacgagcagagctttaccgtgacactgaacttacaactcattttgagttcttttatcacccgcattggcgtgctcgaggaagccctagtctttgtggggcgttttgttgagctttgtgccttaaataaaactctctttcaatgtaattttttctatttaattatcaataaagaaacatatttatttttattacttattt

SEQ ID NO: 124108 - DNA, 543 bp, Cannabis sativa
agccatggtgactgcaagatctgactcatctggatcgccttcctttcagcgtcatcgtcaacatgcatgtctaaatgattatcttcacgatcttcattgccttcattcatagggtcttaaggaatgaatccttgtcagtttgatccttcttgtggtgactgatcacctcagttggatcttctttgtctctcatcttagaattaggattaacatcaccctttctagggtcattatagtgaagacaagatttaattcgagtgagtaccataattactgaacataattttgaatgatatcactactttcttcaactctcaatgaaagtaccaaaatatttactgagattttcggataaccaatattttaatactagagctaaagaaaatataattaagagaataaaatatgacgaagacacctagagttcttacaaggttggagcgttaatgagccttagtccatgagtcaatattattataaaattggctaaaaaaagcttaagagattacaatgagtatgagcactctattctcttcttaagca

SEQ ID NO: 124109 - DNA, 1486 bp, Cannabis sativa
  modified_base (1412)..(1424): a, c, t, g, unknown or other
aattataaatatttaaaaaataaataaaaaatcagattaaaaaaattaattttttttatttttttttcctttctatttttccttttcattttttttctctttttctttcgttctctttcttctctacagaacccttacaacgtcgcctagaacaatagtagtcactaaaagaaatatcacttttgctagcacaaaaatgtgctggcaaaagtttagtattgtcctggtaaaatagaatttacttcttatgtgttagcaaaagagattggcaaatcaacgttggtattaaagcttttgccaacacaaacgctggcaaaaataacttttcccaggacgtaaatgtgctgttaaaagttagattttagccactacaaatgtgcgctggtaaaattttgacatttttgtcagcgcagtttgtgaaatgcactggtaaaagttaccagtgcaaaaacgaactgtattggtaaaagtgacatttcttgttgtaaaatccaatttttgccaaaatcgatactaaatgtccatataaaccgtctctaaaattattttttataataataacataatttacttcattatgaataaatatctaaaatattctcatttttcaaaactacactattaaaaaataaacatatcatttttacctcaaatttttgaaactcgtaaccttatactttttcacgaatcatcacaacatattataactaagagcattgttattaggtaccagtggtgcctagcaccttttcgacacatgttgcgttgcgattggctagcgatactccttaaaaactattatattaaattatatgggacctgatacttaattggaccaatagtgatattaacacataagaaggtgttaagtaccatttaacatttctctataactaatattgtacataaaaaaacggcttacgtttgaaaaggtcaatattatacgtacaaagtggaatttctcgtccaactaataacaccgatcgatatgtcaacagtcaacttattatggatcataaattcataataatttgtaatttgtaaggatggtaatatttgcaaaatattatagaattatctgtacttaggtttagttttatatatatagcttttgccataaccattaatccaatgagttctgccttcccatgcaatttccaggaagcttattaatattaattagctagtagagaaacaaacgaccatgacctctattatatatattaaggattaagccaaagtcaattgccttattacctctgcagccttttgtatctatgaacttcccgcccaaataacgactccttcctcatcaataactctttcgtacgtacgttttattaactaatcatctttctttttctttttctttaatatacttttttccatttatatatactagtaaaaagttnnnnnnnnnnnnngtatactaaattttatgttagtttttttctacgttattaaaaagtgatacaattaaaaataa

SEQ ID NO: 124110 - DNA, 1184 bp, Cannabis sativa
tcctcgtaaaataaatttccaacaacaattgtgtcttttttaaaaatttccaccatactttgagtgcttataagatgatttgggtatttttttttatttaagtttaattttttggagcttatacagttttcttattttgatttgaaaaataatttttataccttaccctttttatattgtgtgtaaatttttcttttttttttatttatcaagaaagattttcatcaatcaaattgattttttaaatatcatacttatatacttaatgattttacaaattatttggccataataaattgggaccatatattatatatattatacattatatttctatagtgtaaattatacatatataattctccatattatgtacacatatacagaaattaaagacacttgaatattacttagcttaattatatttttgttacaaactctatttttacgcaacattaagactttgttgatatatatttatttttttgttttattttttttactaatatacatatatattttttttcttcctattttgaaaatttattttaaaaggtaaattgtaaggctaactatgggattttgccctaaaattctttagcgtggcaaaaaattaaaaattacaacaaataataaataataaaattacaacaaataataaaataattaattatacaaagcaaagtaaattaaggaattatatttgtcaattaatttgataagcaactttcaggtagaactgagtcaaaatattttccatttgcattggcacaaaaggattgagctaatttgtttccaaaagtttgaattattacgactaatcaccaactatcggaagttaaaggtatgttttctttggattaatttgtttattgagattatgtatttgtatatttatgcgattattagttaattcaattttatttataggtttaacatatatgacaataatattagtgaattaaaaatgtttgatacaaagatgaacttccatgcaaacttcaataactaattcacacatgataatatattctcaagaaaaatatatttataaatactaaaaaaaattaacttaatttgtctaacgtttatattgcatattttattatagtccatagaggccatggccccgtaggatttatataaatgcctaaatattatgtattttactttttttttttttt

SEQ ID NO: 124111 - DNA, 1769 bp, Cannabis sativa
ccaatgattttatttaaatgcaaccaaaaatgaatgaaaataaaaattgtttcctttctattccattccatttcattacctccaaccaaacgccacccaagattaataatttgaaatagtaaaattgttactttagtacattcatcatttatccagtcaatttctaaaatcattcttttctattattttgctatttcatttttattattttgtttgaattatattatgagtttctaattaaaattgtaaatttaaagtaaagtatttagcacaaattaaatatattagtgtgagttcgacattctataaattaaaactatattacagcacaccatctcaaactatgacttaaaataagatactagcaaatcaaatcaatgggcatacacaatagaagtgttattaaatataccttatccaataaactattctaattaacaattttgaaatcaaaatataattatataaattaatcataccccacaactcaactggtgagtctccaaaaagaaacagcatcccaaaatatctgaccatatttcttttctccttcattattattattattttatttatatatttttgtatacaacttaatgcaaaatttaggtcacttaaatttaattaatcattatgttcaaggcaagtaagtaacctactattttatttttctttcgaattttgccactatatccttgccgtctttgtagtgtgttgcaattttacactaacttttatttattaaattagaaataaaatatgtagattttgaaatttaaaccgactttactttgcttttgtgcataatgatcattcaataccttacctagtaaatagtaatcatcaaagataataattccttttcagaaaaaaaaaaagatgctaataataataataataacaataatagagaagtgttatataatattaggaaatttacaacataaatactatatatttttaattttatatacttagatattatattatttaggtaaataacattttggatcgtgtgttttgcaaaatttattaattggactagctattttattaaatgataaaatagatcctaaattttctaaaattatataaataggatcctgaactaattttttgtcaaaataaaacttaataataatctgatctagatatgttatgacaaaactgattacattttgtgtatctgttagtgttaaaaattgtcttaaagttagttatattaaaaaataatttttttgaaaattgagttcatgatcctttttttactattttggaaaatctaggatctattttgtcatttaacacaacaaaaggtccaattagtaatttttacaaaacacaaggtccaaatagtatttatcctattttttcatgttaaaatataccaaacattgtgttttacctcattctgtcattgtcattttgttaagtgtgaaaaatagtacacatataaaactgagattaaagcctagttatttaaagaaaataagagtaattatataagtttaactcccagatacagataaataactaagtttaattttgacagtaataatacctaagttatattttcagaacttccgtaagtatttgaccgttaagtgttaagccaatagtcatgtgacaattcctgattggtcaagattgttctcggaggaatttaaacaacaccaaatattgtgaatattcaaacaatgttaaaatattgggatattggcggctaaaccacctgaactttacactttgtaacacttaaccacaaaaac

SEQ ID NO: 124112 - DNA, 1464 bp, Cannabis sativa
aggggatgcattgtagaatttcccaatatcattttatcaatcacacttttggatctgtattttaaaatattatattaagtttaatttttaataattttttattttacaattatataactaacttgaagataatttctactacaaatagagaaaatataatcaattttattgtgacacctccagatcaacttatcattaaattttatttagacaaaaaaatcagctctgatagtattttgtaaaattttgaaaaatacagaatctaatttatcatttaacaaaataaagaattcaatcaataaattttataaaatacagagttaaaaatgatatttaaccttgttattattaaaataaataggtgtttaaaataaagagatgaagattttttacgtgtttcagctattaattaaccttagtccacaagtcagtctattggcctcttagagcgtttttgatgtgtttataatatttttgtaaaaaattctaactttatactctcagtatctcttgaagaagaagaagaccaagagtaatattagcagagttttagctatgtaggttgtattacctccttcgtttgagaatcgaggggtatttataggctaagtggcgggtatggacaaactcatgacccacctaaggtttttgctaaaaacccattactggagtaaattacatgaaaaattagagctgactattgggtctcgttggagacattatgctcgtgcatgctgcagctagataatggggaccattttgtactatatggacacgtgtcatctaaaggttcaaccgttaaaagtagaggccatgtgtcgcccaaagttttctcctttacaagtaggggtttgtaatactcgcctagcaaatatgcggtggaggtgtgcgcactaccacgctcggatgtgggagacaagcataactgtcacttggtgatctggcatgcgtaaaaggtagacaaccgtaacactccaaggtggtcgacattcgcattaggcccttcgagtacccatccaggtgtcgtctaggcaagcttccatgtttagatccctcctagtctgggagaggcaatttgccttccgcgtcttggaaaaccaatgtagggtcgagaaggcttccatgtactcttccatctcgacctattatcggtttcaagaggcttctccatggctggattgcatcaaagggtttttaatttgagaattattaacttgatcctcctcattaaatgccacgtgtcatacatccaaaaacacggataacatttacccctaagctcgggatgcactgcaattcaagagcttacaattatttttcgctccttggagataagtctttgacacgtggtatttgttaggatcgcgggtgtatcccatgagctgttatcgagtaaagggtcatttgttgggttttatgccctaaataaaactaatttcaatataatcagctttacttattaat

SEQ ID NO: 124113 - DNA, 561 bp, Cannabis sativa
aattcatgcaaacaacaatcacttcaaatttcttatattgataactaatctgattgtaaagagttttatttagggcataaaacccaacacgatcgaaatgccatggttggccttccatgactctacgacggtcaccctcacaaccaaactgaaccaggaacatgccggagtggtattcagaaaaagaaaaagggcagcgggcaacccaagcttctttcatagctttttgaatccaatcagctttcaaaggtttgggggataaagtcttaacaaccaaacagaaagagtgggattggggttctgggtgaattgacacatggtcgaaatcgtgaacgagggcttcttcctcagtgagttgaagagagtgggtatcagagtagacatggtaatgagcaaatatggcataaaacagagggtaggtgaggagaataaagctgatatgggataacctgaactcaaactacacaaccttaaatagaagagaaaaaaaaaagaaaatatgtgataatgtcttcttgagaaaaactaagaaaaaaatatgaggtacgcacataggaaaaa

SEQ ID NO: 124114 - DNA, 1809 bp, Cannabis sativa
gcattgcccacataacacttggggagcaatagctgcacagagctagagtagcttaattccaaactagaaccttgcctaaaaaaaagaataaggcaaaaaagatgagaagaaaggttgctaggtatctaatcctagagagagtaatgtataaatagagcttctcaatgctgctgttaaggtgtgtcaccaagactaaagctgagctattgatgatagaagtgcatgaaggcttttacgacattcatgcccggggaaaatcctatccaaaaagatactttgacaggggtacttttggctaacaatgatcgaggatttgatgaactttgtcaaaaaatgtgaccaatgcatgacattctctaagatagagctccacgcatcgagctcgcaatgatccagtctccttggccctttgcaatatggggaatagactttattttttaactcgcaaagggaaaaggaggagtgcagtatgtcgtattcgttgtagactactttaccaagtgggtagaagctgaaaccgtggaaacgataacatcttaaaaattttgtcaagaacatcacatgtcagttcggacttccatagaagattgtgtcagacaatggaaagcaatttaatagtgacatgctcactaatttcttcaataaacatgggatcatcaaaagcttctctatcgtggcccatcctcaagcaaatgggcgggtaaaaactgtcaacaagaccttaaaggacactttgaaaaagcaccttggagaggcaaaaggctattttccagaattgctcccagagccctttggttgcacaagactatcgagaagatggccattgggcattcactctcgcttatggctatgagataatgttccctgtagagctggtgcgaccatctcacaagacgacaatctatgaccaagatacaaacaaaatcctactagtagaatcccttggcaaaatagaagaaagaatagatcaagccaacttaatgatgtaggcctaccaactaaaggttgcaaggaacttcaataaacaagtcaaggataggaaattcttcataggatacttggtactccaaagagtgttcttgaatacaaatgatccagcagcaagagtgcttggaccaaactgggaaggcccctaccaagttacagagataacaaggtagggagcctacaagcttggaaggtacatcaagaacatggagttggttctcctgccaagatattggaatggggagaacctctgcaagtactactagtgactagcttatagaatgctactctaaagtagtagttctacaaacttgatagtaagagttataatataagagctagtacccatgacctttttaagtggccgcctgtcgttcttcaacgatggcctctgcttggcatgtcaggcatgggtaaccatttgaaatctagaagtagactttttattatgtaagcttttagattgaatatatgtatgtagcacaacaacaaatacaaatttatgagtaaaaaacaatgttttagttcaaacatattgtgtctaaaccacttgctaacaagattaacttcttaaagttattctttttcagttccacatgtgtacaacaggtagcaccctatgacaattccttggcaaggtctatgaaacatggtgaattactgtaatcctgtgtgctcacttggggggcacccataccgtacaatgcatcaaactagtataaagaatatatgcaaagaaattttaacgcttagtaaaagctactaaacctgcctctaagtcatgtggaggcatacttcagcttcacataacgaaaagtaaat

SEQ ID NO: 124115 - DNA, 1363 bp, Cannabis sativa
ttgatcataagggaccagccattctacactgtgacaacaaagctgcacaacacattgcagcaaatcctgtttatcacgagaggactaaacatattgaaatagactgtcacatcgtgcgagaaaaaatacaagaagggattattcgaactgctcatgtttccaacaaagagcaaatagcagatatagtaaccaagccattgtttcctgctcagttcaagctgctgaaagacaagatggggcttgttgatatacatgctccatcttgagggggagtatcaagatgtgaagagaagaagttgttagttggctgagctgtcatcagttagtaaagtctgttatttttagttagtgataactgaattctgtttgtattcagtttgttagttctcatcagctgtgctgatataaggtgttgtaatcctttcttttctattcaatatacagaaacacttttcctctctcaatttcttttctctctgttcttgttctgtttgtagtacagtatggttttgttgtttttggttaaaccaatatggttgtaaaatggttggtaagaccagtaaggctgttttttgttggtacgataaattcagtttgtgaaataaagttttgctttaatacaaaattaattttcttttttgtgaatagcaagattgcaagttttaatgataacttggagccttttgtcttgatcgacatagtatggtagtatgacaaatatggcgatttagcatatgggactctcatcaatgttttgaaaatatacacacagatgcgagtggacttttcaattttggaacctgctttaatcttagtttaaatttgttttatttttgttttaatttcttttgctagtaaaaactaaaatttgataatctctttcaaattctaattatgttagatataataattttattaggagaagaaaacaaaagattggatgatcagttttgctgtgttttgaaatgatgggttttctttatacatgaataagaggttgcctttagctggaaaatgttttaagatttatttgggtatttatggattgaatataacttccagaagtataaatgttttaatatttatttgggtggttatggattgaatatgattttcagaggttactattttgttaatatggctcacatattcataaaatttgattttgtttaaaatttagtttagggaacttaataattggcttaattatcaaaaatggagcaattatcagttttttcaacattaaataaggttgtaattttaaggatttgattgaggggtatagctggataaatctgttgggaatattttaccaggatctagatttactaactagtaggtttcattaacatcctaaatatga

SEQ ID NO: 124116 - DNA, 1647 bp, Cannabis sativa
  modified_base (95)..(95): a, c, t, g, unknown or other
  modified_base (1598)..(1601): a, c, t, g, unknown or other
tataatttacatacataatcatgagaaaaaatttgcctaaaaaattatttcggatactaaaacagatagagatgtatcggtgtatcccttttaanggggtgcattatagaattttccaacaaattacacacatatatgacaggtggcacgttaactcaagttaccatatatagaatgaatcaagatctcctattaaaaaatggtatctcatatcgtattaaattaatcaaaatttaacatgtaactaatgttttatttataagaaaaattaaaactctaattgagtcaacaaaagtagttagtatatttaatataaattagattagttgatgtgccaaattttaattgatttaacacattataagtgactactttttaagaagagatattgattcataaagagtattaggaggtatgtgcaagaggagtcatgttatcgaatcccaacaatgtatctcatataatttaaagacgcttttatttataaaaaaaaaaatcaggcaacaagtttttttttcctaattaacaacaatctttataaaattaaaatagaaagttcatggaaaaacaaaaggtttcacctctttagcaacaagtctatgggcagaagatattaacacagttcactaatcttagttagtttttcagttagcttagattagttaaatgtgttagttagttaatggttgttaattgtttctgttatgagctaattgctctgttttgtacttgtataaatacattcttttcagttgaatgaagtgagcttcttttgcattttctcagtctttcttttcttccctgctttctttctctacatggtattagaagtcttgactcaagactatgtcttcgtctacctccgatcctcaggcccctgccatgaatcctgcaacacaagctcctcaggcacctgcctcacaacccactgctactggatcttggaatccattttctaattctttgtcctcatccctaacaatcaaactcgatcgtgttaacttcctttctgggaagtctcaggtcattcccaccgtgattggacatgatctcgatgagatcttgttcacaggagtgccccctcccactacactactcaatggtaactcgaatcctgaatatctccaatggagacgaaaggatcaattactcttatcctggttacgctcatctatgtcagaagctattcttgcatctattgcaaactaggatacatcctattctgtttggcacgcacttcaacagaagtttgcttctcaaaccaaagccagacgacttcagctataggccaattctcacatgtgcataaaggaaatcttcccatctctgaattctttgacaaagtgcaatcgattgctgactctctggcgattgtaggatcctctattgatgatcaagatttaattcttcagatcctaaatggcctcagactagagtttgattcagtggtttcaggaatgacatcaagaaatgacaccttgtcaatcgaagaagttcaggcccttcttctatctcatgaaagcaggattgaacatcatctagctatgaatgatatcactgtcaaaatgcaggcaaacattgttgggttttatgccctnnnnaaaactctatttcaatgtaattcaatttattcaacatcaataaaga

SEQ ID NO: 124117 - DNA, 1229 bp, Cannabis sativa
gtacatgtcaaagttcgggaggggagggggaaggggggaaattgctaattacccttaaatcttttttcattttctactctattccttctttaaaatacattattaaaattttattttttttttctattttatattattgttttttaaaatatattaattaaaaattctatttttttttttcaaatttcaatatattttatttaatcgtccaaatatataatattcatatatactcatattcctataaaaaaataaaaattaaaacctaaactaattaatatattaagatatacttattaattagagcataaataataacatttaaagaagctttaaagtaaataaagagtttaaaacatgtgttttaatttggttctttaaatattttaaagaatttttaattataacatttaaaattttgtgagtagtactctaaagctaaatccatctttatatttagctaaaaactattttaaatttattttatcaattttttagtatatttatttttaataagagtgtaagttctacgagataagttgaggaatacttattttttgtatacattaattaaaaatacccttatattttatttcattacaatgtactcacttttatgagtggattgtctaatatatccttactctcaacttatgtgtagcatatttttttacattaatctaaaatgtataatagagacatcgatttatagaagtgggtatattataaaaaatataaaaatgaaagtaaaaattaaaaaaaaaagtgaatatacaatacaatttcctcaaatattttatattcatctcaaataaccattacaaagttatttcatcgcacatggaatctctctttctatacaaataatcccctctacatcttttctctttctttatctctctttgatcttattttaataatataaataattaatatctaaaaatatattatatatgatgtataaaaaaatatagaaaatttgatgtattatgtatagtgtaatgtaaatatatgatgaaataaaatacaaaaaaaacttttgatgatgtattttgaaaaataataaatgaataaattactgaaagtacggtcatatatatatacaactaggcagaaattacgtgtctagccacgtatagttagttttattttaggttttagttatagttatggttttttttcaaatgtcatacgtaattttaaaataaataatgctcaatatagaatga

SEQ ID NO: 124118 - DNA, 1470 bp, Cannabis sativa
cttgataattcccaaaactatttcatgagagttctcttagtgcttaaagatagggagaaataaacttttggacaaagatgtaatagattgttcaagtcatggtgattcctattaatcaacacttaaagttgtgagtgagtgtgcatatatatattcttcttcatcatattatattatatatgtattatattacatgtgttgtaattcatcctttattttttatatataatatatatagtctgtatatattgaatatatgcgttgtatcctttatgtaatcaatctcttattttagttattgtattatttttacaattaagttgtaatttatttaatttatttttcattaataaataaaatctctaacatattacaggatcatggtaatttatttattgctataactttgtttcgtgtatgtgaagaaaatattaaaatgcctacatcactcgacttagttattttgaaacctgagtgagtagtacaaatagaaattgtgatgtattgatataagttctttttatcatatggtcgataatatatcccaactaaatttaattttatttgttgtatttttagacagaaatatcatttttcatattgggcataacgctaaagaatagtaaaagaaaattattttttctttaatttttggaatttttaagaaattgttcattgaaatatttgtcaaataaatgaggtgatcttatatttaaactttgagttgtgtgctgatttatactaacaaattttcttgattgttacataaagttgaatataaagcttgtggctagatgaaaaagaataaagcaatttagatgatatcaagagttatgaatattagaattatgagtagttgaaccattcgtgattattttgtgaatcaaacctttaaaggttaggtttatatattttatgtgcatgtttttaggaaattttaaaggttaagcttttgtacattgaattgtcatatttttcatttttgctaacttggctatggccatattgtatatatattataatacatcttattacagtagaagctctatccgataatacatttgggaccaagcaaaatatattctaatttagagattataactaaatagaaacacacactaaaaaaacccaaaatatcaattgtaactacaataataataaataatccttaatatttattatttgaaaaatatttttctatagttgtttgataaattgatttgctctttatatttgttatcatgtctttgaacttgcaactatctaataattcactagtatgagcaccttcttattgaatccaaaacatttataacttttccagcatgttgaaagcttcttgacaagaaattttttctaattttgtgctatcatgcttcaagtcatcttctaattacaattcttgtttaattttagtagttattattgggttttatgccctaaataaaactcatttcgatataatcagat

SEQ ID NO: 124119 - DNA, 1072 bp, Cannabis sativa
tccgaaaacagagtggagccatttctgactcgaaagacaaagatttggagttataagatggaaggacggaccacagggcatatctgtccaaatacaaccatctaatgcaagtggaaagagttagtgatgatgtcaaatgcctttatttttcattgacgttaaccaagtccattgaggattggtggaagagatagtctcccaaatcgatttaggctggaaggagttacatctacctttcgaaaacaatttatcactactagggattacgacatggaggtcggttccccaaccaatctcaaataataaccagacaaaagcttgaagaacttcatccaacggatgatgaaagcagtggccaaaactaaagttagtgacgacatgaagctcgtggccctcaagtctggacaaatcacacacaaaagattatccaaagtgctagtcgacaatggcagcttcgtcaacattttgttcaagtttgctttctaagcgattggactaactgaagcagatctgtcaccttgtctgataactataaggatttaataaagattccctaataccgatggggaagatccagctcccaatcactttgaaaaggtgaacacaatgtcgctgccttcaaacactacatgtttgtagtagtggattgccccaccagttacaacgtaatactgggacatcctatcttagttgattttggggtagttacttccatcaggcacttatgcatgaaactttcatgtgataatggaagtgtgggagtagtctgaggtgatcaatgagtcatttgtctttaaatttgttggtgagagatttaacacctatttttgaaggatttttcagcaatgatgatggggaagatggagactgggtaatggtcatttataaaacaaatcaaagaagaaaaaaaggagaaataacgggggcagttgatggaggaaggaaattgaagacatgaataatatcaatttttttttttggatgaaaatgggtttttgatcgtgagaaatttttaaacaaaaaacgaaaatgaaaaatgaaaaagaaactgaaaataaaaataaaaataaaa

SEQ ID NO: 124120 - DNA, 884 bp, Cannabis sativa
tattagctaatttattagatttagccattttcttaatttttttaaaaaaaatgacatttactaacttagttactaaatttagggctattttacacctcaatccatttttttaactacggctcattgttacacaattatcactggactgggctatcttctttctccgaagttcgttacgggttgaagcccacaacaacttgaactccaatacatctttcttaattttttaaaacaatttaattttttagttttcatattaaaataaaaacagtttgttttctaccattttcgcttaaaatcaattaatttttaattttcttattaaaataaaaaacagttgattttataccatttttactttgaaactgtcaagttttttttcccatagaaaacagctgatattttaccaaataatagttgattttcctaagcaaaaataaaatttgaaaaaaaataaaaaaaataaattgatgtcgtatatatgatctttttcttccaaaaatagtagaaggggatggtttgatttgctttgttcacatacacataatagaaactttttttcattcatatatacaattatgtttattggattgcattcaatagttttaagttaattaaaattcaatctaattatatattgaattttagattttaatatttgatctgattcaattaattttaatcatctagtcgatctaatatctattattaaatatattggatttgatcatttcaattcattaaatatatttcatgtatacttattacattgattcaaatttatctaataagacttaatattttctagatcgaatttattaaattagatttgataaagaagaagtaaatttttaatcctaatcaatggcttgttgctcatagtt

SEQ ID NO: 124121 - DNA, 1783 bp, Cannabis sativa
tggtccacaggcaaatcaggggcaacagttattatattatttctttaatatttttttaaatatgaaaaacattaatatagagtttaatatttttgtgtctatttaagacttgtgaagtattttattgtgtattcattatgttttttttattcaattatttatgatcataagttatatttctcttacccactcgtgaataattattatatataataataataataataataaattttttgtggttgcaacggttaaaggaaatagtgaaaataattgatggttattagagttataaagttatacaacttttaaagttatcgaacttataaacctactacaaacactattacatttgataaaataagtcattgtatattttttctattgctactattttctataatttttatctattcatgcttatattgtttatttgtagtgaaactaaaatataaaatttgtaacatatcatttatttaaaattattttattctctaatcccactaatgtatcatttatttatgtatagttaaactttttttcttttataacaaattattaaagcaaattgtgtgacattgatgatataatattgaattataaatgttaccataccaagatttaacaactgtgattacttttactatcagagttctccattttaatatgattttataatcattgttaaaagtttttgcaagttctttatctagatttttaggagtatgtctaatatgtgttactcatagattaattgtacatgcttttcaaatagattaacaacttatttagttagatgactatctatattttgtgggatgtataaaattattttgagaaacatgatatgctcactagatatatagtatttatagctagtctgtatgacaatattatatttttaatgaatttattcattgctttgaaaagaaatataacaatgttgttttgctaattcaatttattatacttattatttttctaaaaaaatattcaaaaattccaattaacaaataatcatataaagttggtaaattctttgtgaaatgcatggcagttgtttaataagtaagaaaagaaaagtggtggttgaacttaggggcgacaacacgggtcagttatgataatacgactcgaaatttatatgagaattagtaggtttgggtttgctttaaatggattcggattgtgttcgggttgactagtctaactcgtttaataaacggttcaagtttgggttgataagattaacacgaaactagtttattaatgatttatttaatgttattttagtactttaacaggctataaatgagtcataaacgtgttatggttgacctgtttaaataaaatatgtttataaatgagttacacgtatcgtgttatgccaacccgcttataaacagattgtattcaggttttattttctgacacgattattaaacgtgttgtattcaagtcaaatatatacctactatatataggtcttaacacgatatgaatatgacccccgaatatgaatcgaaatccctaattgaactcaagtaaaatgagatactttttctttattgaagttaaaatatataagcttttttcaactgagtttataagaagtttcaggcatgtacttctaactaattatatgagaagtctcactcaaaagaagtaagaaaattcaaaaaatttacttgggttgaagttgtatttttttataatgcaatttaacaagggaaatttcactttttggccttaataatacaagtcatatcaaaatttataccct

SEQ ID NO: 124122 - DNA, 2094 bp, Cannabis sativa
acaattttaaaccacccaaataaaattaatactaattatataacaatacaacccagttacaaaatacatttatgaaaaaaaagttcttttgccattgaacatgaatagtcgatattgactaccagaccacaaaccaagaacggttgagattgaccagaagaccacaaacccagaacagtcaaaggcctacaacaacgacgagcttttctcgtccacctacacacatacacaaactgacaacatatttgagcttgacgaactcaaatataatgggtgtttttgtcgccaccaccgctcgaaggaggataactgggctctgacgagagaaagaaatggagaggcgagagacatgaccatcgacgaagagacctgtggttgtctctatccaggttcaagactgtggaggtagcccgtgcgtcgaaccgagaaaaaaggagagagagaccagcgagaaagagggtcggggtgttggggatttggggttctcggactggagagtaatggatctgtaatccgttaggggtgatggtcgccagagatggtggctctgacatgcgaaacaaagagcaaaagtgaagtctcttccctggcggctgagaaggtgctgagaagggattatgttagaagaagtttagggcttttattttaagtcagagaaatatagagggagagggaaaaaagggctggaattaaaaaatcaaacaaaaaataaaagttgtaattatggtggctcacgttcattattttttgttttattttttttattgaacttagcattttttgagataaccaaaccatttcattaattaacttacagtgacgcgcgaatagcgattgggtaaatatataccaacatattttgtgtgtcactatatctgaattttaattttaattattttaaataaatttagagttatgatatagtgacgcgccatgcatgtcgggacacgcttttccagtctctcacggcgtgactctatatatcaacatttttaattagaaaaaaaataaaaaaagtatgggtattattttttagtggctcttcatatttttagtaactcacattatgggaggctaacaccaaaaatttagagtctaattgtgtgtcactaaaaatcactccttactctttagtgacatgcacaaaaatgtgtgtcactaaatagtgtcactaaaataccaaattgtagtatgcttgttgcatgtgaaatttataacgagagtagaaagtttgcatgtaattgaaacttatatatctgagaagactagaaattaccttagtaaacttgctattgcatagaaattaataataaggagataatcatattaggccataatcaatagaacaattgaaatcaaaaccctaggttttattaacggtcaattttcttaattatttgcttcttactagttttcttattttaaaaattctttattaatttttatttaaccaaatagaagtagaagtttaattttaacgcacttaactacaatccctgtgggatcgacctgagtttactacttgtaacgatatgtacacttgcatgtccaaaatatcacaacaagtttttggcgccgttgccggggattgatagttaatataattaaaaattaaaatttgttctaatttggtttttcttttcaattatagtactaattttgtttgttttagaatcttatcttttgttttcaagtttgctagtttatgagaagtcaaggtccaactggcagattacctgttaatcctgaaatagaaaagacttgtagaaagaacagaagaatgaacaaattggaaagagctgcactaaagattgaacaagaaggagtcatggctgacaacgccaataatcgaaacaacggaggagatgtagaagactaggctaatggtcgtaacaacaatgaccatagcctgagggactatttgtttcctaacttggcaggggccagatcctgtataaggccacctactattgacgctaacaattttaaaatcaagccagccatactgcagatggtccaatcttcagtccagtttgggggactgccgtcagaagacccaaacatgcacctcgccaacttcgaagaactgtgcca

SEQ ID NO: 124123 - DNA, 762 bp, Cannabis sativa
gtatgttattcaagtttattgacaatttaatttgttttaataaaatgatttttttttggtaactcacatttaccaaaagtgtttcaataggttttgtatctgtttcgacatttataagagctttttagttctctttttttttttcttcataataatgtaaattataattatttagaattatcagtaaatttttataaagtcggaaataaggtttaaatattttattatacgtgcaactgtttttttcttatatacgtgctaagtagttgtttgaacttttttttttttttgaaagaaagtatgttattaatcaactcaaatcagctgttacaggagcactaataaatctaggacacgcatctgtccaagcatgaacccctatagaactagtatatatataaataattataatgatgttaccaccatataaaaaatttatagtatttttttgttatataatttattaaataatataatatataaaataaatatataatgtaacaaattgttttaagtataattgtcttgtaatatacaatttgtggagttacaagttactatttgtaatttcataaatatcaccaattaaatgtgtcaagggatattacttattctacgaaatttaagagatataatgaaaatatatggacttattactatcatctataagtagtataaattaggctaattagcaattttttccctcccaactttgacatataccaaatcatacccccttaatttttttggtcgttaaaaatt

SEQ ID NO: 124124 - DNA, 1149 bp, Cannabis sativa
gatttaatgattcctctaattagttgtgtttttggtcctatattttggttttttttttctaatcaaagatggtttggtttttattcaaagacaatcagtagtaacaatggtttaaagatcaaaaggagcatgaagctcactaaatgaggtcttctagcaatataatgagtgattttatttgtagatcctttaataaaagttaaagacatattatttaaaaaaaaaattaaaatgcgacaatctcgagctaattatttaaactggaaaggcataataatagagttttttataacttgaaccactaccaactcattagtctcaattatgacattagcctattgttttctctttatccaatttaaaatttccttgatcttaattatttctgcaacttcagacagccattagaatcatgagcaacatcccaaacccgaacttgtccaatattatgaaagcttctggatttcatacaaaaattgactctcccaactaaaaatctttttcctatattttagttttaactaaaagaacattgttatttattatgatggccaccgttattataaggcaatgccttatataaatggttacgataaagtaagaaagattcatattaaattatataaggcaccatgattatttctctaactgaaataattaatttcaacatagaatcaaaataatttaaaactatgtccaagtattaaacttttgttgattttatgccctcatgtcacttttatatgctattaaatatttctaaaactttcataatataagactggtcttaaattttaagccctgccatttttatgctgctaaactcttattagttttaatttagtttgtgtaataagactggtgcttgcacttgtaatttattttactactagttattgaccttttgttttttgttcaaccacacccaacaaagccattaaattaaggatctaaccgttaacaaacttcatgtgtttaagtctataatatgattatattactctaaaatttattctatgatttcttttcgatgaaacaattcccttcagaattttgtatcagtcaatcaaacattaatattcttaatatgtcaaaagggaaattttattttgttttttttaaaaaaatattctatatcaaaatttagac

SEQ ID NO: 124125 - DNA, 1569 bp, Cannabis sativa
atccacataattattaatatttataataattattttgttaatagaattaatacggtgctttagtggtatgcatgtcacacaatattaaaaaaaataaaatatatttttttgaaatctatatatatttttaaaagcttaaatatttaatattagtggtgtctaacacttctagacatattgtattgtgattgacggctaatactccttaaaaattaatacattaaattatatgagacacaatatttagttgaaccaatagtaatattcacacacaaaaaatactaaatatactttttaatatttctcatttttatattttttttaattatcgccaatttaaccataaatcactcaagaaattgtcaatatgtgaaataaataatacaaacatgtaagttcaataattaaattctaagtggtgttgctttactcatcgttctatgcgacttgcatgtcaaggtattattaccttttttttcaacggtattagattattattattattttaactgaaatctgggtttttgatatcagttattatgataatatgattatataaattcttattattaattttaagtttgttgtctaagattactttgattaccttattcaaatttaaaagttaaacttgcatacaaagggtcttccacactttctaattaaaacttgcacatgacatttaaattaatgagaaaattatgttgatggttagtagcttcacatgataatagaaaggaaaataacaaaattaaaatgaatttcttataacatattgctctttgactttggtatcacacatcataatgggtttatagacgataaaacaatgggccaaccaaatgggctcaaatgtgatgatttacttcattaaacaatagattagtccttttttattattattattatttcacaaatatacaaaaataattacaaaaatacggttatataaaattttaaatattttaacaatttttataattttatttatagaaaatatagtcttttagtgtattgttatcttgtgatcttgttcatgtattgttgattttttgttatttgtttgttgttattttaatgttgtttagaagttattttttttgttacttatatataattttattgtttttttacgtcgacagttttatattaagatacatatttcgagcaataatatttttatgaattgagtaatattgcgaacgtcttaaagagagtgacttacttcgtgactcaacctagattttcattaagtaactttattcctttctattttctagagcaatttttcttacaattttcagatgttacgtttctgccatgactaccgacggaagagagaggagtcacacaaagactcacttgaacatcacatgcgcctcgctgccatccaactgagccaagttggttggttagtaaaaactaaaataaaagcaattttatgtattcttttcccatagaaaaaaattataaacagttttatattatgatacgtatttcgagcaatgatatttttgaaaattgggtagtactgcaaacgtcttgtaacgtccccgcttcaagcctcca

SEQ ID NO: 124126 - DNA, 2057 bp, Cannabis sativa
ttattcttgaatagagtattcttgaaacattcatttctataaagtgtggcattattcattcaatttcgacaaagtgtttctgagtttgagttatataattttgtgttctgtgtttatgtccaaatattgtgggtgtctggctaatccgaagaagatttaagttttgattttccaaccaaataaccaaatagaataaatataagagtatatactttgtagtaggtcattattgtgtcatttttaagttaatgtgtcaaccagtcaattcaaaaatattttactaccttaattagtagagctatagaaaacaaactcagtaactttttgagtgttaaaaaattgtaaatggttataattaaattgagagtaagtaagctgtgtgtggtagttggttaaagaagccaaaattgagatttttatatatactgccaattactcaggttcacatttcgagttttgtaatctatactcttccctgtcctattaacaaaagtttaacgtacacataacagatgaatatgactttctgcctgaaaccaagagatgattagaaagtagaagcaccgctagaactttcctttgtttgaagtaatataatagctaatatctttattacatattaataattaattcaatagatgaactttccaaagtatttttgaaacatcatgggatatataaatgctattaatactttttgtagaaattttattccttctttgccctacacacagcaaagtgattaatcaaatccccaaggtcaaatctgaccatttacccagtcaaagaaagcttttgactttcggatattataacccaaaaatgacagctcccttcctatgagttataggtcgtttatatttgttgttcgaaaaccctaaaacacctttagacatatataagcttctttttcattcaaacacatccaaccacctaaaataaaccctggctggtcgtgagacctccttcttcgttcttctctgaagaacacgaagaacaccaaccccaatcgtacaccagatcacacccagaaaaaacattacacagcccagttcaaatcaacctcaaaccgagccttgcaaaaccaattatatacccagaaatcagacaataaaccccaagaaattaacccttatcagcccgatataataccccccaaaaaaataaacataaatcatataaaatacagaaaagaaaaatggagagaacacaccaaatttttatagaggtttctcaaaattgtgctgggtacatcctcttcgagctcgcctcgttccactatggatcttcaaagatcagagattacaatcaatgggtgggattccaaaacacacaggtattattttggtaatccctaatattttacagtgtttggtcctctcttttctctctatttctctcagatttttgtactgacagttgtgttcttcttctttgttgcatgaacactcctctggcatttggatatctgaaccacaaccttgggttccaaagcttactccattgtaagcctcctccaaaaaaactccccaaaatcaatctatttctcctctgtgaaaactgatatgattttgttgtataatgttctgcctctgaattttttcttgttgctgtagtactgatctctgttgtgttgttctgatatgagattgtatttatattagtgtatataaacagagaaagctaaaagttagttacaaagttttaacaaactttgtaatataactgacttgctgatgctgtctgcaacttgttagagaccaaaggccacttagtcctttatttactgccttgtaaaactctgtgtaatattctagtttttacagtgtacaggtaatatgggattttatttcaacacttttgtataatagcaagtagcatgttgtcttcattagcatttttcaaatttataaaattagaatctagcttgcttgattgcttaagtatgttaagtttgaggctatgcgcctatatttatgaagagtaaattgcgacataaatacttaatgtttcagattttatacacttaaatacttaatgtttatttttggaggcaa

SEQ ID NO: 124127 - DNA, 681 bp, Cannabis sativa
atataagtattatattgactaataaatcttgtatttaataattagacaaaagataaataagtgatcaaatgtaacaggccgtaactaagataaatactaataagataagggaattgtataacgtgtattattaatttatgattacaaaaatatatatatattacttttgtaaattggtcaaaaatagtgaggtgaacaattgaaccaaaactataagcgatcttagccatagcagactagcagtagttcccacctcatcaaaaactcatcccaataataagttaaatcaatgagaaagaatcataattcacatagaactacagcatctgatgtttgaccaagatgctaatcaaatatcatattacttcctttgaacatgttctttcacaatttcccaccaacaatcaacaatcaaaccattcacatcaactgatttaaggtgtgtttgattgaaggtagaaatgaaatagaaaaaaaaaattcattctatttctttatttggttgcatattaaattgttagaatattattctaatagaatggtctttccactattttggtggaatgacaataatattttgaaataaaaggaaataccatttcaatactgttgcccctgattttgcccaatatacgtggatcaaccggacagggacacgtggatcaaaacatcttaatactt

SEQ ID NO: 124128 - DNA, 644 bp, Cannabis sativa
aaacccaggacttggacccggactcaaacctagacccggacccaaattcgagcctagacttggacctgaacctgcaacccagactcgagacccacgacccagacctagacctgtacccaaacccgcaacccagacccgagacccacgacccgtgacccagacccggacccgaacccggactgagacccagacctagacttagacctagacttggacccggacccaaacccagacccaaacttagacccagatccggactcgtatttaggacccggacccagacttggacccagcacccggacccagacctgaacccgagactcgggactgggacccgaaccctaccattagttggtgttggggttgagtgtattaaaaatatattataactttacacagtctattaatacaagtcaataccaaacatagtaatgtattaaataatactaatacaatacaatacaatccaacagaatataatataataaggcgtaccaaacgagccgtaacatcactaaaatgagacattgttgcacttgttgattctaattttttagcaactagaaaataatctgcaatctatgcttcctgtgtatgagcagttatattttatttagtgataattaaataataaaattatatca

SEQ ID NO: 124129 - DNA, 874 bp, Cannabis sativa
agtcggcggaggaggacgacgccggaggaggacgacgctggaggaggaggaggacggaggaggttgggctgcctgctggtggtcttggacgcttgctgcagccacaatgggttgaagatggtggtgggttgtgtacctgcgagagagaaaaagagaagagggtatatgtgtgtgagaaaagacaaaaaaaaaaaaaagaaggaaaaaaaaaaagaaagaaaaaaaaagaaagaaagatatttttttatttataatttttttaaaattttaaattaattttattttatttttttatttttttttaataattttttacgtggaccaataaaattgtgccacgtgtttgttgtgttcacgtggacaatccaatctgacagttaactactaaatttgaatggaagtgttaaattgctaacagtttctagttttgggggtttacccagagaaatttgggttttgggggtttaatgaaaccaaaacgaaagtatagaaattttgctgccatttacatattttaaatacatatatggtggagtgttttattaccgctggctttggtgaacagtcatattttgtaggcttgtaaattgtaattaattttagtcattttgtttctaaaagtcggttgctttttctttaatttttttttactttaatttttattttgtaaagtaaactaataaatatttgtgatattctatttgacaatatcgttttttttattattatttattcgtgtgaagtgactaatatatatattatatgggtgattctacaagtactctcttaaaagagatgtactggtgcacccttaatttgtttcggcatccacaaaaattttttagtctaattttttttcatattcatgtaagtt

SEQ ID NO: 124130 - DNA, 647 bp, Cannabis sativa
atcatgttgttaactatttgtctgaatatgatactgcttaccatctaaactttcagttgcaatcacaagggaaagaaataagcgaacaggtacctcaatttgcttctggtcgttagtgagtcaatacagatgctgccattgatgttgtatcaaaaaagcacaattttggagttgtggccagggatgattatgataacataaaggttggattagttgttccagttgaaggagtggttcctcctgaagtggctgaagctaaagcaattcttgctgctatttcttggatccatgcagccaagctcccaatctctattcttgcttcagattgcaagagtgttgtggataaaattaataacttttattgcagtaattcagttcttagtgatattatcaattgtattaataattcattgtttagtccagacctgcttataatccatgttccgagagaaaataacaaattagcacatagtcatgctagagtaggtttaaagttaaatagtgggtgtgtttggaatggttctttaccttcaattttgacctgattactttgcatttgttttttcttaattaaattttcaagtttctcaaaaaaaagaaatccatataaattaaaaatatatatatggatgatttcttaatgggta

SEQ ID NO: 124131 - DNA, 1791 bp, Cannabis sativa
tctcgacgatttattttttttttttttttttttttctttcaggggcgactgccccccctcgctacaatgtgggtccgcctatgtgtaaaccccccaatatatttattgggccgtttggattttcattgtattatttcgggttgtattttttatcggtttattcggtttagttttggcggtttattccggttaggcggtttataaattttgttgaacacccctataagttagtcccttccttcacgtgacctctcttattcttacatacatctcttagtttgggccctattagtattagttcttcttcttcttcttctttcagcccacagtttcttaatcccttttcattattccaatccaaccttaccttgggataagttgaaaattatctttttttttatccgttaattaaaaattttcttatattatattttattaaaatatatcaattttttttgagtgaattgttcaatataccttcactttctatttaagtcttgcatataatttacattaattaacttaaggggtctaatgagaatatcatctataaaagtgagtatatattaaagaatatgaaaataaaagtaaaaatcaaaataaataaaataaagtggatatacaatgtaatttggttagttctttcttctctcttaaaataaataaaataaagtggatatacaatataaaattggagacctagaaacagaggagagaacttcaagagcggcttgtggcgattcaagtcaatttctccaaccaattctttcttctctcttaattttcaatgttattttctattttaattttgattatgaatttgattatggagattatgatctaaactcctatttggggagataatgaatgttgattaacattattccttaagttaatgataattgttatttctcccttcttgattgtgaatttatccacatttgtacttaattccatatttgagattgatcaccttaggcaagcttaatgatcccaattcaaaacctgaaaagtgagttttgagaatgctaaaattggataaactaggttttgatgttaaacgacagtatttgcatagccttagtgacatgagattactgtttaatgatgactagataacatgtgatttaaaacctaaaagatctgaaaagagttatgttaatttttataatcagtcattcactttaagaaagatgaataataattaacattagcaattgagtaattgaaacaacatgattcgttttctaatttcttttaattttattttattgtattccttatttttattgtcatcaaaattattatttaccaaatagaaatataagtctaatttagtagtattcagttcaattctatgtgagatcgacttcacatgtgtgagtactgtttgattacatacccttgcgtagttatttataattttcgtaacatttgcatttatgaatattatatacatttagatttatttaatttaacacgagtcttatctcaaatcatgtaacagtattaaattaattggtcggaagtattgcaaagctatcgagcaacagttttgcaacaatttgacatatctttttgcatttgttgatgttatttgattggattaagacttgcatagaatggttttactaattggtttaggaaaatttgaaaatttatgcatttattaaactaaaattggtccattaaaccaaaactattcaatatttgtacaataggttaatttactaaaatcccattttactcctctcattccaaaaaatggctctctctctctctttctctctc

SEQ ID NO: 124132 - DNA, 1221 bp, Cannabis sativa
ctctctctctctctctctttgtttggctcccacaaaacagaagaatctagccccaagctttaattttttttgaaatttcagcaaggttttaacatgtatcaagtggaggtaaatcctaggaacctttacccttgagttttcaagcttgttggttgagttttaatatgtaaattgtggaatttggtgttgctcaaattagcgttagtatttgttagtttcctgctggttattaaggttgttttaggtgtgaatcttatggttctgatgcttaattcttgtgttgagcaagtttgagttataagaactcaaacttgtctcattaatggtggatttggattctgtgtttgttagttgctgttagtacttgaattttgttgttggatataggtgatttggaaggtttcatgaagtttgggtacgaattgagcaagttttgtaatttttgggttttttttcgtattaactgaatcacaggcaagatcccagaaaaatttgttttgccaattcgtctcattttcaaagccttagtttctatgtttcctcgataattagggtattgtcatgttagttatcaataatgaaacttgtagttgtgagtttaggtccccagatcgggttttagggtgttatttatctttttacatgaatgtaacatagggcatccatccagcgtgtgattttctgtttaggtcagccagcacacttcaatttggaaatgaggtatgactagcataaagcgtatttatttatgaatatgtgtatgtgtgatatatgtatactatttatgattcatatgctactaacaatagtacggtagtggtattgagtgcattggtatagtgtatgatgttcaacaagtacaatacggtgttaccaatactaatgcggtcgagtatggagtgtaagtggtacaaaacttagtggtactcgacgtatggtgcaaaccctaccaacactcgtacagtagcagtacgtagtgcatgtggtacagtggtcgtaccttagtaaagaatgttcttacttgtctgataagccttgtggataggtgtatgggtgtctagatgcaagttgatattatattatatgttatatgcttttcttactaagtctattgactcacagaaattactttttgtgaaggtaaaagaaaggtgaaagctgaacaggagtgagttcctgttggaaattattttaccaggatcctagatctactcacaagta

SEQ ID NO: 124133 - DNA, 1030 bp, Cannabis sativa
caaaaaatccaagttcaactgaaccaatcatagacattagacaatattaatttagcagttcaccaaaaaaatatatattaattattgtagggttttaattaccaaaaatacctaaaccaacaattaataaattaatattaccaaattcaaaactgaccttatacttcttttgacttcctagagtcaaacaccccaaaacgattacgtttcaaagtttgaaactctagcagagaagaaactcaatctcaaacctagattaacacccagaagcacaatcaaacaatacattacaaatctagattgatctcaaactaagcacacacatacacaaataagtatagtaaagcaaagagtagaagacactaagattcttttccgaggttcacccaaaaaatctcaggctacgtccccgttgagctgttcctcagatggtagcttgattctctactataaatgtaatatctcaagaattcaattaagattaattaagaatatttttttttgaaatattgagtaatatgtgtattaaaagaataaatgagtagaattataattttactaaattaattatgtgagaagtaaagttattattagaaatgtgaaaaacaagtatagtttttacagagattttattagaatatatgctatttatgaaataaaatattttaaagttcggcaattgtagaaacctgattaattggctagaaatatcacggtggtattaatatgtgtgattgttatgcccaaaatttagttagttttagaattatgatcaggttattgcgggataattaattatgaccattttaaccatagatttggagatttcttaggaagcaagcaaggattttttagtcattgtggtatttaagtttatcgttagttttgtcctttgtgggttttctagagtgttagcttgagctgatcctattgctattaggattatgttaggatttgttttgaaaattactcttaatattttttttaattttttttttttacattatttatgttaatttaatacttattt

SEQ ID NO: 124134 - DNA, 1199 bp, Cannabis sativa
tgtatttcaaaattgtatatttttggacatagtgattcaaatcactcataaatttataatgcaaaaatttgcataaagcacagaattcttctcgaaccatgatagctcatcgtctaaatgaagaggatgttttgccaaactatggctgttgaaatcttattgctaaccacatgggacaaaagtgctcccaaaaatttaaaaataaaattataacattttcaaacagcttacacaactcattgactaccacttgaaacatcacaacacaaaactgagtattaaaattgtattaggacatatttggtacttcatattttaaattcttacatatccagtagtttgtattataaaaaggacatttttttattatgagtttagaaaataaaaattaattcaaagtatttaaaataatgagagtatttttttaggaaaataatgataatatttcgttttgtattaaaacatagatatctcttagattttaatatatttttaaatttaaataaataaaaaagttaaaataggactatttttattaataaatggtttattatctgatatttttacaaaatacaccgaaaatttgattttttttttttacaaaaatatattaacacgaataattttttatctatgatttgaacttttttatttataaaaaatacatttttttatttttttgattattttatagtttatttatagttgttgtgaggttcgatttctcgttgtttttgttattttatagtttattatagttgttgtgaggttggtttctcattgtcttttaatatttttcttatacttcttattttttttttctaagaaagttctttgaaactttaaatacatatttttgaaaaattaattttgtaatgtaaataaaaaatttaaatcataaaactgtaaataaaacataatatatatttataaaaaaaaaaatcccttattctattccagtctgataactaaataaaaaaaaaagtattacaaaataaaccaaatatcacaataatattctcatcactatttctattactatcattattaattattttattataatttatttattttaaatatattttattctttttttaaagcaatgaacaatttatttgtctttttatttttaatatataatatataataaataagtaaatatattttttaatataatttttagtacaaataaattt

SEQ ID NO: 124135 - DNA, 892 bp, Cannabis sativa
gacgccataggtggtgtcagaatcccttccaaaaaattccaaccctatgacgtcggttctttaatatttgctgaaaaaaagtgcctctaaaagcttggtttgtagtagtgtagtaaggagactttgtactagagctgttatgggctggagctgcattagcgttgaatagtccagtgtgaaaataataaatgaaaccctagaaagcatcattttcgtggtcaaaatatggtcttaaatataccaaacaagaggacaagaaggctgagggtagggttttgtttatgattcctttatgaggggccattggtcttatttattatgggccgcattgcccttgatcaaaactcccacttccaacaagtgaagcttgtgttcatgcaaaacctgtggggtttcatgtgctatgcacgtgaacaagtaccagatgtgatgttgaattcggacccatattataattgatagatgggattattaaccaactgagtttacattgcataattacaagcgatgacacatacatttaagaaagtacatgacgttaagacaattattacatataattgaaacaagcttttcagaataataatttcaagaaagtaccacatgacatgaaatctattatctatcatatattatctattacatatctatgttaacatttattaatcgaagatgagtatgtaattttggttcttctatttttatagattagtatgtatttattattttggtttttctattttgtcatttagtatggcttaattatttggtcatataatgtaatatgttataggctaattagtaattttttctttgaattttgacatgtactaaattgtgccccctaaacttttttggtcgttaaaaattcccctcgaactattgagattgt

SEQ ID NO: 124136 - DNA, 896 bp, Cannabis sativa
aaaccgtattttatgtaaataaaatctaaaaaaccgttaaaatattaaaaactccatacaaattgtatttttgtaattttttcattgtttttatattttttttaaaaattcctaaaaaatatttaaaatttaaaaaataattaaattacccgttatattttgttttttccttttcttgttctttctctctagaattattgagatgtcttcttcttcccctcccactctcacaattctcccaaaaccaaaaccatatgtcctcttgctaaaaaaagttttaaactttaccatttgattatacaataccaataaatatatatatatatatctaataattatgtatataagagtttcttctcaaatcccactttgagaattatatagacctcacatcctccatggttggatttccttatattatctcatttttcacactgtgacgtggcaatatgaactagtaacacgtatctgttattatttatgcttgacaggagaaatgctctgaacagacttcgagtaatatatctgcacgaacaaaatctacctgaccgagcagagcaaatgtagatgatctgaacaacaaatgaagtcattttttcgagttgtgcatcaagacttaagtactttagttttgatatcgtgaagctcaagtacaaaagcaatccctacaattatgggatcgtatcaaagggatatggcaagctgtctgaatccctcatttcatgtattttaaatatgtaatgtatgttcttaccaattatagatattgtaaacaaaagagaaacccttcctcatacatttagctctatatatagtgatctatcctcactgtaaaaagggtgaaaagaattgctttagagagatctaagagaaaatactcagagatttcattgtga

SEQ ID NO: 124137 - DNA, 1519 bp, Cannabis sativa
ttcttaatatctagttgatgcaaaagccaatcataagtagctgccgtcgaaataaataagcaaacagaggtcaattttgtaacaacaaaaaatgtattagtatagtccagtccattggtgtagcccttaacaacacgacaggattttagattgaccttaattggaaacacccatttgcttcgaattgctgagctgcagtcaagatgctcaaaggactgcaacattgttttggtggtgacatattctggtggacgaccttagagttgagatttgtaatagtagtttcattgattcagttctagcaaagccaactcaacagttcactttctaaccaaatccatttcttataaggattctgcttttagctttcttcatagactgataccatatctcaactttatctgatgatatgctcttatccttagtttgtaatatgaggatcaagaatttttattatgatagcataactagaggaattctcttgtccaaattgatctccaacatgtctactcccatcatatgtgggccacaataaatttcccagattacaatttgttttaccctgtaaccataacagttagtgttgaccccagattctaaaatcatgaaaatttagttcaatatatttcacttctaaaaggaaaaacatagtcatttctcatcataataatttacttcagctcctagtgaaggtagctaggacaattcttttgaaaccttagtactttctacaatcgaaacaattgttctatatgcaatcactctctccatgatttcagctttgtcttttttgcctttctcgtgccatggcaacctcttttcgttcgcttcttccacaagctgaagtcagtattttaatcaagtcaatcaacttcgagcgtagtagttaccatattgatcgaaccaagaacctagttttgataccagtttgttgcagcaacgaaatctaaaccagagaattaaataagaagacttaaacaacagaataattgcaatcaacagtaatatggttgagctgtgagcctacattcaagagagtgccaactcagcattgcacagccgtggcattcctcatacatgttcatatatttaacaaattgattcaacacagtgaaaaacaacacagctgaagttgtaccaaaaaagtgaggcagagcagaacatagagaaacaaagatattttttttagaaaaaccctgcagttcttattggggttgacatagattagagataaaaattttatcattattgttttagaaactttacatactagcaaacaggtatgttgaaattgatctacataagctaccataaagacagattaatacagttaactacctggaaaacttttcatgtcaaataatctttatatgtgttctgtaattatatgggatatttgtaaagtagtttttatgagtaaactaatctctataatttgaaaattaaactgaatgcatactcagattgaagttcagaataatgacactacctattgattacaaaaataaataattactat

SEQ ID NO: 124138 - DNA, 3233 bp, Cannabis sativa
  modified_base (42)..(48): a, c, t, g, unknown or other
tagttttagtcacaacaaatatattgtgactaaaaatacatnnnnnnncaacaaattgtaatttttatgactaatatttttatttacgaaccttttactcacaacacaatgatgataatttataattagcaacaatttttttttatctttaattacaaattttattgtgactaaaagtaaatttgtttgtagtgtggaaatattaacttaacacatttatttattaaaatataaaatattttacataaatatataaaattattattattatattattttacacgttttgaggtttatgaaatattattattattatataatttatgaaatattatttttgtcttaataaatattatgtatttatattaaaaaaaataaagaattaatcaatacttttaatatgttttactaatattttgtatttaattatatttcatcaaaaataatttaatttaattttcttttttaaattactatcatattttttatattttataaccctttatattaaatatttatctatttaattaaattatatataatattatttattgtaatatttgaaagataatatatataacttaatataaaactaaacattcacattttgtaataagaataaatatataacgtaatattaatttagtagatgaagaaatattgatatgtaaaggaagagaaaaaaaaaatatttatcaatcaagtttacttaatttggttaatcccaaaaactaattttatgacaactggtttgtttgtggaggcatattgattattgatctcaaattattgtttttgatttgttatttgggcaaaaatgtttttacttttcttacaatcaaagcttaaccactagtcactaattattgaacaactttttctttactttagttaggtacttgtgactactatctagagtctagctagactataagtaaaatatttaattatgatagaaaattgtaatattagtttcttcattcttgatcacgtcactaaagttattagaaattaataatgcaaaaaaggaaaagaaaaaattgtggcactaattaatcatgcaaattaatagtaatggagaattcttgaaatccaattggacatggtataaatcttattaagtggtcatcccattttgtagtaacaaagtgagatgggtaactctcaaatgtcatatcattctgctcagtcagattcaacttatttttaatgcatgtgttttgtaatttgtttaatttcaccacaaaattatatttttgcatgtattgtctagcataacatagcatgaacatcatgtttcttaaaaatatttagtaatatatttaatttttgataaaacaaattatttcaaaagatctaaatttcttaatcattaattatgcaagaagttgacagtaggataagatgagataaaattattgtctcaatttcttttaattaggattaagttatcctatagtaaatatgttaatattagataatagatataatttttttttgagaaaattaattagatatttttagattaggttagtatttgagataaggtgaatagggttccatctcatggctgatcaataataaatttaccattttctgtacagtagagcaccagtcagcccaagcacaacaagacagtataaataataatatgcataataattagaaatcacataattactgatgtcactgcacctatcgtctatttgacatagacctatgtgttaccttcacacgtctatttacaataaggccttagaatggtttatctcggttttaattattgagtctaacctaattatgtcttacgcgcataattctttatctcaacatatacagtataatattgcattcataatcacttaaatactagagtaataaccctagatcgcataattgcttaatttaggataataaccctaattttgatttctcacatatcatacacataataacatacatgggcgccacaacgctaatctctatgtgttagtttactgtcttacctgataatcctagtatgtggagattccaaatcctcaagtgttcctgagcaagcactgataatcctagtcacacgttcttaggatttcacaaatagagataatctcaaattcaatttcacatatacacataatttgaattccatttatagattaacatatagagcccaaaacaacctttctaacgatatcaaaaacatccaaaatggagtctcgagtcaaaagttatgacaaaaacgaaaaaaataaaaattcccaaaaaaaatagagcctcgctgtggctgccccaacctgctgggccacgccgcggcgagggggcctggaaccccaaaaattactaattttcatacttctgattttaccttaaattcatgccaaaacttatacaaaaccaaagcataatccaatattaaattaaaactgaaccaaatcaaactaaactttgtaatcaattgagcattacacaaagctcaatataaccaactcactaacacacaaaacatgctataaggaatttacattaaacaattcttcaaactttggtacctaattattcaaacacaaaccccaaaaattcaagtatgtttctagattttgaacaacaaaattccactccaaaacctcacaaaaccttcaagatgcattaagtataacactaaagcataaataaactaaaaacaccctttattcccttaattttcataaacatgcatccatacaacaagagcattcaaaaacacaactcaaagctttgaataccagaaattaaatcaagtgaaatggactaaagtaattacccaaagtccttaagctccaagcataagaatctccacacacctataccaaaatcaagccttttcttcaaaattggttgaaatcacgaatagagagggtgaaagagagagagagagagagagagaggggtcggctaagaggttcaaaacccagaaaaataaatgaaaaattaatttttttttgttgaaatagaattatgtggtcaaatgaccaaaatacccctaaggccatatattaccatacacatataaacaatggtaattttgtcattctgctcacacacacacatatcacaataatcatattttttcatttatcatataaataccataaataaattctgaaaatgtactttgggccctgaacccaattcagcccaaaatacccggttgtgactataccgcgccgacttgtcagaaaatacctacagataga

SEQ ID NO: 124139 - DNA, 791 bp, Cannabis sativa
gtatttttgtaattttttttccttttttgtatttttttgtttttttccttattttttttcgcaaatcaatattatatgttcctttttgttgttactacaaattttatcaagtaaaatgttacatgccaatatattaacagtttaatttatttttatttttaaaaaattattaaataattttaaaataaataacaagttcaaatatatagaaaaaaatagaaatgtttttttatttatttatttagtttttataattaaataattattatttatttttttcaattttaaaataatttaacaatttttttattgaaagtggacaattaattaattgataagtgttagtttagacaaatttaataaaatttaacaaaattaagattaaaagctgcaacaagaatgtaacataaacaaaaaaacatgtaatatataaatatatgaaattgaaaaaataagatatttatggtacaaatattcttgttggtttatttttagtttttaaaattaaacataaacaattagtaggatttcacatctgttattgtattcctgtattattgtatatcaggttgttaatttttattttcttttaaaagtaagttttttataaataacatataattataacttcatcgttattacataaaatgttattatatataattccctctcatcatatatgcatatatgatatatgatatgtatggaggaaattacactctataccctttttatattgtcatcttttatttttaccttcttttttaaaatctatcatttttacctctttt

SEQ ID NO: 124140 - DNA, 1367 bp, Cannabis sativa
aaaaattttaaatcgcttttttttgcggtgtggtgcggtgcgggcggtttgagcggttcgatgaacactcctagtggttgatgctctaagcaggaagggtttcgggaaggtaactagtatgattaagattttacctcagctagcagatgacacagtcaaatcaagtattgagtttgttgtaggcaaacttcataatttgatattagaatttgatctgttacacagaaattaaagccgctcagttaactggttcggaactggtgaagatccgagaagaggttttagctggtcaagctaaagattttgcagtttcagataataggatgctgttatacaagaccagagtttatgttccaggtagtatggaacttaggaatgagattttagaggaagctcataccactccatattcactgcatcctagcactaccaagatgtaccaagatctaagaccctactactggtggtgtggattgaagaaagatgttgtggaaattgtatctcggtgcttaatttgttagcagatcaaggcagaacatcagagactggtaggattattgcaggcactaacacttccctaatggaagtgggaggatgtctctatgaatttagaggttgggttacctagaaccacgagaatgtatgattctatttgggttgtggtagatcgatttacaaagtctacacattttttaccagtgaaaacaacctttacagcggaccagtatgcagagctttgtgtgaaagaaatagtaagattacatggaattccgaagtcaattatatttgatagagatccaaagtttacctcgaaattctagcaaagtcttcaaagagctaggggtaccaaactgaagtttagtacaatttaccatcgtcagactaatggacagtccgaacggacaattcaaatactagaagatatgctacgagcctttttgcatcttaaacactcaggataaggtcaccatttcttattttcatcttaacctcaatcctgaccaccctggaaccttatttatcctgtcccaatattggtggttcatttagtttttgcttcctgatctactagtaagttggcttcatatattccaccacatctagtggtacaacaagatgtgccggtaatacaagaacaaacacaaggtgagcctgttgtctttttagatctcagatctatttttccttgttgtctaatcatatcctgcatagcagaatttacatgttcccaattttatggcaataaagaattctcttccatactgtttgccccgagcccaaatagctcgctaatcagagtatttgatttcccttactgcattacttatcacacagttagtccacatcttctaaccatttagaactca

SEQ ID NO: 124141 - DNA, 882 bp, Cannabis sativa
  modified_base (647)..(647): a, c, t, g, unknown or other
  modified_base (829)..(840): a, c, t, g, unknown or other
aaaaaaaaaaaaaaacctctaacaaaataataaagaaaaaaaaataaaaaaattaattattttcttactgctaataaaacaatcctaatttttgaaaatcttcgaaaagatattattttttgaaaaaaaatataataatcaataaaaaatataataaaaaacgatcattaaaggaaaaaaaatgatcattcattttgttgtgatcaacattcacaactttaaaaggaaacaaagcttaaaagaatttttaatctttttattatgaatacaaacaagtagtcaataaattctaataagaacagaaaagctaaagaatactaaccttcaattgttttaacaaagcaatgactttattttttcttccttcaataaaaatagctactgtgattttttcttggctgaagactattaagtttttattatgagaagaatatgaaatgatttgccgtaatataacaattaagaatgtaatttaattattttcttttagaaaaaaagggtaaattaggtattataaaatattcattaaactaaaaaaaatagcttctcatgtttttttagaagtctttcctaaaaaagctggtgagtcattgcttttctaaaaagctcttctcatattttatccaaacatatctaaaagtagcttngagacttcaaaagctcttctaaagccatgcccaactaaatacattcaaacatataattatttaagcagaatgcacattatttttttttcattataatattctacatgttagttttttttaagaaataaaaattatatcctaaatattattgtttttttcttgggtaaatactattttggacnnnnnnnnnnnnaaaagttacagattggaccatgtgttttgttaaatgacaaaa

SEQ ID NO: 124142 - DNA, 865 bp, Cannabis sativa
agcaaagaactatccaatcaacccaagttttaataaaaccaataaaacttaatgtaagcccaaataaaaagtctaacatcacactccctctacattaattaattactacatgaaatgtaaaaatataataagcataatataagaaaattaaaaattaattccataaatatatttcttaacgaatctatatatttatatatctacataaagtaaaagtatgaggggtgacgtatcaagaattagttatagaatcagttagactctattgtcggttatgttagttagattgtgtcagtaatgttagttggttctattatctctctgtattcattttctgcctatataaggctctccattgtatttttccattcaacacagaataataaaaaatacttcttctccagtttctctgttctaatatggtatatcagaagaaattgcctaaatcttcaagctttttcacactttcatccatggtgaggacacgagcaactatctcggctacttccaccaatcccgtggtcgatgcccctgctccaatcgatccccaaccatctcagacttcagctgataacaacaacaatcgagctcagtcaccagctcctccacctgttcaacaaactcaacctgatcgtcctgcctacgaggacatctgaagtccctattatttgagtaatgcagaccatccggggctcgttcttgcttctccaattcttacagatcgaaactctcaaccatggcacagagacttcaagatctccattggagcccgcaataaaactccatttcttgaaggtacactccctcaaccccctcctaatgattctctctttggttcttggatccgatgtaaccaaatggttat

SEQ ID NO: 124143 - DNA, 4007 bp, Cannabis sativa
  modified_base (3929)..(3933): a, c, t, g, unknown or other
tcacacgcctatttatgtgtatgtggcatagacctacgtgttacgctcacacgtcaaaatacaataaggccttagaacggttcatctcggttctagtcactgagtccaagccgattatgccttgaacgcataaccctaaatctcaatatacacttatatataacatggcatagcacattcacattaataatcactagggtaataaccctagaccattaaacttgtcatgttagaatgataaccctaatctcagttcccaattacgcacatatatcattttcaatataagcgccaccatgcatactctacgtgctaactagtgtcttacatgatgtcctgcaaacgtggagattccaaatctccaaatgctcctgaccaagtgccggtaatcctagtcacaatttctgggattcacaagtatagcgttaatccctaaatccaatttcacataatataaaattggtattgaaaatatagataaacatatagagcttagaatgagctttccaacgatataaagaacgtctgaaatggagtcccgagtcaaaagttgaacaaaacaagttcaacatgcaatctgtccatgcaagcgggcggctgggttgaaaatctagaaaaatgcatcaaaactcacccaaactccccccaaacatgcatatatctcaaaatcatttcccacacaatataactaacataacagagaatacacacatttaaagctcaaaatcaaagctcacatgcataaaaattagatttaaacaatatacgatataggctccaaacttgagcaaaatatcaacaaattcaagctcaaagtgactacgagtcaggtcgaagcctcaagtccagattcagatctcggtcttggatcccggtgtagctctagtttgggccccggtcttgggctgagtcctaagtttgggtttgggtccgggttcgaggttgaaacctggtagtcacgtcctaggttctgggtccaaggttgggtcttgtgtctcgagtcttggggtcgagttattagtctaggtcccgattctagggtccagtttcgagtccaagtcccccatctaggtccagatccttagtccaagtcttggtctaggttcgggtttggggcctaggtcccccatctaggtcacagttcggttctcaagtcctatgtctgagtctcaagtcccgagtcccagtcctagtcttgggtcccaatcccaatctgggttctagtccaagtccaggttcagggctcagtcctagtctcggtcttggtccgagtctcaggtttgagtctgatttctggtacgagtccggctctaggtccgggtctgcgtctgggtcaaggtttgggtttcagtcaaggtctaggtctgggtctgggtctaagtctgggtctggattatggtacgggtcttggttctggtccaggtcccaggtcccgggtcttaggttcgaagttctgggtggcaggtcctgacacaagtctaggtccaagttcaggtctgctctgggtatgtatcccagtctttgtctaggtccatgttcgattcaacgtctagatccagttctaggtccaggtccaattcttgttctaagtcctgattctagttcttgtttcgatttcgggtcctgggcccgagtctgggtttgggtcctggtatggaaatggttctaggttcaggtcttggtacgattccaagatctagacaccgactatgggttgggttcaagcctcgggtcgtgggtcaagattcgaatcccaatcttgggtcccggtctcatttcgatttggatctttggtccaggtccgtgtctgtgttcttgtccgtgtcaaagtcttggatgagaccgaggtcgggtcttgggtctagtcccagtcttgggtcctaattaaggttctaattttgggattgggtccccaatctaggtgtgggacctagctcaaggtctgagtcttcaatctcggtccgggtcctacattcgggtctaggtccaagttcgtgtctgggtttgggttcgtgtcccgagtcccaatctgagttttgattcaagtctgcgtcccactctaggtctgggtctgggtcctagttagattccagttctgggatcgagaccgggtcctagtcccctggtcttgttctagggtcccagttcgcttctagtttcgcttccaatttcgggtcgcggggtacgggtccgggcctaggtctaggttttggtccgagtcctggtctgggtttgagtccgggtgtgggtcccagattcaaacatcgactatgggtcaggtctgaaccccaagtccagattaggatcgcggtctcgggtcccactctagctccacttcgggtcccaggttcttgtccgggtccttgtctagggtccgggctcgggtcacgtgctaggtttcgacaccagttcctaagccagggtcccaggtcccccatccaggtctgggtcctaggccccagtccgagtctaggacccagtcggggttcaagtccttgttcgagttcgggttcgggattcttattgctgttcgggtctagatctgggttcgagttgcgagttcgagtccaaatccaggtccaggtccgagactcaagttccgatccgtgtctgggttcggagacctgagtccacgtccccatctaggtccaggtcctaggtcccaattcatgtccatgtttgggttccagtcctagtcccagttccaatttcgattctgtgtccgtgttcgggttcaggtgtgggtttgggtcggggtgtgagtcctagtccgagtcaagggttgggtttgggtccaagtttagaaccagtctgggtctgagtttcagtccacgtccgactccaagtctttgttatgggtccaggtttgggtctgggtctcggtccggatccaagtcccaagtttcgatcctagtctgggtattggtctgagtatgggttcgagtccatgttcgttccaaatccatgtctagattagggacccaaactcaaaattaaaacctaaatcgagacccaagacttggactgggactcatgaccggaccccggtctcggtcccagacccgaactcggacacggacacgaaccgagacccaagatcagaatcagaatgagacggggaaccaagattgggattcggatcttgacccacgacccggggcttagacacaactcttagtcagtgtctagatcttggaattgtaccaggacctgaacctggaaccatttccagaccaggacccaaacctagactcgcacccgagacccaaaatcggaacaagaaccgggatcaggaccttggaacaagaattggacctggacccaaaaccggatctagacgcaaaactgaacacggacccagacccaaaccgagatcgatacccggatccagaccctaacttggacaaagacttgtgccaggacctgtgacgcagaacccggaacccaggacccgtgacccgagacctagaccagaaccaagacccgtaccaaaatccaaacccacacccaaaccaagacctagacacagacacgaactaaaacccagactaagacccaaaccctgacccagacctagacccagaaccggactcaaacttgagactcagactcggagcgagatcaagactggacctagacccaaactaggaccgagacctgaacttagactgggactagaacccaggctgggaccgtgaccggcacctgagactgggacctaggattgggaccgggacccgagacccgaactcggacttgggacctgagaactgaaccgtgaccatgacccatacgaagccaagacccgagacaaggaccagtactaaacacggacctggacctgcactcggaatgggaccctaacccagatcgggaccaaggacccttacctaaattggggacccggaccctgttgggttttatgcccnnnnnaaaactcatttcaatataattatatttacttattaatatagatcagaaatatcatttaatgttgcatggttcac

SEQ ID NO: 124144 - DNA, 2357 bp, Cannabis sativa
catcatgactgtgttcatctacttcttcttgccagagaccaaaaatctccccattgaagagatgaatcgagtttggaaagctcactggttttagggtaagtacatacctgatgaggcagtaataggaggccttactactaagtcaacaacaacagatcatagtgattaattataattcacataaactatgggcgatgatcatgaattgttaaaaaaaaaaattagaataacaggaatatcaaagagcaagttgaaattaaaattaggatataaattaataataaaaagaaaagggtaagaggcagaagtattcagtaaaaaagactaaaagaagagtatatatagtaagtaataagggtagcaataagatgtgttgtgtgtgaatgtggggaccatatatgacgaagctctttcaatttcagaagcattaattaataatgattcccttatgatgcaatcattacttgatgaggtcatatatatatatatatatatgtttaagacttgtacaatatatatattttaaacctaaaacatatatataaacaattaaattaaaccttctagctagttgtttcatgacaatttgagagagattatctatgtactcatattattaatcacgtttattctctgatcattattaatactaatggagcattgtaattatatgtattaattcgaattaatatacaataatccaaaaacactgtcatattagcttgtcacacatggatatatatatatatatatatagctagcctctcactgatcaacaaagaaaaataactctacatatataacaaggaaaaataatacttgttttggtgttgaaaatatatgtttttgtttgtcaaaatatataaatatataatggggttgttgttaattaggatctcactttcaaaaatcagattccatcaacaaatttcactttgagttagaccaacatttctcattaatttgctttaatttaaaaagaagaaaattaagaacaaatatcaatctctcttagattaattgtgacatcatctttatttttactattaatttcaagcgctaattagtaagatcttcaaactttgaactaagagcaaccaatagtaataattatttatacaatgattatctatttgtgccacttggccttgtacaacattaaggcttgtagttcaatcataatgagcctaaaaaaattgagaaaattacacccaatgtaaaatttataaaaatatgaaaaaaaaaaaaaataactcatatgggtatatttctagtatatggattttctaaaacgctttatagttgatctaatggctactaattcaggtctatactaagtattgtgaaggaaaatgcatgagattacaattgtttcgatggatactagatcaacgatctccatttatgattttcttgctctgttttttgtgttcactctcacttcgattcaaatgtgataaaaaatagtgtgtgtgtttttttaatcatttatgtatgtgtgtaatatcaattataaacaattaagaatacttattattacttgtctctactaaattttttttttaattataaacaattaataatacttattattcttttgcatggcctgctggcgcccatgtgtgcatagggtcgtggcctcgactgagtccataagcaacgaaaaattatggcttgcatggccacataggatttgtttagatgaaaccaaaagttaaactcaagaaaacaagatcaaaacaaaataaaaaaaaaataccaaacttggtcaaaaaaaatctttagcatggtctgtaggcgtccatgcgtgcgtatagggtcgtggcatcaatcgagtccacaagcaatggaaaattgtggcttgcatgaccacaaaggatttgtttggatgaaaaccaaaatgtaatgactgcatttttaatttgaattagtaaaggcaattagcactaattattggtaattttataattacttatgaatctaattatttgtgggtcccgtttttagaaatgggcattagagttataatttctcaattttggagattttattaaactctaggggtattatttgacatatatgtgaaatatgctactttttgtaatttttgctcggcgacaacggaaaaatgcgatggatgactagtttgatcacatgggtaagtttagaaccttatttctcagtgaaaaatatatttgagaaaataaaatatcggggttaagcggggttatggaatttgaccattttatccctagttttgaaaagaccctagttttaagttaaagggcattttagtaattaaccaaatgtgtgatttggtggctgcctaggttgatgacacctgccctttccttttt

SEQ ID NO: 124145 - DNA, 1163 bp, Cannabis sativa
taaatatatatatatatattactcatctagggatactgaattctttactgcttattaagtgtatctgaatgaactgaagacacatctttaattctatccaaaatgtaatagagataaaaacagttaagaaatttcttgtgcttttcaaaagcaactaagctatttaacttcactagtggaactaaattattatagatgggtttttacatccttttagaataattcatctaccctcagagtaaccaccatctctgatattaagttttgagttggtgtagatataagaattctaatatacacccctatcatctaacatataggtcacttttagagattttttcttgattatctaccaatgttccttgtttgattacatctttgatagctcccactcaacagtaggagtctagttaaattaatacacaagtgtgcatttaatctcttactattgatgcttagggacctcttattgtgacattttatcttagtcttgaaacattaagttccttctagactaagccatcaacataacattatagtattaacattaatgtaaaatatttgcttaagattacgtaatcattagagataccataaaacatttcataaggaccaagaattgtgcttaagtttttcgaatagacattgcaacaatttcttatcttattctcataattctgataagttatcactatccatatgaatggttagattaacttttcttagtttaattttaaagttcatatcttgaacataacatagtaagttaatcactggtgtcttccaaataataatgggttggaattttaaaatccttccactaacataaggtattgtgattctatgtccaaagacttcatttgtatcaattactgtagtaggaaatactggaacatgtacatgatcgagaataagttctactagtttgctagtttgtttattgtattatattcatgtctaatcaaaatatgtgtgtcattgagatattgtggtgttatgagtataatctagagttcaataaaaaaatatttgaagttcatatatcgataacttcttcaaccgctaagtgttatagagattctgtggagttttgaaatatagtttagagttcaaaagatataaaagatatttgaactacatattgttgggtttttgtgccctaa

SEQ ID NO: 124146 - DNA, 1155 bp, Cannabis sativa
  modified_base (964)..(964): a, c, t, g, unknown or other
ctctctctctctctctctcgataaactagcaaggagttgagttttccaactccatttttgggtgttctagcaagaccttagtgtgtctaagtcaaggtaaatcccttagctcttctctctttggtttcttaaagttcaagttaaggtttttggcatgattttgtgaattagggttctgtagtttttaaagttgtttgatttggtattttgaggttgattgagctgttctgggttattttgttggttgttgtggtgtgtgagcaaggttggagtttaaaagctcaaactttgctcttacatggcaattttttattctgagcatgttgagttattttgttgtataaaatatgtttattatggtattaatagcaggtctggatgttatggaaaagtttgggtttgatttgtggttatggggtgagtttatgtgtatcttgcactgaaccgaaattccggtttagggggacctgtaggaactggttgactggttggtccccagaaaatcccacaaaatgggaagatcagttggggcatttttaggaaccctaatttttcctatttttgcgatatttagagtattgccatgtttttcatcgatagagaaacttttagtttcaagtttaagtcctcgaaaagtgatttagcgtgtcatcacttaccagttttacaaattatgtgatttaggggcctgtaattcgtcgagcagctgttccacttaggttggccggcacaccttaatttatgtaacgaggtaagattagtataatgatatgcatatgtatttacatgtttagcgtgcatgttagtgaagcctgttagattacattataatagcgttatcagtatgtttagtattatactggatatcgataaatgtatgttggcttaagtgctattcgacaatatcacatcggtacgactagagtacgactaggataccgagtataagctgatattatagtcnatagtactgtactacttgatagtatcacatcggtacgactagagcgtaccgagtataggctgatattatggtcagtagtactgttgtatgattgttcttgactcagcaccgtgttggacacggggataggcttgtgattgggtgtatgggcgcctgattataatctaagttattgctatgttattatttat

SEQ ID NO: 124147 - DNA, 1530 bp, Cannabis sativa
ttttttaaggtaattcagaataaattcaagacctaagaaaaactttttgtagccttctcccatattagatcctaaggctcatccctcaataatagttccaacatacctttttcctagcataacattccttcaactttcttcctttctaaccttagcaaacacttcactaataggagacagcggtggtcgactaataattctccctttacctcatcaaactcaacactaaggtcagccaagaacttgaagatccgactattctcgacaactttcttatgatatcatccatcctcattagatttccattcataagtattaagaagatcaagattcttccatattcattttagagaattgaaatatttagtaacagtatcctcaccttgctttatgtcatcgagtttgagattcaactctgttagagagtcccacattgctaatgtgtgaaaagataatagaatatataaaaggaatgagctactcctcccattggcaattggttttgagatgaaacctcattcaccttattctaaaattctaacatggtatcagagcaaaacaaccaaaaataaatctcttccgtgtgatccggggatagtgggccaaaaaaaaaagagtcaccaaaaaatccaaaaagtagagcaaaagagccaaaattctaacaaactcaaaatttgagattgattctctaagcgagaatacagctgatttacattgttccggagttccttaacagttgggtaacacatatagttggagctgattgctcgataaattcagtacgcaagtatacacaatcgaatcaagtaatataataataaaatagaatatcgttcccacgaggattgattatcaattaccaatcaattaattctttagttccatttgattaataaaaattgttggagaaaaagtaaatgaatgaagacaatgatttaaatttaaagaaataacaataataaagatatagattcttatgatctccaactatcttttattttgcatccataataatcagagcatattcaaattttaccttttagaattttaattcaaattcatagataacaattatagatggtcagtaaataattgcaaaaattaaaacagattgtatggaattgaattaaaaagacgaagtagaaattaaataactacattagtccataaaataaattcaagtggttcacataacaatccttaataaaattagctactagaagtcattctaaaataatagaaattcaattaaaaacataaatgatagagatgaagagatagaacactgttaggagtcatccaatgctgccttcagctccttgccttctttatactaggggtgagcaacggtcggtttggtcgactttttacgcaaaaaaatccaaaatttaattttcaattttcatggttataatttaaaaaccgaccgaccattatataaatgtaaaaaaaaaaaaaaaccgaccattttaattcattgtttgatcagtttaaaccgaccaaactgaacttcatttttttttaaaaaaa

SEQ ID NO: 124148 - DNA, 1695 bp, Cannabis sativa
aaaaaaaaaattaaaattattatacatgccgcacgaagtgcggctttgttcactagttaactaataaaaaatagtaaaaatgacttctaattagaggtaattttatactaaatcgttgtttttcaataccattaaatgccaaatcagtgtgtcattcctaggttggttcaaggcatttaggttttttttttcaaaaaaaattaaaaattaaataagaaaataatttaaaaggtaataacaattataaaatttaagattagttaactttttagtgctcctcgttgaaatcatcttcatcaatctagagattgtaaaaagaaatcaccaaagtagattatcaattaactgagattgttgcttctttttcacaaataagcatatcactaggacaatagcaagcaaatcactaaaaatcaaagagaaatctaactgtagccggtggattggaggaatgagtttgtggcagagatgtagaagattacattgaagtgataaattctcatgatgttaggttgggacaaactgaaatctgaatttttgaaattaagaacttttttttataaaggaggaagatgggtcaagcggttgttgcaaaaaaaaaataattagatgtcatttttataaaataattaagtattcaaaaatttattttgaaatgggtggaagtctaaatgttgtaaaaaaatttattataaatattatagttaaatgatttaactgttaaaaaaattattataggaacttaaatataaaaataaaattatttataaatatgaattgctaaaaagggtcttatttgatatttaaattaaaaattaattattttaagccaatagttaattataattcatttaattttgaaaaaagaaatttttatctattaataacctactattgcaagtaaaaaagatataaccattatggttacaataaaaatataaccattgaatatatatggattacacattaatagttactaaaatttttactgtgaatattaattttaaaaatattaaaatattagattttgatccaattgcgaataataaaagagaaatttgaatttttatacttaattaaaataaatatataaaaaaatatcttatttacactatatcaatatatatatatatatatatatattcattcaaaaaaatatatatttgtatgaaaaatatttaagtcaaacttaattttttttttatttttttttttgttgaattttttttagctgatagtacagcctcaacccatataacgtaaaaataaaatattttcttaattagatagaaaacttaagcataaaaactgaaatttttctaatgatgtggcaattttttaattacttaatatagcaagttattaataagtaaatatccaatggttaatattataattataactaatatttctaaaattgttaaaaattattttatttaaaatttctttattattctcattttagtccttgattttttttttttaaaaagttaatgtttatgttaataaaataattttagttatctccaattagttacatggttttttaaggtctaaaaaagcaattatattactaaaatacagtggaccgaccctttatttggaatagtttaatatcaagaatacaagcaatgcacaagagtaaacgaatagattctaatcttgctacaggagcaaaagtttcatcaaaatcaa

SEQ ID NO: 124149 - DNA, 635 bp, Cannabis sativa
taaaaatcttaattagctttttaatgctttttgcagtagaaaatggaatgaaaagattggtacttacatttgatcctaagtatcccatcacaaaatcagcaactttataagaaaaatgagcctcgagagattgtttcttccgatctagcatcaccttggcccttctaacatatattaaaggatcagtaccagtagttttatggtacttgatgggtatcataaggaacccaaatttatttccccattgagactctgaatttttttccatcaattgtgagagctcctgatcccccaaacaaatgtattacaaataatttaagatagatatttcactatgaaaatagcaatatagtgagaaacatatagaaaattatttatactatatttattaacgtacctggggtccagactgttttctcaaatttaccatggctagacctgtaagttgaataccctcttgcacagctaagatgaaatgaaattacaaaataaaaaatcttaaaagttttggtacagaaaaattaaatagaattttagatataaattgataagtatcttttttttttttttttttttttcatgagttgtagactttgcacattttgtctccaccagtgaaaagcaaacatttttat

SEQ ID NO: 124150 - DNA, 970 bp, Cannabis sativa
ttctcattctttgcaatcaagagtttgttcttgacttttgcaactcagatcaataaaactaaaggggagtaggctattaccgacatccggggccgaacctcttttaattccggtatcttttatttacatttattgcgaattccggtgttattaattgtatttattattgtgattttggtttaaatctcatttattacgactccgcgtcggttggctaaaaatctagtcaacacaactccataaaaattttcaaaaaaaaaaaagtgtcaactcctataactactcttatttttaaaatattccacggcaataaatgctcattttattttatataatataaagtaaagtataaaaatgatgaagtgtggttctctaaaaatttattttacaatatttaatttttggttaatttattagttaattttttttaaaaaaaaaaaacatttataataataataataatatcactttttttaaatggataataatatcaattaatatgattatcttttttgtttataattcattaaaaggctttaggaaaaaacgttatgcttttttttttttatgaatatgaaaagatcattaacctatattaataaataaatatgtgtataattaattaataaatatatatttatcattaaatttcttaaaaattatttcttatataatatcacttaatgttttaattttcttttcatttaattctattaccaaaaaaaaatatttaacgtttttcactaaaaaaatatatggaatgatgatacgaatatgaacagattttattatacaacaataaattactaacaaaactagcatctctacaacttcatatagagaaaaactaataagtacacttatatagatatattgttataaaataatataaagtaaatgagaggaaagaagaagaagatgaagagagaaagagaaagtgaatgagaatttctgagttgtttattccaat

SEQ ID NO: 124151 - DNA, 821 bp, Cannabis sativa
  modified_base (792)..(795): a, c, t, g, unknown or other
tcctttgtccattggttagtcatggtcagttcatcactgaccgttattgttagtattagccatttacttgtaatgtccttgttctcgtactataaaataacttgtgacttagcaccttaggcatgactgtaattggccggacaccatttaatttgtataatcgaataacaaagcattgctcattctttctactgtgtgtgtgtgtataagtgttatggttgaagtgtaacatcttagattcattcattcttgggtgttttgatgatgctgaaccgattgtgaatttgtgcaacatttggaatcagagcttgggagttcgaagttcgatcttggattgatcatcaagaatttagtgaactggacgagaagaaatgggaagcacaaagttcgatcttgagaaatttacagggaagaatgattttggattacggcgtgttaagatgcgggcattgttggtacaacaagctaccgtttcaggagagaaagaactatctgcaagtttaattgagaaagaaaagtttgagatccttgaaaaggctcacagtgcattattattttttttattattattttaaaacttaatattcttaatatgagaaactaaatgctacttgtttaaaaaaatcaattgtcataacaattttcacatgatattgacaattctattcgataatcatgttctatatactgcactggttcactcaactatagtaatttggtattgcatatctctgattttttttaaaacaagtagcatttagtttttgatattaagaatattaaattttaaannnnaataaataaatgtaatgcatttggac

SEQ ID NO: 124152 - DNA, 4396 bp, Cannabis sativa
caacagtatctctgaatatgaattcttagataaaatctctcgaccctttgcctagtgaatatgcatcactatttatcgggctaaaagcttggagatgatgtattttccttctcgttacaattgatataagcagaaagattgcacagtaaatatagaacacactgatcgtgggatttggacagcttgccatatctatgtaatttgatccccgagttatagggatttccttgatgactcacgatgcgaaagctgaattcactaagtgttggcgttctgtgcggattgcccactgctcggtttaaagggcttcgtcgagcgaatgcatgaagtgtcctgttcggctcatgccttacgagcagatacttggagtcgattccacgtgtcactatcgagtgatgccacgtcaaagtgcagaaattgggataacattttcctctaagtctgtacggtactttcgaagttgcgtgtagactttattcgagctgtctttgtgtttggatgggtgacacgtgtcaggcgcgtctgttcacgacttgatgtgaggctgactggacgtcccttcgattttcggctaataaattctctgacgcaattaatgcttcgaaatttgattttctctcaccatgtttgacggttgcacttgattacttttgatttcccatattcgcttttgggggaactgaggcgtctgaggtttttcgaaatgattaccctttttcgttgtttgcctataaataccattgagcatttgttcacaaactcatttttaccaaccttctttgctaagtaagttcagagcgaaaagagaggtttttagcttcgagtttgctgttcacaagaactgctcgttcagctttgcgtaagttgaatccagacattcgatccttgagtaagtttccgatttcttttacgtttactttgcacatttaatttttgaatgcaactttaactttgttgtagatatgtaggaaaccctaagtttacaaactctgcaattttcctttgtgacaattcatgcgacttcatcgttcataatgcttgctttttgggatgcataatgcttgtctttcatctttcttattctaagcttcatgaaattttttgccctaactcacgaaattttgaacttctgagttttgactttttgtcgaatatttgtattctttaatctgttgagtactcctggtcggcatattttcctgtttaatgttcgatatcctgaccaaacactcatctcacatgttgtctgttgtagatgaacccaggtgagttttggggaagcgaacaccaaatcgaccaggacttgcttcaacttctacacgaggatcatcctcgtctttgctctagtccgccctcttcaagcgatggacattttgatttaactttcccatccagccaaagaatgatggctcgtattaaacaaacaatgcgtaaagccaacgcattcgatcctcacgtagcccagcatgccaccatgcccaacaccgaacaggatccacctgtgcaggaggagggggatcatgaaggggacgttgaggtccaggagatagaggagttaggcgatgtctgtcctggtagtccctccgaggaggaggaagaggaggatgttgcacccccaaactttgggggatacaatgaggctggggagccagttgatgctgatggcgacaacctggtagagggcgtggattacgccactgaggaacttaccgccgcagttccttagaggaggcagagtgcattgggcgctaggtgggtgagccctccgtccaaggtcactgaggcacgcttacgggatcttcatgagggcggctacttgggcgagttagactattacatccccgcctataataatcgagccacaaaacctgaaaggggaatgtgtgcttggtcgagtgctcatgccaagcaaggggcattgctgcctttgcacccatactttaggaaggtggcagacttctcccgcctctgtccgagccaattcactccgaagggcatcaagtatctgtctgccctgttcgttctctacgcctcccaaaagtgggatatgccctctccccatgagattagctggttttttgacttgaagtctacccccaagcaaggcaggtcagggtacttctacttctctcaacgagactacaagtggttgatgggcactagggataaggccgttaacaaaattgggcattttgttgacaattacttcatggtggatggcatgggcaccccacctacactcgattccagcatatccctgtatatcaccgcccacccttcactcttgctcttagggatagagctcaaaggcttactcagctatcgggtgctgcccgaaatatcacttttttgacctccgaggacaactttgtggagtacgggctctacccgaaggattttgttcctcagcgagtgaaggagaaaaagaggaaatccagtgctggccgggctgagggagctcgtcaagaggatgaactcattcaactcaagcgtgaggctaagttgaagggaggtgcaggggcaaaacagtatgctcatgagcctctgaatcctgaagatgaggttgaggaagagcaagtgactccgctcaaaaggaggaagaaacttcccgtcaagcacagccctgttgaacatgcaattcgaattaaggagcccagtctacctgctcggccatccattcctgtactaggaaaggggaaagtcgtcctggcggagataagagacttgtcaactgatgatgagccttcaagtctggctcgggcaaatgcttcgcgaaatactctgccttgtttttaaacttcttgattattatgatttcctacttttagtacttttctcttaaccatgttgcttttatctcgtgcagacatgtcccagaagatgctcgaagctctgaagaaaagagttgggggaagctcaagctcgtctcccccgaccaagaagtctagaggtggtgagttaacaccatccagagagaaggcactggtcgaagcagttatcgatatatccgaggagctaaccgtggtagatccttctgctccaaaaactgctaagtccaaggtctctcaaggaggaagctcggataggctcgagcagtcgaagggcagatctgagcagatacgggctctaccccacctccatcaccgcattcggagaccaaaagaggcaaggagatgctctcccactatatgaattggtcggcccctgaagtgaatgagcagctggccagagctgacaacgagccttctctagagttgttgatgggaggagtcctgaaggagtttacgagggtgagtctttcctaacagtttcctttaatccttctttacttggctcagattctaatgttttttgtctgtgtagactggtctgaggatggcttacacaactaagtttgctgcctccaagaatgctgccatgttcaacaccatgagggcgaaagtggatttggccaggaaggacgctgatgaagctagggttcaacttggagccgtctaaatggaactaggtgaagtcaacaaaaagcttcctacggccaagaagaaagtggccgagctgaccaaagatctagaggattctgatcaacttgaggctgccatgacttccaggaagagctattttctgcaggttggaagcaaagaagaagtccaaggaggatgagcttgaggtagagaggcttaaagggaaggtgaacgccttagagacagccggtcttgagattttttatgacttttggaaggctaaccctcaggtgaattttgattacctgggcgagaccaaagacatgtatctttagtactgtgcttcccaagtggcctatagagagttcaaggcaaccacttctacctccggcctgaacgttgacgtgccccctatccaaacaatagatcctccaactcctaccaacccagatgacccgtacaaggagccttggactccagccgtctgaacacttatctgtttatctttcttcttcttttttttatctgtctagccataaggccttttcttaagacatcgtgaccggccaagcagtctttaaaattggaattatttttcatttttcagacaacaggctgactgggatgcttttaatcttaggtttacgtgctttagttatctataatgaatttcattctctgtttataatcattgtacaattgtgtttgttttatctttaccaaatgctttgtacaggtatagttgccccccaagtgatcgagtagacttatgactcttggtcacttgttactttttgcaagtatgctttttttgtcagttcggggtttggggttggaccataccttttgtacgcattggatggtaaattaacaacatgctattaatttcgactcaatttgaattttgaaataaccatctttattcatttattgat

SEQ ID NO: 124153 - DNA, 674 bp, Cannabis sativa
  modified_base (641)..(641): a, c, t, g, unknown or other
gttttggttggttcctttaagttaagagcaacttcttcaagttcctcaatgggacccaagttagcccagtcatcgcccacacgaggatctatctcttcaacttcgtgaacttctcttgcttccatgtcttccactttattaactttgtttacaaccaacatctaggcccctggttggggtcgtcccctcatgctacatcgtaacactcacgtgcagctagtttatctcctttaactattctgttcccgatagtatttgggaattttaagaccagatgcttgatagatgtaactacctcggatgtgtacaatgacaatttcccaaaaatggcgtggtatgcagaaagtagatctaccaccataaatccagtcatttgggcgactatcgttggtgcttccctgagtgtcaatgggagagtgattcttccagtgctagctatgctatctccggtgaacccaaagaaatttgtggtgcatgattgttaatcttgtgcacttaacctcattttctccaaggtcatcttgtactataggtttacgctactaccattatcaaccatgattctcttgttggaatttgttttaccaggatcttagatctactcacaagtatgttgtttgacaccctaaatatgaactttntaaaacgataattaaacacataaagttaagaaa

SEQ ID NO: 124154 - DNA, 1362 bp, Cannabis sativa
  modified_base (1335)..(1336): a, c, t, g, unknown or other
attggtactacctatatcaacaaggtgcatcttgtttgtcggtagcccatcacgaaataactccatagtttagcgtgcttgacctagggtaatatttggatgggtaatttcctggaaagttttcttaagaagtgtgtgagtgaggataaagcacactaaagacactcgtgttggtttgtagggttagtcatcattccgtaaagtaaccaaagtgacgtactcatgtatatgagtcatcatttagtgggtgtaagggtccaatagaggcttgaagcgaggacattacaaaatggtattagtgccttgacctagccggaagtgaggtagataagaatgtcagacctcgtaagggggtgattatgacagtcagtagtcccgtgtgtgatgggctcaattgaggcttgatgcgggggaaattacaaagtaattgtgacagccagtagtcctgtgatccataatgggaaatatcgggtaagctgtgcactcccacaccgcctcgggaaggtcaagtggaacgattctgagagtgtgtaggtatgggactgcacagttgaagagggcttaaatggattgattggtactaccaatattaacaagttgcatcttatttttcggtagcccatcaagaaggaactccacgattaagcgtgcttgacatggggtaattttaggatgggtgacctcctgggaagttttcctaagacgtgaattcagactcgtggttctggaagaatgttgtgaagtctaaggaaattcttatgaaattaaaggagcttgtaaactgatatccgatgggaaggacacggacattttggatgaaccatgggtgatccatggccaggacttctatcctcaccctataaatgggcgtcccgcgaaataaaaaaaaagtagctgacttacttactaacaatggggatcgggatgttcccaaactaaactgcctgtttgacttggagactaccaataacatcatcaaagggggtaggcccgggggtgaagtctgtgacaaatggatatggactaaagagctaaatggtaaattctctactaaatctgcttatctggtccaggccttggcgtgcgctccttccaccaatgttgctcccgctctttggaataaacttttgagctctagaatcttggagcatcaaaaagtcctttggcggagtattctctcaaatgccctacctatcagagttgctcttgctaaaaggattcatattgatgacgtgtcttgccctatttgtggggagggtgaggaaacaatggaacatcttttcttctattgtaactttgcatttcacctctggaggtgttgggttttatgccctnnataaaactctttacaatctgattagt

SEQ ID NO: 124155 - DNA, 2412 bp, Cannabis sativa
  modified_base (29)..(47): a, c, t, g, unknown or other
aatgtaaaaaaaaaaaaaaacattctttnnnnnnnnnnnnnnnnnnnttttacaaaaaatggtgccttatataattattcctaattttaactttaaatgagtttttatttatcaaaataccacttaaacatctattcattttagcccaaatatcaattttttcttttttcctcttttttctttcatttttaatttttaaatttagcattcagtttctttttctttctctttctcagtttttcattttaaaaccatattccagtcactttcgaaacacacgttcaaaactcacgaaaattacatcccacccataactttcgccatcttcttcttccaagtgccttctttatcattttttatatttttgatttcatatatataatggctataatttgtggttctgcttctccatatccattgctaaaaaatcttcaaaaataggtcataaatcagttgctaacaaggctaaagggaaacatccagtcatcgacaatgatgactctaattttgctccccccctggctaaaggtggtcgtcgtccagtgaagaagaagtcgaaggtgtctttgcctgaaaaaattctaactccgacagccaaaatggaaagaagaagtcaacttcaagacaactgtgatgaaactgtaatgcaacaattatatatgttgcaatccaactaacataaaactacaaaataactaataatttcacatatttaatacaaataaatattacaacaatcgtgttttatctgtccaggtagggtatttgaccatcctgagccctatttttataatattatgatattgtagtagcaaaactattattcaaccaactttcaacttaattgcaactaaaaatattaaatgtgaatgtgtatctataagaaactatttgtcagtattttttttttgtcactgatcgataattaattgtactttaatagtaatatgtggagaaataactgttaaacatttgtaaactaactttatatcaactaatttattatattaataaaactaaatatattataaaggtttctttaaagaactttgtattgtattgaaaatatgaaacatttgtaaatatgataaaatttattgtattgttatcaatttataataattgatatgtcaagtttcaaagagtttacaaaatgtttatgcaactgttatgaaacattaaaaaccagaatagtattttcacgtacgtaactctatctacatgtctattcgtgatttaatatgaacaaattctctattaaaaatctgaaaaataacaaaaatgcaccggaataaacatttaactatagtattgatatatttttttatgcgaattaaactggattttctggttgaattttaattttgtagtagtttttttttctactttttccatgaatttgaaacaaaatctgttttaattgattccgatcatcttctcaagtaaagtcgccaaaattaatggtggttctccgcctagttttgtttcgattagtttgctgggttgatcgattgaagcttgcgtaagtgagtttttttgcttcgttccgtgcgactgaaaatttagaagaaaagatattattgtaatatttagtttgtgggctgtataaatatttaaagggttctttataaatgttttagtaatataattttttttttttttttttgtatatatttgaaaaaagtgatgttatatacattttctttacacaccacaaaaacatttaggtattttttcaataatagctaaatgtttttttttaaaaaaaaaaaaaaataccttttaaatgtacatttcagtacactcttaatctatttgggcatgatctagagagttttttaatttattttctttttctataattatatatacattgtaattaagatattaattatgaataatttaaaatattgaaaataaaggttaaatatttgtttttcttttccttattataattgagggaagaggtgagtgttcacacaacacgtgtgtcgaaatatttcttttctccatttatgttgtgagttgcatttattgtcgaatgaaactatttttaaagtaggtagttttgaaaatttgatgacttcacatgaccctaattataataatcgaatcctagctaggaaggtttatggtagcgttttgtagaaagatagacatataaaaaagttataaaacaataatgattggaatgaagagttcaaatggaaaaagaaaaatgcacacatttctctccttttctagttttgtaattgttagctttcctacatttttttatatttcttatcatttgccaaaactcaaaagtgtacacaccattaattgctttgcctcttctttattttttgtatcatcatcatcatatatatatatatgggtgactattcaatagttacatttttaatgtaacca

SEQ ID NO: 124156 - DNA, 1495 bp, Cannabis sativa
aggtactaatattatagttacaagcttaaattttgacacgacacgaaattaacacgagtgtacgagtagacatgaaaaaatattgacttgaatataaaaccacacaattatacagattagcatgaaatggcacgaagtacgaagcacgaaaaacacgatatttttagaaatttatataaataatatgaaacatatatggacaattatatgaaatgtggaataattcgaaataaactaaatgaaatagagacaagatttaacgaggttcatcactgtttttgtagtgactaatccctgggaggaattgctctttggcaaagctttattcgatcttcaacaatagaggaatatagaggagagtatagagtttaatctcatcgacaaaggtgtcttgcaccttacaaatcaactcacttgagagagatgtgatcaaacacacacactctttaacattctcactcattacaaacttaattgtcatctaaattcctctctagatcatcacctcaagaagtagaactcaaagccctatataggcaactcaataagaggggtatccaagttagaaaactggactagctaacttgggagcggacttgatagacctaccatatctagtaggtcaccagatgatactaataatagcagtatacaaagttactaaaatctttcacaaacccaccaatttagtcacttggtaaaagatatccttttattcccttaaagctttgaccgttccattttttaatgattatcatggtactaaatcaggtacgcatgcagcgaaagagtttcatatattatctgattattattgtactataatacaatagaactctagatgtgtgtacattaaatcaaaaacataacataacatgttaagactatatacgatatccttgaaacttcttgtatgttgtatcccttaatccagatggtgaagatgatgtaattgaacacacaccagtgtcttcaaaatcgatccaccacagacaaagaataatgtgggttattataaagtgtagaatgttgttcatgttgagttctcaacacttgagcaagaataattgagagagaaaattgaaaataatatgtcaaagtgtatctctgatttctaaaattagcttctatttatagtagttgaaaactattttaataaattatatatatttaattatttaaataaataaatgtctataactgaattcagttactcatatttatgagagaatctatcaactacttgagagaatattttaacaacaacaacttatcaaatctaaatattcatatgattgaattaattaattaaaaattccataaggcataggtgtctaccttgtcttgtttaggagaatgatggtgtcttttatcctgataacttttgtctcaacaaatattgtcttaacaatttttttcttaacaatatttatctctttcctatttaattaatttgaaaaaaataaataattattattttgccaattcaaaataa

SEQ ID NO: 124157 - DNA, 1749 bp, Cannabis sativa
  modified_base (992)..(993): a, c, t, g, unknown or other
  modified_base (1304)..(1316): a, c, t, g, unknown or other
agaccggacccaaacccaaaaacgtaatcaaacctcatcagaacccggatgcggacttcacacttggaaccccaatcggtaccgaaccacggaccaaggacttggactcgagacctagaacccggacccgagacccgactccgaccctaacccgaatttggacgactaccagatcctggacgtgggacccaagtcgaaccctagacacggacctagatcccaaaccgggaccgggaccccagaccggaccacgaacacgcactggacgccgaacgttggacacagacctagacttggacccgtgacccaaatccagacccgaaacccaacctgtagtctatgttggaacgagtttattgaaaatatattataactttacacaacttattaatacaagtcaataccaaacataatattgtattaaataatacaatacaatacaatccaacacaatacaacgtaccaaacaatagtaatttgcagcgtaaatacctaagtttaactcttggttgcatataaattcctaaattatatttttagaacttctgtaaatatctagcgttaagtgtcaagtcaatggccacatgatagtcattgattggttcaagtcattaaattttatttttatttaaaaattcatttaaatataccaataaaaaatgacacgtggatattgacttaggatttaatgttcatatacctattaaagttccatacatataacttaggtattattaccgtaaaaaattaaaggataaataccatttttgactatgtgttttgtaaaaattaccaattggaccatctgttttgttaaatgaaaaaatggatcttgtattttctaaaatgataaaaatagaactctgagcttaatttttgacaatttttttttaatataaccaacttgaaaacaattcctaacacgaacagatacagaaaatataaacagttttgtcataacactttcagatcgaattattattaaattttannttgacaaaaaatcagttcaggttcttatttgtaccattttagaaaatacatgatttattttatcatttgacaaaatagatagtctaactggtaacttttgcaaaacacaggctctaaaatagtatttatccaaaattaaacttaaatatttatctgcaattaagagttataaacttaagtatttataccgcaaattatttaatactgaaatttataaaataacctcacttcatttactttatacaattataatagtcgcacaatataaatttataatcattttgcaaccataaatgatcattgtaattatnnnnnnnnnnnnnaaaaaaaaaaaaactataaatttacattgtgtgacaaataaattaagtgagattattttataaattttatattttaaattattaatttaataaatttcaccttacaatatcattttgctaataaaaatatttaaaagtcattttactaaaaacaattgggaaatttgaatttccatacttacaataccctataattttttttctaaatgtatagttattaaaattggtcatatatgaccactttactaattttccaaaactactcctcacatttcaaatcctaatctcagcctctctcttcctctctctcaacccatactctcggttagcctcaacccacaaatacccgaagctgtgctcacggtgacggcgcacggcgcaggcgacttcgacccagcccatcgacgacgagcccacccacgccgaaccgaaa

SEQ ID NO: 124158 - DNA, 1400 bp, Cannabis sativa
aagcacgctggaaacactcgtgtgagccatgagtccgtgggtgtaagggcccaatagaggcttgaagtgaggatgttacagggtcgtaatttcggcggagctatagcccaaatcttggctctttggggctcttaaagccaaacaaaaccctcatctcaagggcacccagagaagacgaaagaccattcttttattgttatgttttttttattatgtatatatacagattttttgggtatataggtctagtatttttgtatttgtattatatattgctcttattgttcatattataaatatttaaagatttttatttttatgtaagaagtttgtaattttttttttggtgcagattatagattgtttatattgtacagatgtgaatatattatttatttagctaaaaaccataaaaaaaaaaaaatcaataatagtgttgttgatagtttttattgtcagaataaaaaaatttagacatttttgggctgacaactattttgtaacgatcgaatgttttaagttgtttgaaaatcacttttaagtagtggttttgtctctacactttacagttttatctactcttatattgactattccattttgcaaaggaagaaaagactattttagtgcaaatgaaataaagattaataattttttttatgtattttaaattttattccattacattcttatttttatttttattctcattcttattactacatttttttagtgtttggtttgaaagaataaaaatatgagaatataaatgaaattacaaataggagtggaataaaatataatttaaaatgtagaactttcatctatgttaaatttttttttttactaaaattaaataaaagttcttaaatctaataatctcaataattcaagaggcattttaaacaactttaaaattttaaagaacataatttggtacatgtaaaaatttaagggtaaaaattatttagaataatgtaaattatttagaacaagtggtgcccaaatattatttagaaaatgcaaattagtaaacgaacatctttaaaataatattaaatacacaaattgcttaattataatataacaatatctagaaacacattaattgcagactatatacagtatttagtataataaagtaattaaaattaagagcttaattatattaattcaagttgagcgtatttagagatcattttagtctttaattaatgaggaaaataatttgatgcaaagagaatttaattagtggaggtcacctcaagtgagctcggacaaatatgttaggctatttttagcctatgttttggatccaatttatgtgcatttttagctgtgttgggacggaattacgcttgttttctatgttttcaggttctttggagtaaaagaggtct

SEQ ID NO: 124159 - DNA, 1097 bp, Cannabis sativa
gacatcattactggatgggattgctaaccttcctttccttgagtccattgaagtatttcactgccccaattcgacatcactactggaaggggttgataaacttccttccctttggcatatcgatatagtgagtttgcccaacttgacatcactactgaaaggggttgaccttccttccattcggaatgtctgtatatatgattgtcccaatttgacatcaatttctgacaacttcagaaaattggagaacttttatattgagggttgtcctaagattggatatagacgctggaactgaagtttgtccattatacatgtgagtttatctctttttatctctctgttttcttaattagattcattggtagtgtagttttcataattggtaatatggcttttgatgactttgtacaaagagtagttattagaaaatacaagcaccttaattcttatctagacagatttgcaaagtagcatgtatttacagttatgttgttaattaatcattattttcactttgtgtattcagatgttatacatatgtgtatatgttggtgatgcatgcatggatggatattgttcctacagaatcaagtgaactatctttgttgttgttggggtggttcttcatcctctttcttgtaataaagacaagttatgattatgaagttgtaagggttatggtttgttttgattatgaagttttcttcttgttgtaagtgactgagccgatgactcctcatgggggccggattgagaagcttatgatggaggaatcatcaccttctgttggttatggtgattaggattaggaaatatactaatgtaatgataatccataatgatgagttgaattgattggaccaattagcaagacattaaactcaagtttgacttgaactttgttcaaaattctctgtttatagctgctacaaattatgattaatcaaggattaaaggataatctccaaaaacaattgaaaataatattaatatgtttaatcaattaattaataagattagagactattggacagcacaacacgtgaaaacgtaattactttattattgaaaaagtaattacaccaagacttgaa

SEQ ID NO: 124160 - DNA, 684 bp, Cannabis sativa
  modified_base (89)..(91): a, c, t, g, unknown or other
aattatactattttaattattattaaaataaaaaactaaaatattaaataaaactaacactacgtggcttggcacgtaacaatcacctnnnatatatatatatatatagagaagaaattgattagggtttgaggttggattttgcaagaagaagaagaaaaatgatcttttacatttatttaattattgttttattttttatatttttttataaaatttttaaaatatttaaataattaatatcacgtgaattactaaaaatatgtatacatagacaatttattttgaataaataaaaagacaagtaatgtctaacatcttttttgtgtcactattttattagtgtaatgtataagtttgtaaaaaactagacaaaaatagaatttatgtgatatcttttcaaggatagagtgctcttagttctaacatacatggtgaagaaatgatggcaagagagccaatctctttcactcactcatagcatatataaatatatttatttataaattctctatcgacatagctaaaacccaaaaacaagatccaccacttttttaaacttcagggacagttgaacgactctcactcattcgttcatttattatttctttaaggcttagttggacagacagaaaagaaagagaaaaaaaaaaaaaaagtgagaagaagaaaaatataaagcag

SEQ ID NO: 124161 - DNA, 947 bp, Cannabis sativa
ctatatggaagctggccatttttgtgatataagtttaataattagcttttcataagaattaattaagtccttaacctaacataagacaaaacaaaatattttagctctttctctctttctttcctacggttgaagcaaaactagcgggaataaaagattttggttcattcaatctcagttttttagcaagatttttaggggatttggcaactagaaaccagaggtaagctctttcactctctttgtttgagttttggaaggtttggttaggtttgatcttgcttatatggaatttaggatctgtttgatctatgccttgttctggttcgacttctgagttatattttagttgaatttagtttatttgggtgagttttgttggtttgtggagtggttgagcaagtttgagtttgaaaacacaaacttggctcaacaatggtgctttgagtttctatgaatagttgctactatttttgcttgaaatctgttctaggatgatattataggtgttctaaaaagtttggttgagtttgagaatgttttgaaagagatatgagggttttgtgcagggaaccggtcaaccgattctgctagttctgtagaacctgttaaccgtttctctaggaaggaccctaggaaccatttttttgtttggggaatccgatttaccaatttgggcaattttagagccttaatttgatgtttcctcgatatttaaggtatttccttgttatttatcaatatgaaaacttttagttttgtttgagtttaggtctctgactgaaaagaaaggattttagcaagttgtttacctgtttatgtgattgtgccataatgcctccattcaacacatgattttccattcatgtcgacctgcacacttgagtttggaaatgaggtaagactagcatagaatatatatatatatgtgtatgtgtgtaaattcc

SEQ ID NO: 124162 - DNA, 833 bp, Cannabis sativa
ccatccacaactgagcacaatcaagccgaatcacatcctgatgctacttccacccatattgtcaacaattctgttgctccacaacaagttccaacttcaagatcgcgttctcagaacgctgatgacattgtcgagccagttcaatcttcaccaaaccaacatgatgaagctcatcccatcacctaaaaaattggtcaacatatcaacaaacctttccacttaaaagactgtctgtcatgctgcctcaacaacgcatccaattgaagaatttatttcctatgctaaactcagtccccacttcaggctgctgttcttgcagcatattcccaacttgaaccacagtcatattgaaaagcttcttaatttaagtattggctaattgccatggacaatgaaaccgaagctcttgagaaaaaacttggacagttaccaaattaccttctggccacaaacccattggatataaatgggtgtataaagtcaaatacaaccaacaaggagaagtagaaaggttcaaagctcgtcttatatctaagggattcaaccaaaaacaaggcatagactatgtacaaacttatgtccctatagctaagtttaacacattaaaaaattttcttgcactagttgcaatgtacaattagaatattcaccaacttgatatcaacaatgcattccttcatggtgatctccatcaagaagtatacatgaaaatcccccccaagatacaaagctccacccaactctgtttgcaaattaaataaaagcatctatggccttaaacaagcctctagacaatggtatgaaaaactcaatactgttgggttttgtgccct

SEQ ID NO: 124163 - DNA, 531 bp, Cannabis sativa
attataggttagtaacttcaatcctcctcatcaccaaatattatatagctttgatgagttgaaggattaactatgatgaaaggaaaagaagaagaaagaaagtttactatcacagctcatcacagtccactcaagtaactaaattaataaagaaataaaagaaagatttgaagcaccatagcatagcatagcataacatgcatctacaaaaacattattagtgttgtcattaagcattattttcaaaaatattaggataactaaacacgtgtccctaatgacgtttcaaaaccatgaatatttatctatattttaattcccccaatgccaaaaatggcatccaacaaatcatattttactaagattttaacaggactatatctacatgtgtcaaattcaacacctgttgagaaattattggtactcttgtaattttcaccacccactaattatattattttatgcttattttcttaggttatgctatagaggctaattaattaacaaaaacccaaaaaataaaattaaaaa

SEQ ID NO: 124164 - DNA, 1332 bp, Cannabis sativa
aaaaaaaaaaataatttttataaaatatatataacttattaatccaaatattaggttgagtaatgacagttgaccatagatagaaaataattaatacgatgaattagtttgatatgtgtactatcgtttaataataataattaatttggtgattgttttagttttattactggtcctacttatatatatatattaaatattgattttactttttcctaagcaaactattcttttttatttttatttttattttaattttaagtatggaaaaattaggggtgttcatcaaatcgcttacattgtgcaaatcgtttacaccgtactacactgcataaagattgtggtttgaaatattctttgtgacacggttgtagtttgcatttttccaaactgtgtggttggtttacaattttaaatttaataattacggttcaaaacacaccgtactatatattataaagttaccaatttttataatatgatttctattttttttcataagaataaatatatgtaatatattattcactatatacattattttttagagacaatttcatataatgacttgatcattaatatacgatgtttaaactttaataatattttttttttgtaatgttcgataatgatgtagtataaactattcaaaccgcaccgcactatattgtatttttatggtgtagtttttacgattttaagatctcgcgatgcagttgggattcaagattaaaaaaatcgctcgagtttgatttgaaaaaaaaaattacaaatacccgcaccataccccgctaagtataatccaaaaaaacgtatataaatatattgaatgcaatattgttactagattctgctgcgatgagatatatacatagtattgatgctttattatttaatattaaattaaacaaatagaatatggcaaaagaaaaattaatattgtgttatgataataagtaaaacaagagtaattaatagagctttaattattattaggtattttaaagtgttatacacacgttgtgcctatatgtactggttaatagttaatttaggaattattaggatatatattcttaagagtttatttattacgtttgtaatattatatataaatatattaattaattaacgtatataattatgttcttgttccaaaagacccgtatattatggtctttcatcaattaacgggtctttctagaatttaggagattttttaatggaaaatacccttaaatctaggggtgttcattgaatcacatctaatattttgaggcctatccagatccgatccaatcatatattggatgttagattttatcatccgat

SEQ ID NO: 124165 - DNA, 1838 bp, Cannabis sativa
tttttttagaaaaaaaaaaattaacaaaattgggcccttttcttgcgtgggcctgtgcagtaggtctgcctgcacaccattagagccgggcctgctaggacatatacgattatgacaaaaaaaaaattagactaaaaagctctcgtaaatgttgaaacagacaagtggagtaccaaaatattcttttcggagagtgcactatagaatttcctacaaaatataaaaaatttatggtgcacccctcataaataggtgtatcttttaatattttttattttaattaagataattttaatcttattttttatatgacattatacattataattatttaaagcatcttgtaaattttttaaaaaacataatattgaacttgtcaaaataaagttcaaatagtatgttgtacatgtgtttcttttattttatatgtatgtgaaaaaaaattatttaaaccctacaatctgtattgcaaactatttcaaattttttaaaattttacaagatattttaaataactacatcatataatatatatataagattataactatttaaatatcgaacacattaaagaagtacataagtacatttatctatgatcaatatatatatattttttattttttttagaaataaattgaaatttcattttttataattaccaagtgaaattatcgaacaatttaaataacacggaactgtaataaaattgtttgaacagaatttatctatgttcaatcaaacacaaaatctgacagaacagaaatatactgtagaacgtaaaaatgcaggaaaattaaaatgacacacgacattttatgcgtggtatcagcaactctttcaagttgctcctaatccacggggccacgccaaaagaatgaaatttattaaatgaatcttaagtgtttacaaaaccaaattgacttacacaaataaagactccttctttgaatttaccgcaactattgtactctattcttctaatcaaatttctgaagtgtcgagaccttgaactctcttcaattcgtagcacttgcacacttcatcccgaagagtgtctcacatgcaatctttctcccgaagaatgtcaaactggcaatcttcctcccgaatagtgactcacatgcacttttcctcctgaaaagtgactcacgaacaagacttctcccaatgcttgattaacaatatccaaagtgttcaatctgcacaattttaacaagaaacaatacaaaataacacaataataataaaatactaagaacttgttggactcaagttcttcacacaataaagaatatactttctaactttaaaaagtaatttagaattgatacaccaagagatctaaccaaaaccagggacctaaggatgaatttatacactttagaatctctttaggctgtggtcaaacaactaagaaacgatcaggtcaataaatgaaaatcttcccaaaaaggaaagtcaaaatctgttcaaacagacagtcagtccgttcaaacaggtacagtgaacctggacagttttttaataaagtttccataaacaaataaggaaactttgactacattaatacctataattgtgcacggtttcttggtcaagaaattagatcaaaaggaataaaatataattaagaatttccttaaaaagaaacaaaagataaaatcaaatattctataaaaagaaaactcatatttatttcgtaataaatcaaaaagtataaaatttgtttttgaaagggttgagatgcaaaatgaccctaaatttggtaactaagttagtaaatgtccattttttaaaaaaattaagaaaatgaccaaatctaataaattagctaa

SEQ ID NO: 124166 - DNA, 2668 bp, Cannabis sativa
tattttcaaaatcatgcatggtctaataatatgtttttctatttatatctctgcatatcatgcattaaatgctatgctaaaatgctaataagtttgcagctaagagtagaataaataacatataataaattttcatataatataattcttgtgttgtaattaaatactttacttacctcatctcccaaactctctaagtcttttgtttgtgaaatactcaattgcttcgggtacaagaattatgccccaaatattttacataagtaatttaattaactatcaatgaagaataatacaaaatttatatccagtacacacataattatatatatatatatttcattgtggcatttcctcatacgggtagcattcagggagtttttatatataactaatatgttgtatccatgagaagaaactgaaagcacactaagcatattgacacatataatgctccaaagaattatatgtatatatcttctcttatgtttccatctttcggttccaactactattctaaaaccatacacacatataatatataacatcatgactaaaaaaaacatttagacaccatgatggctcaattccctcattattgaagcaccacataaaaaagaaacatatcacctatacgtattgttcaacatcaatccaaattaaagaaccaaaagtcatatagcctttattcaatagattattatatcataaaggctaactaaaatgacttccctgtacaaaataaattagtcaaatcaatatatatacatgtaaagagaaagcacaagactagtacctacataaacactcatataagaaacataaatatagcatataattaaagctatatgtacatatatgtttcaccatgtatgtaaaatttgaatgtttaaattagggaagcttcaagttaaagaaagaaagattagataatcaaattgatacatacctcaacaaagaagggtaattacactgtaagtggcacactatctttcttctaatggaagaaacgagggccaaaacctaaactacagcagaggaaagatattagggttgtaaatggttctagttaatagataaaagggaaaaagggaattattaccgacttagaaaaaggtttttctcaattaattaattaaatcttataacaacaaaaattcacataataataatactatattctcaacctaataaaattttaattaaacaaataatatatactttatatatcacacaaattcatgataaagtttaatactatctaatttttgtactaaggaacaacttttgagcatttcactgcaaaacaaacacttgtgtaaagattaatcataataacatatataattataaaatatatccaactacaattaagaaattaatgcacacttcgcataatatgaaatgtcatgcattcatgtaatcattggctttaggctatttgagaaaaattgggatctcacatctagggtgagggataaaacctttcctgtgtgctatccacggatcgtcccatatattggtgtcctggccattcaccaccagtttgcatgcacccttacgaatgatgacttttgatttgactacattcttccaaaatcacgagtcagagtctttggcattacaatcaagaaatgactttcctttaagatatttggcttccagaattcgacagcataaggattggttgcccgtaagaaggttccactcccatttagccaggaaggcctaatgcatctctctagtctttcggaagcccagactccctaaggacttggggaggcaaagtttgtctcaggattttaggtatagcccatgattgcccttctccaaccccactagaagtcgcacaccaaaccatcaatcttagtagccaggcaactagagagcttagttgtttgcatatcatacataggtaaagctaaacccaccgacttgatgagagtagcacgacccgctttagagagagtcttagctttccacccttgtaacttagatgttaggttatccaaaataaaattaaagtgtgcatctttttgtctagatctgaataaaggaaaccctaaatatttgaccttaccttccggcgatcctatacctaagttccttgattcgttgtttcatgctattgggagtgtttttgctaaagaaaatcttcgttttaagtttattgactttctggcccgactaagtacagaatctttcaagacaatcccagtatcctttgacttcttccaaattaacctttccaatcaaaataagatcgtccgcaaagaaaatttgtgagataataggaccacccctactgagcttaatacccttgataatgctcttatgttaggcatcctccaaaagccttgacaaaatttttgcggcccaaataaagagatagggagacagagggtcgccttgttaaaggccacaagaaggaatgatcttgccaaaaggtccaccattgaggtaaatattgagggcagtggtagtgatacactaggagatccaattctgaaactcttgaggcacccgaaaacaagaaagcacatgatcaatgaaattccaactcaggttatcatatgctttcataaggtcaatttttattgcaaataaaccttctctgccttttttcttattaaatgagtggataatttcctgggcgatcacattatta

SEQ ID NO: 124167 - DNA, 1781 bp, Cannabis sativa
  modified_base (306)..(310): a, c, t, g, unknown or other
  modified_base (1733)..(1736): a, c, t, g, unknown or other
tgcttttcttactgagtctgtcgactcacagatattgtttgcatctgtatgtaagggcaaggcaaaggttgagtagtcgtgagagcgaacagatgaagattgtacatgccgggacgattaggcctggagcgtatggtttttgggacaactcggtgtattttgtctagtcgctaggcgacaatttttgtactatgcactatgaaacttttgtaaatattttgtaaaacgggatcccactttaatatatgtaggttattttgataattaaataaagtttttaaatattcacgattttcaataaactcnnnnnttagcaacgagctgcacaattaagttaaaaatcacgttaacacgcctaaactaatagggtgttacaacgatagtgagttaggataaaacgattattaaatataaataatagaaagaaaaaataataagtaaagagaagactaaaatttgaagaggttcggccctgtgagaatggtaatagcctactctgctttttgttgtattgacttgagagaaaaagaatgaagtattctctctctaaagctcttacaatggaactctgagtaactctctcttagatcgctctttcttcttataagtgttccttctaaatcaaattttgcctccttaatagtgagattgaaccactatttataggagtttattacatgaagaatagtttcccttaatctataataaataaaataagaaactaagttaattccataattacaatgcaaagaatgggaaactgaggctcattgcctttattctatgatttaatccaatgaatgtagggattatcttcgtgtcgtaaaagcaacaatgcctatctctgaaatttcaaactcgcacatcctgtctggtatatgcgagttgatcacacgattgagctttggtcggatgtcccttggtgactctgtttggacatcctactatgcacattcaacatggacctttctatcaatctttgggggctgttaggagtataaccttccgcccaggtatgaaactataagatacatgtcatccagctcactaccacgtcatagtgcatataggataacaataattgtgtttgtgttacactaatagtttttttttacaaatttattatttttctttaatattaatatattaaatattgcgagttaaagatgaaaagagagatcgagaatgagataatgcctaaactattaaggtgttacaacgacagtgagtcatgataaaacgattatataatataaataatagaaagcaaaaacaataagtaaacagaacactgaaatttgtagaggttcgaccccgtgagaatggtaatagcctactcctctttttgttgtattgacttgagagacaaagaatgaaagtattctctctctctctctatagctcttacaatggaaatctgagtaactctctcttaggtcgctcttttttctttttagtgttctttctgaatcaaattttcccctcctgaatagtgagattcaactactatatataggagtttattacaggaagaatagtttcccttaatctataataagtaaaataagaaactaagttaattccataattacaatgcaaagaatgggaaactgaggctcattgcctttattctctaatttaatccgatgaatgtagggattatcttcgtgtcggaaaagcaacgatgcctatctctgaaatttccaactcgcatgtaacaccctaactagcannnncgtattacgtgattttcaaacgtactgtacagctcgttgctaatc

SEQ ID NO: 124168 - DNA, 2872 bp, Cannabis sativa
  modified_base (1439)..(1443): a, c, t, g, unknown or other
tagttttggttaggattgtggtttttttttttttaattttgtgtttatcaataagatattaacatattatctattatttattaatgatctctgttggtgttctattttttctttagtatgtatttatcaatagaatattaccaccctatctatactttattgatggttcatgcatgctttttggtttgcatttattttttatttatcgatagaatattgttatgttattaatagtttatcgataatttccctttttacttaatttttgtccatttagcgtatcaatggttcacgatatgttgtcaattatttttcgttggtgtgctgactgtggtctttttataattttttcagatggctccacagcttttagttcatcaaaccattttataggtcgtgtaactcataaaggcagtggtgtatttaccaagatcaagtcacggtttggcacatacgtcttgacttactgggcaaaggcaagccttttcggtcagttttggaatgtcagacctctttcattttcctctgtgtcattcaccaattgatgttgcataaaatgaaggttgatgttgagaagacagaagatatacagttttacattggctaaaatgaggccaaatttgtttgcactgattacaggcctaaagttcacatcggggccaacagaagaaaagaagggttcttacttagggtcaaagcagttgatcaactgcttttacaaccaatttgataatgtgaagacgaaagtacttcatgttatgtttttacgttgtgatacttcagaagacgtgtaaaagttaggcttgtacttgtttgtggaggtattattactatgtcgtgaaggtaacacttacattacatctgacatacttagatatgttgaagatttcaacttcttttttcggattcctcagggcaagtactcattttccaaacttgtgtccacccttcaaaaagatatgttaaaacaaaaggcgaactatgaaaagaagttgagtttggatgttcagcataagtgcaagtatacagtctatggctttgcacctgcagtataatgtaagttaatttacaaatattttaattattcatgttttcaataaactctttgattatcaagggagtgaacagtaattagaaaacatggtaagatgcctgatctagtagggcattaaaatttagtatcagagctgtcaggttatcttttaaagattatcatgatatatacaatcattatcatagataagctcgactcacagttcagtaagccttatatgcttagtagtttgatttattagtatgtgacaagaaaagctggataagaaatttaatagtagcctgatagctaaataaacgcatattttattttcccaagtatacggtaattagattttaatcttaaatcgcaatctgaccaagctaatgttggaatttattttacnnnnntctagatttactaacatgtatggttgattatattctataatctaacatcttaaacatgaattgcttaaaataatgaaataaacgcatataaagttctacaaaaccttatattggtggcaacagaatattatggctctttccattcagatctctaactcttgttcctttctatcatagagtattgccaagatctgaacttggatctcctttaatgatggaattttttacaatcttctacactatgtgaatattaacttgatatgagtgggcatgtactctttcactataggtcacgatttcaagtgggaaagagaagaagaattcaaaattctagagaggctctttatttctcatttatctgataaaatagtctgatgtaggttatgataatgagagtcatcttattctttatataggatttcatctagggttaggatggaattaaaaaagataatataatagcttaagatatccttaagtggtagaccatgtatgtggaccccactagtttcaattttgtcattttatttaacaactcattttttctttcataaatgccatattttaattttaatcctataaatgtcaaatctatttagattataattataattaattatcaaataaaatttttatttaacttatttattaattttagaccttacaaaatctcttaattaataaataacctataaatcctattttcttctcaattaagtccttgcttagtaaatattcataaataagacagtctaatacagaattctatttgattaattaaaaccaattatctaaatctacaagctaatattatctcaactatgagtctatatattcaagcatccaataagtagttttaaaatttaccaaataaattttctatcttattaatttctcctgacttcactataaatttagaattacactcttgattatataaaaagctctatatgttccaaatatagatatgttattaattatccattattttaatctaaataatcaatgatcctctatagatgatctacatagattaggaaacacggataacattattaattaaaattatcatttagaccaataactttgacatgtagtaattttgaataagttaacgaacaagttaaaataaggactgacgaacttataagaaaagtgagcttatggactattgcagctatttttagaggttagagactaatctacatcaaagtgaattttttagagatttttgccgtaaatttcttttttttttttaataatattttacatgtaattttagaaagaaaaaaaattggggaacatggcacccttcgggctctgtttccgtcattgtgttatattagctagatttaataataataataataagggtaaataccattttagaccctctgttttataaaagttaccaattggaccctgtgtt

SEQ ID NO: 124169 - DNA, 3506 bp, Cannabis sativa
aaaaaaaattaaaaaaaaaacctaaaaaaaaaaaaaaaaaaaaaaaaaaaaagtatttttaccacaaaatcttagtttttcaatagaaaaaattgaattaaaaaagtgaaaatgactatactgattaacttttgaagaggttaagaatttaattaaaaagaaaaagggaaaaaagtgagggattggggactaagtgcaaaacatgagtttgagttggagatttttgctctagataagttatagaataaatacgaagaataaattcactcattcaaattaaaaatcacaaagtttttcttcacggtgctctccatcgtcaataagtgtttgattttttttttttttcaaaaaatgaaaaaattctttatatagccagtaagagaagaggttacgaattttccaaataagggaagaaaaaaaatgtcttctgccttgtatttccaatagatatatatttgctatcacataaaagagtttacgtctcatcatgcaactaattgtggtgagcacccataaaagtataaaatataacctacaattccatatttaggaaaagggcatagctagttctacccccaaaatatttatacatagatgtatctcaaacaggtttctttctcatttggttttccttagatttgattgatttggctacgtttgcttacattatataatgacttttagggttgtaaattcttttcccttgttttctagttttttttacctctccttcatttactctccatgcatgtacaaaaaatatagtatcttccactttgatatgtagctctttatccttgcaaaatcatctccctttttcatacaagtatttatgagagagagagagagagagagatattttatttatttatttatttattttaagagtttgctatagtttcttgttcgtacaaaaatgtgtatgatgttatggtgtaacctcagtttcattaggtggcggctcaaaatgctagggagcttgctcgaggttgaggagtagtctagtgtagtctagtctagtctagcataggaaaggatggtcaaagagggcaggtctagtgactagtttttgtctctcttttcacttgctcatttaaggtcatacctaaacctctcctctactactaactctatgtaataattaataataataactattgaaggaggagagccagtgaggggtaggggcctagcctaggagataggcctctggtcctataagtaaaaacaaagtaaacattatcatgtttctagaaagaaactaaatgttaaactaaactattttatatatataatgatgatattgctgctattataccaatatacctacctaaataatcctcttaaagattcatactcatgtttggtgataaaatttaataattctcttaaattgatgttattataccaatatacctacctaaactatttttgagtctcactgtctgagtttattgagaaaatttaataattatattttgttgaagtgttatttagaagtagtgttgaatgattttagtttgtctttttgttgttttaataaggtgagttttgtgtattgtcctagaactaggcagaggcacatagatctcaagagtgtaggggtggtaattcgtgtttacaggtcgtattcgtatcgtatcgagactcatgtatagtaagtatatgcttgatccgaatatgaccctgtttaataatcgtatcaaaaaattaaagccaaacacgacttctttataaacgggttgatatggcacaacccgtgtaacccgtttataagcatatggtccatttatgataggttaaagtactaaaataactttaaatatgtcattaatgggtcagttttgtgttagtcgtgtcaacctgaacatgatccgtttattaattaaacaggttagacgagtcaacctaaatacgatccgaactcatttaaggcaaactcaaattcgttaactctcatacgagtttcgagtcatattatcgtgtctgacccattttaccgaccctacaagagtggtcatgaccctccaccacaaaatatatatggtgcttatataaatattatttacatatatattttgtcctttttttgtcccgttattgtactttcacggattgtattccgtgatgtacgacatccgtcagatgagggagttatttgatctgacggttgagattgatgtaggggtaattagggttaaaaagtagaaacgtaccttgacactcatttaatgtaccttgagacccatctaatgtaccgcggaatacattctgtgaaagtacatcacgggacaaaattatatccctatatatgtcattgtattttatattttttttttgtagttacccattttggcccaatcggccaataattaagtccaatatcactattactattttataataggttttgggaaaaaaaaaaattagacatttgattataggggctttttcatttttatatttcaattttttttttttttgtatttttacgtaattttatattgaaactcttatagtaattaatgaaacaacctaaatcgatcgcaatcaaaattcacatagcaactcacatagaaatcattggagaaactaccagagcaacccaaatcgtaaattttttttaaaaaaataaagaatagtatataggataatttttcttatttattattaataactaattattagatattaagaaaagatgcaaagtataggattagtaattttaattttaagaagttgaaagatgaggagaggttattattgttaaaaatgacctatttgtaggtgtaggcttgtgttgtgttgaggttgtaagttggctactttgcttgttgattaataaagatcttatcttgataaaaaaaaaaaaaaattgatagatagtttaaaaaaaagataatatttattaaatcactaaaattcttatcatagcattaaaatttagcaatttaaaccaagctacacctgacatacactacctagcaaatgaagtaattagattgagctttatttaaataatagatacatttgaattaatattaagatagtaatagtatatataattaattaataatagttttccgtaataaattgaagagcaatctataacaaaacaaagaatagtgaataaatataaaaaatcttgatattaaatatttattattagaaatatctatagtacaccatcttaaaaggttgtttcgatagaatctccaatttgtttcaaaaaatatctatagaatcatctataacttttaaaagaaatttgaatagtttaccgtgctgaaaaataaagtttgaacagtatgtatgcaacaaaataaggaaaccttattttcgatattgtaaattattttaaattttttaaaaattcacaggcaatcctatatagctgcaacgtaagcaaccatatataaaaaaggctaatgagtcatttttccccctaaactttgacatgtagtaaatcatgccctctgaacttttttcggccgttaaaaattccc

SEQ ID NO: 124170 - DNA, 1648 bp, Cannabis sativa
  modified_base (1520)..(1520): a, c, t, g, unknown or other
agatctcttaacccacaaacaacagcagcctaggccagtcagaagccacttgtgcgggttcatactcactgagtcaactcgctcgatcccattgaaaaagtgtcgaaactccggacaaatgcacgcgcttccggcataggctgcatccacgtggaaccacatcccatactctgtcgccacgtcagcaagttgctcaagtggatcgacagcggtggttgatgtggtccccacacttccacacaaataaagtgggaccaatccttttgccacgtcattctctatttcttttcttaacttgataggacacatggagaaaggttgacctttcttcatgactgtgggaattaatctgatattattcggatttattcccacagccttggaaactttttcaaatgtcgaatgggtctggtcagacccatagacaacgagtttcatcatattctccgtcccaattttcttaatcactctatcacgtgcagcatttagggtcatgatgattgcatcgctagtcgtattctgaatgattccgccaccagtaccgctaccacccgagaaaagaaaagatttgggaagattgatcatgttcgctagccaatccatgacgaccatctcgagctcagctatggccggagatacctgccagctaaacccgggacaattgaaaccggcacatagcatttccccgaggaaggcagcagtgctgacgttaatcggaaaaaatgcaaaaaagttgggactctgccaatgtgtcatgcctgggattatgacattggttatgtctttcaaaatagattggagaggctctgattgagatggagctgtattaggtaagtggtttctgatatcacctggtttgacttggctaagaactgggtaagactcaatttgagtatagtagttggctatgaaatccactacttggtgagcttgtttacgaaattcttcagggttgaaaagattgtcatttgagttgacaaagtcaaggctacccatttcaatattttttagagagaaagagagagaaagttaataggaaattattgctttgtaatgaaagtatggagtggagaggattttataggacgcggcgcttggtctatttttatatataatattaacacgtgactaaattggtctatttttgtttttttaactaaattggtctattaattattaaataagcaccacaaaaatttatataaatagctttaaaacaacaacagctcacaccccacaatattaagttttatcatagtcaccgacaaaattgttttagtgatatcaattttcttaatttcatctttcattaatttactcaaatttgaagaagtataatattattattacaatttttttaatataatattttatttatttattataataaaaattataaaaacactacaaaattttttacttttagtcacattaaaatttgttaataaaattaaaaagattgtaactaattataaatcatactaaaatgtccgtagctaaaaatattagtcacaaaaatnacaatttgttgtgattaaatgtatttttagttaatattcttaggaaaatttacaaaaatactgtaatttgggttaacttttacaaaaatattgtcacacagaaattttttcaaaaatattgtgttttt

SEQ ID NO: 124171 - DNA, 1130 bp, Cannabis sativa
ggtgtaagaggtgggtcaatcattgatttctaaatgcaaaaaggccttttttccaagtcagatccttagcaactacatgtgcaagcgtagagatgctgcgtctttcttggagatgtcgggctcaacttatttctaaacccacataacattaaatgtatacatattcatggaacttttcttaataccaattattgattttatagtactaaatcgggtacacaacgaaagagttttatattatctaattatcattgtaccatagctcttaggatctccaaatgtgtgtacattaaatcaaaacaataaaataataaatttagagtatacctcttgaagcctataagggtatccttaaaacttctcgtatgttgtatctcataatccgattgatgaggcatatgcaatttgaactcataccaatgtcttccaaatcgatccaccacacacaaggaatagtgaaggctattagaataaagtgtacaaccttgttcttgttgacttctcaacatgtgagcaagaacaactgagagaaaaaccaatttccttttctctctgtgtattttgaaattgtattgtgaaaagaagacctttgacttctcaaatcaaacttttatttagagtagttaaattcctttaattaaacattatttaactatttaaataaataaatatctataaccgaatttggctgctgatatttatgagaaaatctctcaactacttgagagaatatctcaacaactttgaaatatctataactacttttcaaattagatatttacctaattaaattgtttaaataattaattaacccaaaaagataaatgccacagtgataagactaatgctatgcacctaccttgtttatttaggacaaggttggtgtcttttgttctaacaacttttgtcctgacaaatcttatcccaacaaattttgtcttaataatttttgttttttccctatttaattaattttaaaaattatttatttattaaaaaaaaggaaatttgcggtaaaagtccccaaaaagttcagtttgatacagataagtccccaacctccaaaaatagaaacaatagtcctcaaggtcatttttttatttgtacgttggtctccaagttaacagatc

SEQ ID NO: 124172 - DNA, 1378 bp, Cannabis sativa
tggctctagctgatataccatattgaagagctcttcataagctttaaaacggtatatagaacgtctaaaatggacaaccgagtgaaaagttatggcaaaaatacgaaaaatccgccttcttcgatacagtccaaccagaattccagttggaacagccttgaaccaactaaaattccaattgtctaggtagattaaacacgaaaattctcaaactttaatcccccgaaacctattcaaatcttccccaatcaccaccatttccaacataacatataacatattaaacatataacacaactcaaacaccacaacaaaaaccacataaaacaatatccacaatttgagagcaaaccttgagttcataaactcaaactttctctagacatgcttcagctgcaaaagaatcccaaaaccaactactacaataaaaattcaaccgatagaacaacttctaactaaaacaaaaatatagagaacctaaatatctattttcatgcttaaaccaaactaaaaccataaaatcaaagggagaaagaaaattaggtttacctccacttgaaaacacctcaatcctttattgagactcaaaaaattgagaggaaaggagctgattcgctctagttaaagctagggttgaaaagggagaggaagaacatggagtcttgtagctatattttgtatttttgcttaatggattagatctaataatcaacaaaacataagctgaaaaaaaaaatgaagattaatggccagctttcaagttcacaagtagccacttaaacaaataaatcaatttctcaaaaatgcccctttgacctcttaagttaagcaattgtaaacctaggggtaaaatggtcaatagccataaccctatttaaacccgatactcacaatatctcaaatgttttttcgctaagaaatatgttctaaacttacccatgtgactataacggccatccatcgcattttccattgtcaccaagcaaaaatcataaaatttgcataattcgtatttagtataaataatactcttagaatttaataaaatttctgaaattgaaaaattataactctaatgcttatttctaaaagtgggacccagaataatataaaatcataaataattataaaaatatcaataattaatgctaattacctttactaatctataatctaacatgcgatcattataattatcttcccgttaaaaggatttcgtccttaaaatctaacctgaatagctctagatattgagctctcataccagactcaaattcccaagtggcttcttccaccctactgttcttccagagcatcttgacccaagatatggtcttgtttcgaagaatcttttctttcctattaaggatttgagctg

SEQ ID NO: 124173 - DNA, 595 bp, Cannabis sativa
caaagattcccattctattttttttttttttttagtttgaaagctttcttaaaaaaatgatttatttatttgtttttttatatactagttttgaatcccaaaaatcatgcatccaatcacttgagctaatctgaagtagtttgttgaaatatattaattttatggtataatatatatttttaatttatatttatttataataaaatgtgatttcttaattaattttaaaaatataaaggttgactaactcataaattcatcattagaagttaatagcaactaccttaagaaaaaaataataacaaactataccatcttagtttcagtttatatacattattatgaaaggaaatatatgaatgttagtattgatatattaatttatatgcagggtcattctaatccttttagaagttttagtctttctttaattaaggattaaaaaaaattcatacaaaaaaaaaacaattcatataaagaaacgattaaaaaataagctaataaggatttttgacttcttaactttgacatgtactaaatcatatccctgaacttttaaggtgattaaaaagttactgattggaccctgtgtttt

SEQ ID NO: 124174 - DNA, 769 bp, Cannabis sativa
ttttttttttaaattaaactcttaatttagttagttataagtaattaataaattagctcttgttttaatcgacttttaaacatattcctcgttattattttagttaaaacaataaaggcaaataataaaaaaaacaaaaatattaggatgcatttgataacattcagttttatgttttttattagttacaaaagtaaaaatactttctaaaaatattttctataaaattgtttttattttttaattatttagttgagaaacaaaatttaaaaaatttgaaaaaaaattatttttaaaattttttgaaacaattttttattttcttaataaatattttgggcttcaaccccaacctaaatcttaagattcggactccgacctctatctcggtccgggacggaccacccgacgccaaacccacatttagatttgacttaaataaaatcaaaaaataaaataaaaacgaaatttatatattattttctttttttacaattaaaaaataaaaataattataaaacataatttaatttttaaaaatacaaactttatttttatttttatttttttcattaaacaaataaaaaattgaagtgttaccaaacccttttaattaggttaattaataagaaaccaatgtatacctgtgagataacaccaagaactccaagtgagactttggctgcgtttagttcttcatcaccttccttgagctgtcggactttgacaaatccatccacctcattgcccggactgacgatcgtaagcc

SEQ ID NO: 124175 - DNA, 870 bp, Cannabis sativa
aaagtatgagatatccgccacataaaaacttcaacttgggcccacgcacccactctcatatgagctgttcacatttggattctacacgacaaaattttattaggaaaatttgatattttcatttattaggcggaaacaaaatagagatcagggtggactcgaaccaccatcctctcgaaacccaataagaaggcttcgagtgctctaaccgtttgagctaacagatctatcattagcagggccaagcaggtgaaaacagtattatattagagaaactaaaacaccataatgtttcttagcaggtgatgattggaagaaaaagtttcacacaaccaaaaatgaaataaattagaacacttgattattttagaaatacattttcttcgataagtataatatatacttttttgtttaagaacaattttaaaaaccaaaaaatttacgtataaaattagaccttatttaatatagtatcttagaaaaagtttaatctaaacatgatcaataaaaatacatttttttagacgtttctgtctcgttatctccgtcacatactatttcaatttttttcattttcaaaaatttaagctaaaagaactttttctaaatgtgataacggaagtaccacggaaattagattagagatctccacacttacaaaaaatttctaaaaaacctcatcattatcacacgtgaattttaaaaaataaattgaaaagcaaaaaaatgaaaaatagaaacaaaagaaaataataaattaaatataattcattaattaaaattcataagcacagtaaacttcttcatacagccaagcattcgatacattcaagccaatacagtagaaattgaaattatagcactaacaag

SEQ ID NO: 124176 - DNA, 805 bp, Cannabis sativa
  modified_base (738)..(767): a, c, t, g, unknown or other
ttaagggcccaaaaaaaaaatttcccctatggcccactttatttcaaggccggccctaagagttagtattaccaatgagtaagtgatacacactttttactgcaagtgtacagtgctattaaagtaaaattttaattataaaaaagtcatcaaatccaaagaaattaattattaaattttattttagttttatgttttaattagacaattaaaagtaaataataattaggaatattagtatctaaactactcaaactacacatttagttcgcgtgaccccacaaatctaatttttgatagtaaaattctctaaactcatattttgttttgctctctattagaatgctacctctccttcgtttgattatcaaagtatcttacgtggcaacccaaatgtgtatccatgtcaattgttaaaggtcacgtggacagtaacatgcacaaaaacgtacagatgtcaaatttttaatggtacacataatattaattatttaactataaaaaattatgaaataagaaaactaattcaaaatataaacaaaataaataataataattttaaaaataatttttctttttttcctttttgcttttttttcttttttcttttttctttctctcttttttctttcttctttcacttctcgctagaacttctttctcaccagtctcattctcttatgcaaatctcgacctccaagctctggtgatagcccaactgttgggttttatgccctnnnnnnnnnnnnnnnnnnnnnnnnnnnnnntcaatttagaagtgaagtatgtttacatgtatgttaca

SEQ ID NO: 124177 - DNA, 939 bp, Cannabis sativa
acagggatggggcggggatgggggtataaataggtagcggggatgggggcggggattgcattccccgtacattaaccgaccaatttccatctctaggcgagagggagcagtcgctcctgaaaaaaaattgggataaaaatataatattaactttggcatgatagttaagttatattggacatattatagagatgaagtgttcaaatcctaacaaaaatatgtttatttttaatatttagtttatttttaccccctcacacacacaaacaaaaagtatgctccctcgactttaattttgggtcagtcactatcttgaactataatctttgtagagtattttcttaaaatttttcctgttgcaaaatttaccatgaactatgcaaatcgttacaaatattctcctccaattacatgcttgcttatttttaaaataatttgattatatgactatgcgttacaagtataattgcactaaaatgacttatttaataactctaaattatctaaaatctattttattggcattaaacatatgaataatagctctaaaaatgcacacataactctcataattagactgttatttatgtatttatttttcgtctggaatttcaaactgtgctaaattaatgttatattagtgttatatcaataaattatttaaataaatgaccagaacccaactacaaaataataatttttatgattagaagaaatttagcaacagattctacaaaaactgtataataatcataattctagaaataaattttatttattttatattttaatatattatagaacatatagcactgcaccaattcaaaataatcaatatatataaataaaggaaagcacaaaagatcttaagtggcatcttatctttttttctaactatttttactattttctaacactttcacattttgttaaaggaaa

SEQ ID NO: 124178 - DNA, 1898 bp, Cannabis sativa
  modified_base (33)..(42): a, c, t, g, unknown or other
tgtgggattgtacagcttacccggtatttcccnnnnnnnnnnacgggactattgactgtcacaaggactaaactataacattctgtcatgaggatgccctccacataccaaggccacacaatgaccctctggcgataacattccaaatttctaataggagggtaaggagaatattggtcgataacaagaatagcgtgaacctattgtacaaaataaccctagaagaaaaggggttaagtgtgagaaacttgcaattatacagtactaatttggttgggttcacaagtgacagcatagcgagcaccaaaaacatctcccattgacactgggggaggcaccacagacagccacccaaatgatggagtttgtgatagtatacgttgggggcaattatatctttcaagcatgtagccctaatgttctaactactaccaggaaggggatagttaaaggagatagccatgagggtacgatcccaacaaagagctcagatgttatttgtgtctgaagttaatgaagtggaagtggaagagataaggtgatgaccgggttgacttgggacctatcgaggagcttgaggaggttgttctcaacccctaggaatgaaccaaaacagtaaagagcttttaaataaagatattaagaaggcccttatccagttcctctgtgataatcaagaagtgttcgcatgggtgcactttgacatggtggtataagtcctaatgtaatgactcacgtactaaacttaaacaaggacatactcgccaagtgacaaaagaggatgttacttgatgaattcagatctgtagccttgaaagaggaagtgagcaagatcttggccagtaatttcatccaagaaaccttctatcccatatgggtagcaaaacccgtattggttctgaaaccaaacagaatgtgacatacatgtattgacttcaccaatttaaacaaggcatatcctaaagattcttcccacttccttgcattgaaaaactagtagatgctactgctagccatgaactcgtgacttttatgtatgcgtactctaaatataaccaaatacccatgaatgtggcggaccaggattacacgagcttcactactgacatgtgactctattgttacaacgtgatgccctttgggttgaagaatactagtgctacatactggcgactggtaaataaactatttgtggatcagattgggatcaacatggaagtgtatgtagataatatgctcgttcattctaaactttccaagagccacgttgacgacttggaggagtgtttttatatgctgaaaagatacaacatgaagttgaatctgcttaagtgctcgtttggagtatcatcaggtaagttcattggctttatcgtcaactaacaggatatcgaagcacacttgaagaagacattgattgacatgccttcttcaaaaagaaataaagatgtccaaagcctgacgaggacgcataactacactcagccagtttgtgtgtaagtccaccgacatatgtttaccattctttaacttattgcgaggaagcaataagattgaattgacaaaagagtttgaacaagtgttttataggcgttgaagaaacacctaggtgaacccctaatattatcaaaaccaatcatggggaggtgttatacctatacttactgtaactgaacatgcactaagtgtcatattagtgtgtgaggagaaaaagatccaaaagccggtatattacatcaacaagcagttttgtgggagcagagttgcgctatcccactatggagaaacttgcctttttcctagtccattcgttaaggaagctatgaccttacttctaagcacatcccatccacatcctgaccaaccagcccctacgacaagtattaatgaaaccagag

SEQ ID NO: 124179 - DNA, 548 bp, Cannabis sativa
aatgctcctactggccattgtcctcttaaacctggaaaagccttctttggcggcgtgagctccttaagcgtggtctcatttgtaaggtgggggacgagttatctatttccctaacccacaataagtggatacatgggctctattccctttccttcctttaaaacattgacccctcaaacctgacaatttccttctttctagatagtagtggcaattggcatatccctatcctgaagcaataccttcctttttaccaagtctaggaaattcttaaagttcctatcgatcctactaagagtgacagtctcatttgggatcatcagcacttggggattttcacagttaattcggcctatcaccttgctaactccacccctctcccttctctggccacctcttctaaccccatggatcaaacctcttggtggaaagctgtttggaatggaaaaattttaccaaaaatgaaggacttcacttggaaagcctacaaccatatcctcccaagctctcttaacctccatcataaaaaaccctccctcacccctact

SEQ ID NO: 124180 - DNA, 4328 bp, Cannabis sativa
  modified_base (2265)..(2270): a, c, t, g, unknown or other
  modified_base (3284)..(3298): a, c, t, g, unknown or other
aaattaaatagttggaatagtcgtttgttttctaaggctcgaaaagaggttcttcttaaagctgtggtccaagctcttccctcttatgctatgttttgttttaaaattctagtttcagtttgtaggaaaatcgaaagtcttatggctcaattttggtgggggtcggtgggtgacaaaagaaaaattcattggaaaacttggggaaacctctgtcagtcaaatttttctggtgggatgggatttcgttcttttattcatcatatcaagccttgcttgctaaacaagcctgacgtattcttattatgccagactctcttgttgccaggttgtttaaagctaaatattttcgacataagtcctttcttaatgcctctaaaggtcattgtgcttcttttacttggcaaagtttgctttggggacgggatcttcttaagagaggtcttctgtggaaagaaggtaatggcaaatctatctccactgtgcactcttattggattcctggttggagactcatctcttacaaaggtaatgttcaacccctagatcctacagtttcttattttattgatgagaatggttgttggcgaaaggatcggttattggatttttttgatcatgatttagtcttagctattcttgctgttctgattggcgatccttctcttgaggatagtcttatttgggggcatcatctctctggatcctttactgtgaattctgcataccatttagttaaatcttcaacttcttttcctgcttcttctgacaatcattccttggttcgttggtggaaggttctctaaaaccttaagattcctcagaaaattgagcactttatatggagggctttccatcatactcttcctatcgctcttaatcttttccatcggcaaagtctagcctctcctctttgttctttttattctggaagttcagaatctgtatcccatgcccttttatagtgttctagagcttcctttaagtggagtgaatctagatttgagtccttttacttaaataataaatgtaatgatatcagtgaatacattcttaggggttttgatgctttgtataaggagaagttaagaatctttttatgtattctttgggaaatttggaatagatgaaacactgttttatttaacaagaataaggctatattgtcttttgttgagtttcaaattaaagccctattacatgactttgatgaagctcaagactgtagtgcagttcatttgggtcagagttcagagcttgcaaagattgaaggccgaagaatatcgaattcagaggaccatacttttttgcttcaggttttttaaaatgaaatgtggatgctgcagtggataatagcataagtaaaataggcataggggcagcagttaggaattctcgaggtgaggtggtggcagcagtttcatctcctttgaatggtaacttatctcctcttttagctgaagcaaaggcgatggttgtagctctcaacttgtgttcaattgttagattccctttgtgtattgttgaaagtgattgtgaagttttaataaataaagttaaacataggtggaaagataagtcttccctttcagacttagttagtcaaattgtatcctctctctaattttcctactgtttctgttcagcatgtctataggaatcttaatgatgttcctcataagttagccaggacagctttaggacttcagagtgaggtcatttggaatggtaatgttccaaatcttgatatattgtaacctgtacttacttcttatcttcaagttgcaatatattgttctttttcaaaaaaaaaaaaaaaaactaaacatcaattaaaaatatcaatcaatcaatattaatatatataagaaagtttgaagagagttaaggtgactttctataaagatattattattctctctattttgtggtggttttaaattttttaattattttttatactaatattaaattaaaactaactaattaaaagaagagtattttgcggcataacctccttaagtggccaagtttttgtaactaattcccaattctaaaattttggcagtaaaaccccctaaactcgtgttctgttagcagtttaacatttccatccatttttagctgttaactgtcatggtggaatgtctacgtggacacagtgtacacgtggcacaattttattgatccacgtaaataaatattaaaaaaaaataaaaaattaattattttaaaataataaataaaaaaaattatttttctttaaannnnnnaaaattaaaaaaataaattaaaaaaaaagatactaactccctaatttcctcacgcctttcttcttcttcttcttcttctatctttttctctgctaaaaaatttcggtgggcttattcctagagaactcagcaatatcagagccattgtctagcctgatatctggaaagcaaatccagtaccatctttggttaattgcacgttacaccacaacactgtattgggtgaggtggctaccaatgtgaacatagcttgaatcaggaaatatcccagaaaatccaccatgggcaatcaccacaggcaattttcttgaaattaaaaacaaattttttcaaaaagaaaaagtaagagattattatcttaggctttcaaaatcattatgtgtattgattaattacaatccagagtgttttcattcaataaaaaataaatctccacctagtaatgataaaaggaatattttaataatcttaatgcaagaaaaacgctgactgttgagaaaatctctttaaccaagataccaaacaaacaatactcaattctaacagcataagaccagaatgagcttgtcacaaaagagccatagaaacacaatatacagtatcgttaagagttagccataaagattattcttctcctatctcgaacggaggtgcttgtagtggcgcgattagtggtgcgagtggtggtgcgagcggaggtggggtttgattactgttgggtccgattgggttttcggggttgattactgttgggttcgattgagtttgttgggtttgattactgttggatccgactgggtttgtggggttgattactgtggatagtggctgtgcgaaaggaggtttaggttagggttttttttagccaagaaaaagatagaagaagaagaaggaggaggaggaggagggcgtgagggaattagggagttagggttgtttttttaattttttatttttttaatttttaaagaaaaataatttttttatttattatttttaaaataattaattttnnnnnnnnnnnnnnnatttatttatgtggaccaataaaattgtgacacgtgtacactgtgtccacgtagacattccaccatggcaattaacagctaaaaatagatgtaaatgttaaactgctaacagaacacgagtttaggagattttaccgccaaaattttggaattggaggttagttgcaaaaacttggccacttaaggaagttatgccacaaattactcttaaaagaaattaatcgtcaataactttagtattttaaaacatagcttatagtattctaaaataaaaatcattcatatatgacaattacaatattataatatatgtactaactatttgaattctactcttaaaaataaaaactatttgtattctttgtatttattatgagactttttatcatcaccaaaactcttaaccattcttgccatactatgagtccgtttggcacagcttttggaaaagctaaaagctgctttttgaaaaagctgagataaatttttttgaaatttttttgagaagctacagctaaaagctgaaactgctctaacccaacttttagaaaaaactgttttgtttaaaagactataataatttctttttttactaaaaccatatttacttatttattacatattaaaaaattaaaaaatttaaaataaactaattataataaaataaataattattttttttaaagaaaaaataaataattataaatctcttatttttttaaacaaaaaataatttatattttattttattattcacaaacaacatcaacttagaatttttcttatatacttgagttttttaatttttttaaattttgataaaacataataaaaaaatactataaattatttttatcaaatacatataaatttatatttaaaaaaaaattaaaaatatataaaaaataaaatattctataacataaattttacatatttgtgattataataaactagattataacattatcattataatagatcttaacaactcacagtactttgaaatttatagtttaccaaacactca

SEQ ID NO: 124181 - DNA, 704 bp, Cannabis sativa
ttaacggctaaaaaaattcaagaaacatgatttggtacatgtcaaagtttaagggaaaaaattcttaattagcctttttataattatattaagataaagaaaatgagaacaaatatagaattatactaataatcatataataatgtatatatgaatatggtgatgtgaagcaccatgagtgccctttaatacatatctttaataaatttaaaagcttaccttatagctccttaccctatggctcttcaccatataggtattaggcaatggtactctatgggtatttggcctattgtgtatgctaccgagaaaagtttgaaatatgaagagaaatagattttgatagaaaagcatctttaagggcaaactctaatacttaaatttatatatagtgtaaaaataacataaaaaaaaaatataattttagcattaattttttttttttctattctaatcacaatattaaaatatacactaaaaaatattatttattattatattattttattaaactatcttatattatatttttttttaataaaataatatttttatgattttttttacgcatttttataaaaaataatataaattttacccttaatatattagataatttttataaaatttgagtcaaatataacattaacaaatttagctcatgtcaaaagttagtatatcatgtaaatttttctattatatac

SEQ ID NO: 124182 - DNA, 862 bp, Cannabis sativa
aaaaaaaaaaaaagaaactaaaacaatgaaaagcaaagacaaattttccccctaatgaagactctccaaataacaaagacataaaaaaggaaaaaaaaattaaaaggaaagtttccatttgccttgaaaaacgtgatcagccacagagccttgaaaaacatgatcaacgtaatttgagtcttaaatgagtctactttgatgaaaacacactatcgaaaggtgctacaaaattcatggatatcctcctggtttcaacaagaacaaatctaaagaggccagtgcaaatcaaatacaaactatggatgacagtagcagcaaccaacaagaaactcaggctctcctcccacaattgaccacgactcaatatcaacaactactcaatttgcttgcttcacagcaaaatggtatatataattctgaaccatctacctcatctggtaatacaggtatcttactatcccacaatactcaatctattttacataattcttggattatgaattctagagcaacaagacatatttgttccaatatgaaacttttccaaagtatacgtaagatacttgctaccaaactcatcttgcctaatggtaactgtttttatgttaatcaaagtggcactgtcattctaaataacaaaatcattctcactaatgttctttatgcaccaaacttcaaatacaatatcatttccacaagctatatgacaaaagatattgttgtctctattattttggaatctgatagtttttctatccaggacaaagccaaccggaggatgattggaaaaggtagcaatatcaatgatctctatatccttgatgaggcaccagatcctttccaagttctgtccatttcagct
